United States Patent Application Publication US 2015/0376612 A1 - sequence listing, part 49

SEQ ID NO: 116150 - DNA, 1428 bp, Homo sapiens
cccaaaatattattcaaaaattacttcatggacatgataccctttatgatggaaaggtcatctctgaagccttagttgtagagcacagcaatagaaaactttacatcagtattatgacttttatattccactatctgttttcttaacaaaaatataccacatactatgcactaatcacagagtttttcttttatcagcttccaacttttagagatgtattttttgccatagttctcctatatgccaatattaaatttcttcttggttataagacactgtatacacgatttctttttagctatgtgatttttaaactttttacaggaatagtagaataatatggcatgtccataatttatattttcatacctggattactccacttttatgttgtgtatctttctagacaaatttcttaaaaaattaagatgttctagaaaatatactattttatgttattattcagtaatcttatagctgcagatcattgcttgaatctgattttcacttcattcctataattttatttatttaaagtattggtctttgtgttttttcttgttcctttcctgttgtcctatctagtctctttgggtgtcctctcactgtccagtttttgcttatatcaagtctcctgggattgtaggaaaggagacttaggtaatgttatggaatgggttgtatagagggcacatactagacctgtttcaaaatattggtcatctagtcttttcatttaatatcaggatgtttaataaggtccatttttcagtcaaacttttaagtatttttttcatgtattcatttttatcactgtctaaatttgtaccttctgtctatgtttgtgttatgctcatagttacgcttttagtaactttttgggtaaaatagggaatgtttctaaagactcataagttcatatttttctttaaggaaattaaataatttatttgggaacacttttaaatataattggtcttgccttcatggaactaggagagtttaattaatttaatttatttgttcaatgtttaatcacctggttggtaccatttttagcaaatttgtatttttttagacatctttaggttttctcctccatttgtcatttagacaccacttaaatgtattgcatttttcatagtgttaagtctacattgtatacttcttatttgaggttgggaatctttcttaaaaatttcgattgtaaatgacctttcaaatttcatgtatatgatacaaagtgtgtatatttctgtaaacaatagaagctttcctcatttaaaaattaggaaggttctaagcaaagtgaaattctctagggccattataaaatttataaagatattttaacttcctgttgttaaatcagtgatttatttctttatttttaaatttgtgtgtgtgtatatatatatgtgtgtgtgt

SEQ ID NO: 116151 - DNA, 1030 bp, Homo sapiens
agtgttcatagttctgttatttttatgctttatcttgtaggtggttatggcagttgctcagctgtattggcacatatcaccaaaatctgaagctggcataatttctaaatcactagtgcgtttacttcgtagcaataggtaggtcatgattttatatatattttttcttttgtattccttcaaaagtaatgtttgaacaaatgtaatctttcaggcatttaatatataactctgactatattttaatcaatcgatcagtaagatttcatacttaaggggattattataaaagtctttatgcatttatctcaaacttaatgataaatactgaaactttttaacctcaagcccaaagatattgaaaatattttgtggcataacactagagtgtcactagtagcctagtattagtgtttgaaatttttaggtatggcaataatgatgtttgggagttttggtaaatctggaatcactgaaaaactatactgaagtactatcagattgacttactcaatgtattaatacatggttttatatagagcaatgtgtatgctaagtaatgtagtttatgccagaattgtgcttcctataaagctggaatatttaattactatgctttgctccactctaaaaagagagctgtgtttttaatagctactcattttaaagattgcatactcttagtttcagatagacagacagaaagagcatgccaccttctttgattttacctctttataatttagtggtttaggttaacgattcaaaacaatttattgagtttccatgacatataacatgagaatcatgatttcaggtttaattcagacatttgtttctgtgtttaagaataccttcatttcagctatttgacataccttagctatttttcagtaattagttgttttaatttgaaacaatgtttttcattgagtgcttgtttccactaattgcgttggaaggaaaaaactatgtatttatttttgcccttaactggaacttagtccacaattgtagctcttgactggct

SEQ ID NO: 116152 - DNA, 1522 bp, Homo sapiens
attatctaatgcattgcatcttttaaagcctgtcaagtcttgcagaatgtccttctgggtttgtctgattgctgctgcttctttttattttgttattttgtttgctatacctactggaatgggatggttgcatcttttatagtgtcatttaattcttttatattctgtgtttcctgttaactggcagttatatccaaaggcttgacggatttaggttaaacatgttcttaaagattttaattgagaaagtattcttaatgaattgttctgttcagaacaattcttaatgaattgattcttgagaatttagagcttacagctttgtatatccaagttatcaacaacaatttttgtctaatacctaatggtttagtttccaaatcattattcagtaatcatgcctagtcataatgaaaatattatttcatggctgttgtaaaatatgcttatattttaatgtactcagcttagccagatgctagttaggtagctgtaatttgccatcttaagctgtactttatgagtgactcactgttcatttaactaggtcttagaaattgattttatagttcaaatacttatggatcaaaaacgttttcaaatagtgaaacaaatagtggcagtttgtacttctggtcccattttgtttgggttccctgcttacttgatgctgtaatagaggtggtttactttttgtgtcagtgtattttggtaccttgttttgggatgctgctaaatatgagtaaaggctaacttttgaagaattgtggatagatttttttttaacctcgtacttaagtttatggagagactttgagaatttctttcaggaaacataatacatcattgctatgtagtttgtactggagatagatactgaaagcggaatgttaggaggctattctaacagtctaaataaggtgacagcggcatgaatggttaagagtagaaaagtgtttataggatgcgctttattatgaacaggcatgatgtaactgtagaaggtctataaggttgtatatttttagtctttttggattttgaagttttgggaacttttttcatggcgtttacaaattagcctatacatttcaaatctgggtatcaaagcgactttcaactgttggatttctaaataccgaggaaaaagaggctcatttagtccttttggattttggagtaccctaatatattagaacagatggcatgccaaatggcagctagaattttaaagacattgacatgtataggaagtacagtttgctttcttgccagtaggattggacttttatttgtaagggaaaaggatttactatctgtaagatagattaaaattaagattcagctttcttttctatcatttactaatacttattagccaggtatatgcgttaatatttttttaaatgactgatcttggattaggtcaatcattaattgagattcttttattttataagatttaaaattcaggagagtttattttgtaaccaacttatatttgcagttcacaagtgaagaa

SEQ ID NO: 116153 - DNA, 1864 bp, Homo sapiens
aaacttctgctcagattttttttctattgtataaagttataggcaattttgccttagctaatcactgtcaccatttaaatttttaaattttactttcctatcattttcagtaactatatgcaaatgatcctttgcttgtaattatatagaaactggagttaaaatatatagtgtacttaccatacctgctaaaaatatgtaacccgtagtaaaatctctgcttttgtatatttgtctgtttatttgtttttctgttccttgaattttatcttattttagataaaatttatttttaaagccattgcaaaggaaagttaagttttacaccatcatatacatttgttttttgacagataatttgaaaaattgggactgtattcattcttggtgttttcacatgttaactccatgaacatgaattaggacaaacatgaggtgaagtctggtcattgtccctggcatactggaatgggctaagtcatttcttttctttgccacttacttgcaatccaaccttggaattattcgaaatgctgtgctcattagactaatttagtggttttccagtgtgcacatcagccctcaggatgtgctagcactgccacaggaacgagccaagcagggcaggggtgctctagactgtgcagctttttgggcttttgccactgtttcaaacacagaagccttttttgccttcctttcttatgcagcgttgaatttgatttcctttgagaaagatccattggcttaaaagacagatagaaagaaaaccactttaaatagaagatttataagtttagctaatttgattcctattattgttgttgttgttttttaattatagaagcaattcaagtacatgttcccttctcgtaacctcttggttgacgccttagaggcaattattggtaactgtttaatttcagttactctggtggttataaattttactttggataaaacattttgctttatttattaatttaagttgatatcagttgacctcaattcaaggaaaaattattcatcgattgtgtaagtgctatttgagggtctcgtttagcccagaataatcagtataacaggcttttgtctacatacgtacatatgttcagttcagaagcagtgtgaaagatttgaaaggctcagcccttattgcagtattagaatcaaggattgtacaatatgttagactcttgttataaatatattttataaaattaagattcaaatgagtggtcaacactaggaccatgtctgtgctctcactcttccagttaacccatctcaggcttcctctgtgctaattatgattttgttttactgagaaactttggagtgagcagtgtagccatttatagtcttcagtgctttctgatctaggcttgatgttgcttccaactttttagcgactacacatggtagttttagctttagaagttggcagacgaggccgggcgcggtggctcacgcctgtaatcccagcactttgggaggctgaggcgggcttatcacgaggtcaggagatcaagaccatcctggctaacacggtgaaaccccatctctactaaaaatacaaaaaaaattagccgggcacggtggcgggcacctgtagtcccagctacttgggaggctgaggcaggagaatggcatgaacccaggaggcagagcttgcagtgagccgagatcgcaccactgcactccagcctgggtgtctcaaaaaaataaataaataaataaataaaaataaaagaagttggcagactaaatctcaaagcagagtttgaccatagctagaagaaactgagaagtatttggcatttatatttgcttgctctttcttatgtgatgttgtaaaaggaac

SEQ ID NO: 116154 - DNA, 1413 bp, Homo sapiens
gaaataaacacatcagaatttacttctcttcagaatagtattttctagacatattagaactattaaaattattctttgacgaatagtcaccataaagtttgttattcaaacatgaacattcattttaattgaatgactgaatactttaatactgattggcatgaaactgattactataatgcctgagtaagacctttgatgtaggggagaaacattttttaataagttactatttctttcttttctagttggtagctggcagtgttgtgatggcttttgaagaagtatgcccggacagaatagatctgattcataaaaattaccgcaagctatgtaacttactagtggatgttgaagagtgggggcaggttgtcataatccacatgctaactcgatatgctcggacacagtttgtcagcccttggaaagaggtaagtgttgaacagtcttccactttcaagtatactaagagaatggatgagctttttaaaacttgggcaaaaaattaggagtagtaaactagagaaatctgcatatttaaggaagactcatttgtctcttgttcttttactaaagcaggcaaccaatataaatgcaagcataattatccattattttggcactgattgatacatatttattggtgtaagtatatacacttttagtttgatactggcaagaggcccttgttaggaggagcagcatgacacagtgtttacagtgacattgccaaaccatggatttttttggttactagttactttcacgtctttgagccccagctattccaggtactcatttgtaaaaaaagtaggtgatgtgctcctatagcatgtgaatttatacctaaagtaattaatttcttgcctctatagataaatattgttgaacttttaaactactttttcctagttttgtatttataaaatgtttgtgttcttctcttcactttagctggtagcatttagtaaaattaataatttaagtgaagctatttgttttctttgtgcagattaacattagaagtacgccttattcttttttttaagtatgccttattcttttcatcatattgacaatttagaaaattttatcatataacttgtaattaagatccttaggatgtatacatttaagatttaaggtaattttaaaccagtttaaataaatccttaaatgttgtaagaatagcacattcattctagtcttttgatgtcttatctttttaaaatacagtattatagattttaaaaaccaatttgtgtaaaaaaaaaaaagatttttaaaaagctcctgttatatcaaagtggtctgtatacatacttatgacaggccttgagtgctcagtacatcttgcttttgttaattagaaaaatgtaaataacatggaaaaatgtatgatacatgctttaa

SEQ ID NO: 116155 - DNA, 1030 bp, Homo sapiens
atttggaaattctccatatttgtttttgggaagtatgtatgcatagtaaaataatgactgctatctagttatttttttcctcccagttgaaaagagtttgtggtttatctacttacagtcgctttcttgaagttttccaactcttttagaagtgaacttgttctttcagtactatcttaactaaaccattgatatctggtttagttaatatgaacaatattagagggaaagatgaggacacattcatgagaaaaaccatcccattttatttgtttttctttatttctaacttataattcttgctctcctttccctctttaaaaatttctcaacatccttgaattggtgagcatcatgtaaagctagaattaaagggaaaaattaatatgttatttttgtattttttagccttgatccagagcagaaggaaatgttaattgaagtaattgaaaaacttctgaaagataaaagcacagtaagtaatgtctttttacgtctttgacataaaaatgtactttatttacatagtatcatttaccattatatattttatatagttgtatttattgatttcaaaatggtataaatattaatggcacacaggactatttttaaagaacaaaaattttcatgtaatgagaaagactgcatttggagttttagatcgttatgtgtttcttcatcagaatctgaaaaaaggcaagttgagaaaaaaatctttaacctgtggctaagtggttaacatggtaagatcaaggaatagaggtgacctatgggggatgtgagttactagtgtactagtatcttagatggggcttttgtacccactttatatttctcaaaactactgaggaaaaggattccagctcatcttaggatgctatcatcagggagtatgtactatctatgcatggcagctatctaatacagtaggcagtagccctgtgtagctgtaactattggtttatggcttagcatttgatctatcctggataatgttcaataaacatttgattagaatgtgtattct

SEQ ID NO: 116156 - DNA, 1079 bp, Homo sapiens
tctgaaggttgagaagcactaatttaaaccaagaaagtgtaaagagtctaatcgtgaatatagatggaaagtacattgataatagagatggggttctatggaatgaagtcattactaccttttactacagttgtaaatttcttgttggatttttaataataatactgcaatgatgtcattttcaaatgagaagatgtgcaattggggttaaaaaacagtgatttaaagcattcttcttttataaatgtatatattataaataaaatataatttttttcctaggttttcagatgctcttaggggaagagttgtctcctcttttgttaggggtaccttaatagaaatatctgcggactgccatcataggccacaacatgtagtagttaggaacatgcccctgtttgcatcctgattctgcacttgctagctctgtgactttgggcaagttatataaacctctgagccttactttccttatctttgagagggagataattgtacctaggatagatatgagaattaaacgagtaatataatgtagatgtagggccttacacatttaaattctagctggaaagttatagcagattgaggtgaagaacaaaagctgtcgcaggcagttttcctttcatattctgtatttcctaattaattttaatactagccagaatgacaagggtacttttagaaaagaaaggctgggctgggcgtggtggctcacgcctgtaatcccagcactttgggaggccggggtgggcggatcacctgaggtcaggagttcaagaccagcctgaacaatatgatgaaaccccgttctctactaaaaatagaaaaattagctgggcgtggtggcatgcgcctgtaatcccagctactctggaggttgagacaggacaatcgcttgaacccaggaggcggaggttgcggtgagctgagatcatgccattgcactccagcctgggcaacaagagcaaaacgccgtctcaaaaaaaaaaaaagaaaaaagaaaaacaaaggctgaggaacttctccagatgaaagaagaccaaggagacatgaaaacttaaatatgatgcatg

SEQ ID NO: 116157 - DNA, 1024 bp, Homo sapiens
ttattaaacactatgtgcttgttatatataattctgaattgataattttcaactactctccctttgacaccttatggccatgatatctgagcttctaatttgatatgtttattagttttatggcctgtggtataagaaagtccaaatatctggaaaaaataaacatttaacttagaaaaattatgaggcataggtgaagcttgtcttagtattatcaggaatagagtctcttagtagcaataggaataattgctaacattaaaaaaacctgtctgaccaaggttattagtgccttgcatagatctactccgttttatcctcacaaataaccctgtggggctgtttctgtcattacttgtattttatatatgaggacaagatggcagaaaggttaaattagctgatcaaggtcacacagccagtgtgtagcagtcagaatccaaagctaggttgcttgacttcagaacccatcttagcccattcagcgccatctttcctgtttgatgattcctccctctgttttgtctcttaatatttttgactccttatcaacatctggcattagccatcctttgggaggtacctagtattggcatattttttttcttttatgttttagttatgggtagaaatgacgaagtccttagaaattggtggtaaagtagctagttccctgaggacttctagttcttgttgtaaacagaaaattccataccaattattgttccttcagaactgttttactattcaaatagttatcagtaggagaacttttccatttgctcatattttccctttacaattagattctggtagctgcctaatgttctgttacaaaaatgtcaatataaacataattattggtctatttgttttggatttctttcgttctttaaataccttgtttattttatttttttgaaacatggttaagcctttaatgttttgggaaaactgacataagtttcttaaaacttatgttcagaaattgaatgtttcactcctctcaagtgcaaaatttcat

SEQ ID NO: 116158 - DNA, 1021 bp, Homo sapiens
aaaatatgagtcattgctaaatatttaatgatgtctttcctctgctcacaactctccattggtctcctgcttcactcatagtaaaagccaactcattttacagtggtttatacatttctgaccttatctctcaccattcttcccctcacttactccagtctggctctcctggcctcctattcctggcacatgccatgcctaaaccattgtttccctagctagtcacatgggtcccttcctctcttcctttgcatccctgccaaaaggaaggccttttctgaccaccttatctaaaagagcaactcccacctccacctcagcacttctcatcccccgatactactttatttttctccacagtagtctattgccacctcactattattgtttattgacccttgccccattagaaggtaagcagcacatgggcaaggactttgtattggttatggttggatccctaaggcctaggatggtccctgctagaaagtatcttctcagcaaatatttgttgagtgaatttgattgtggtgtttttttccttccccatatttgaataacgttctgcggaataaagttagatagtcatggagtaggataccataggacaggatgtctgactttaggtaatcattgaatgaatgaatgaatgaatgaatgaatgaatggcaggggtcctacagaacatttaatccctctcttttcttatttcaaagatgagaaaatggagagaggtgtacaaatcatagaaagatgtcttagcttcagtattttgtaaaccctccatagtgctcagcaggtttcacaaaatactcaaaagaatgtcacaggtaaggaaatagaatataaaaagactagcttgtattcaagaatattttaaggctatcatatagaaagttcttataagaaattggtaacggggattctaatgcttcaagtatcacatatttatataacatttgttgtaaattaataaagctaatatctttttaaaggcagtttattagatatggtatgtaat

SEQ ID NO: 116159 - DNA, 1702 bp, Homo sapiens
gtggtgatgcactcctgtaatcccagctactcaggaggctgaggcaggagaatcacttgaatccaggaggcggaggttgcgtgagcggagatcacactactgcattccagcctgggtgacagagtgagactctgtctcaaaagaaagaacaaacaaacaaaaacataataaaattaaagaaaaataaaatgaaaaaggcacacaaaataaaatacaagccccactttttaaattagactcaataaacataaaattacattgtcaaattgttccgtcacggttctcaatgtgcttattctgaattttggtacctatctcctcatgggttggtaacaaaaatttgtgaattagtcatgattcttggaccagactttctcagatcatactttaagtagcactgatatagtgtacagtactacatagtcttaattttccccttaatttatgttgtctttagaaggagtagaaggttttaatgagttatggattatagattgattaaaaagagaggtaatttacactacataatagccctaacacatccctagttcttatatataactggtaaactttatttttcagttatagttactagttcattctggggctaaaataagaatgactttcctggtaatagtaagatttgccttaaatgttcagttatatattcttctctgtcctttgaaacttaaaactggcctattttgaacatgaaaggaaaagttataccatttaacaccacaagatgtcacttatgtaaaaataaagttggtatcctaatactcaaagctagaaagctacaggtaactaggtaaatgaagacacaggtaaattaaaaatgaatatatttgaaacaactattgttttcagcaaagagttgaggaaaatattgctaattcagcattattttgactcaaatattgatatttaacaaaatagtatctaagatttatgcagtaatacatgttaactgatcatatttgaatctacgtaatgaagaaggtagacctaaaagaacttaataaaagttaatgtattttgagggtaaagtaggtgttatggtattaactttcctaaatctttactgttttggtgacaggcaaagaagaatttgggaagaaacatgtaatttatatcagaattttaaatagatccttatgacatacgtgagaagctgcatattacatcaggttgaaacagtgcctaggatttttcttgtctcttccctgaacctcagaattattagtttctcttcctatattaatgcagtatttgttgttgaagactagcttttctgttaaccatgaagagcaaaacctttatctttaatattgagattctgttttcttgtttttagtttcagagagcaggtgcttgttctgggcactctgggaatttgggctttagatgagcaaaccaagtttccattagtttacgagtaagactatgcctggaattagaggttgggctgttctaaaaattgacacttcattcctcttcattgctcacttctctctccagataaaactggtagaggagaataatgggacactttggggaacagaaaaggggaacaagcaggagaaaattgttttcttttttggcatgtgtgtatgtgtgaccacatttcctttctatttagttcctatcgaattctttttttttcttacctaacttcagtaagatttttttaaggtttctt

SEQ ID NO: 116160 - DNA, 1065 bp, Homo sapiens
tccatttggttgttttgtatggattctactaattgttgatttctgtgttgtttcatctgttttgtccatctcttctacattttcctgaccatgttaattgtaattattttaaaatccctgtgtgataactctggtatctgagtcactcatggatctgctcctggtttttttttttttttttttcctttttttcttttttgggcgggggtaatttcatcctgtttttagtatgtctcgtaagttttgatcagatgctaggtatttaggataaaaatgattgatgaagctttgggtgatagcttcttccatacagggctgggtttttgtttttgtttttttttccagccaagcaaatagaatgtaagcagatcattctgatcttgtcaaagctcagttttagactttttaaggtcttgtttatggaactttttcttatactcctcgggcatcttccttagcactctgtgtggctcttcagtaatcttaatggaaagtccagggcattcaccaaagcctctcttctgaggacagacttgacagctgctgttttttgttgtgtttcctggagtcttgccttaggaattgcagccaacattttgcacacagatttttgtgtaccttgtctctggttccctcctctgtaattttgtccttcaagtctcagtcactgtggcagccctggaattcaacatttgtctcctcaagttattaagactgtgacttctccttgggttctgttctcccacatggcaatttgggaaatgtactgagggaaaaagctggtgtgaatgaggagctctttttttcccttgagagagataggttcttactctgtcacccaggccacagtgcagtggcatcatcatggttcattgcagtcttaccctcttgtgctcaagattctcccaccgtgtctctgagcagctgggattacaggcgcatgtcaccacacctggctactttttgtatttttagtaaagatggagtctcaccatgttgcccaggctggtctcaaactcctgaggtcaagctatccactagcctcggcctcccaaactgctggga

SEQ ID NO: 116161 - DNA, 1029 bp, Homo sapiens
ctgttcttgaactcctgggctgaagcgatcttcctgcctccgcatcccaaagtcttgggattgcaggcatgagtcacagtgcccggccattgaaatatattcttaatatagtcagctttatagcagaaattgacagcgtagtatggtgaataggaagaatgttgaatttcaaaacaagattgaaatttaattccttgctttgccattccctggttttatgatgatatacataaaaggcatgtgattttagaatttctcacatgctatgtaatcttatgttacctttatatattctgagacttggtttactcatctattaaatgggaacaataatagctacacacgcttcatagagactttgtgatactaaaataagacagtgttataagcttcagaaaataaaaccactaccacgtggctaaataagttaataatatgttataaacacgacatgttagcggtgagttagtcaatgatgtggaaaggatataacttccaatcccatatctcataactcccattcatgtgtaactacaaagaacaagttcttatgtatcctttcagaaattttttaaaaaaattaaacgatcatatatatactattctctatgtatcttgctttccacctggtatattttaaaagatctttccatatgttgatatgtctttccatatcaacatatgataccattttaatcttttaaaccagcaatcgccaaaccagcagtacccagggacctgtttcatggaagacagtttttccatggaagggggtgggggttggcttggggatgagactattccacctcagatcaggcattagattctcataaggagcgtgcagcctagatccctcgcatgcacagtttacaagagggtttgcactcctctgataatctaatgccgctactgatctgacaggaggcggagctcaggcagtaatactcctcatctgccacttgcctgctgtgtggcatcctggtttctaacaagccacagatgggtaatgttctgtggcctgggggttga

SEQ ID NO: 116162 - DNA, 1077 bp, Homo sapiens
cagtttttctgaattatatttcacaagtgtttgaaacaactaaatatatttacttttaatggcaaaaactgcagttacttttgcaccagcttaatacaaagtacctttaatgtgcaccacataaaaataaatgaaattaataagccctgattcttctgtgtgattatcaaggatttgggaacaatgattatagtacaaaggagtaaaaagtgtatttgttttaaactttttttttttttcaattttcagtcttcttttgtatcctatggctttgaagctgttcttgaagaagcagcctatttctcatttttcctaaaagaaggcaggcttatgtatgttttgctttaacagaaataaaaagaggaggggctaaatggtcagcagtgccagctgctggtgtggaatcaagcaaaatggtaaggcagtttggtgataaggcagttgttggtgaccttggtggtggtgacagcagtgtcaagggatgttgagtgtggaaatcgatggcagtccattggtggatgggtgagaagtgagtaaaagaagatcacttctccgaagaactttggctttcaggtagaggacgaaggatggttattgcagggagacatggagtctaacgagcttttttttcttttagagtagtttctcttttatttttaattatggtaaaatacacctgaataactttatcatcctaaccattttttcccctatttgacaaggtatcaagcaacctaaccattgttaagtgtgcagttcagtggcattaaatatagtcatattgttaggcaatcgttaccaccatccctctccagaactctttttatatgcaccactgaaactctgcacccattaaataaatccctattttctcctctctcctattcctacatacacacagagtcccatctattttgatactttgtatattacttaaataattttggatgatagtgactgcaaatgatttttttcttagcattcttagtattgtaaaacggtttttcattcatgtagcaaaactataaaaaaagtttcaatatagtttggtcaataggatatgtttatgtttcaaaa

SEQ ID NO: 116163 - DNA, 1046 bp, Homo sapiens
tcattgtcaactttacaatatcaaacatgaaaattctattacattcattcttaacctttaatatcagtgattctcaggagagtccagtaggaagattacatgtgtctgtggtttgtacgcaattatagcaactctgactttatctccactactttttgtatctttctgaaaggcatatagaaatgcagctgagtgagattcatttacttagagggatgttattgaatatactttcttaaaaatacaattttattaatagtaacgcattatatttgacctacctcaaagagtcattgtgtctcactatgggttctaaacttgtttgtgtttaagtccattttttattaatacttaattttatctagtgtctgtaccatatttttgggtgtttttttttttcatttaacattttttcatggtctagttgtttagagcttgctctactttctttttgcttatcctagtatttctcatttaaactttatctcattgtgtattttcagtttatgtagttgctcagtgaatatttcttaaatatttatatagataaatcgttcacacattctgctcatattaaagactgtgatttgtgtgaaggtgcctagcaaagtgtttggctcataattttgcttaataaaatattttcagatccttttactcaattcagtgatttagattccattaacatttgctctctcattagccaatgttgttaaaaaatgaagcatgactgattccgtggaccctatacagaaggaaaccctcatctggtatctccattgtattgtagtacagcatcaccctgaagctaattttgtgtagttcacttgggtctttgctgtggttaggattaactgactcggaattgtcatgtaggtatggaatgaactttacaatcaggatttttagtctttatcccagtcttcaaaggcatctttacctcccagtcttggattattccatatgtatggttcattcctctgtgttttcaccataaaaatgcataacaattatagtgtctttatcttgtttttaagaaactcaga

SEQ ID NO: 116164 - DNA, 2153 bp, Homo sapiens
ggaaactccttaacggatcaaaacggatgcaatgggtatccttctccaaagacacacctcaaacgggccgggagccgggcagttagccacccgctgcctccccttccgcagtccggctcgcagccgctcagctacctctaaagcccggagcaggaaagtccgcgcaggcctggatggcccgggtggtaatctagcaggcctgcacactgcgcatgcgcagggggtggactgccaggtcggctcagggagccgtgacgagtccggaagcgcctgcgcgcgctcctccgtacgagaactagttttgttccgtgccctctggactggaaccttttggagagaacccccggcaggaccaaccccgcacccgccagcaccgcggcaatgtccagcaatagttttccttacaatgagcagtccggaggaggggaggcgacggagctgggtcaggaggcgacctcaaccatttccccctcgggggccttcggcctctttagcagcgatttgaagaagtgaggagaaaggtttgggttgcggggatgggagggaggagctgcggactcggaggagtgggcgccagggtgggcttcctggagaggagcggggtcgccctgaggtctgagcagggcagggcggtaacgtgtcccgcgggtgggtaggtggggttggttggcggtggtgggagttgtgggagtttggggcgaatgtgtgtaggggtctctagtagttttcaaactttagtgaaaaggaaaccacttggtgagcttagatcccacccctgaagacactgattgaattggacttgggctgggctcaggagtctgaattttgagcatcgtcttctagtttatttaccgttcgccggatcagactttaatacattccctgattagggtgaaaggagtgttttggtgaaggtgagagtgcgagtgttgcttgtgggaagttattttgtgaccccggagtgtaggagcagagaggtggatttaggctgtttgaatggacaaactggtttacaccagtattaatgttcttggattatgtcctttgcactacagacaaaaacaccaatccaaaataagcatatgaatagaaaatattttaaaagagtgttactgtgaacaaatccaaaacttttacagattaataatgtgaattttaaaaacgaatgttaaacaaggtacacttagttttgtaaaaagtatcaccgagaaatggaaagaaatcccaagttgtttgttttggggggtgggttggtggtagtggttacatttaccagaattatcatttttacatttctcttattttaaatctttcattactaagcaatagggtcacataatagtctgtcactaaattcatgctaaattaaggtagaatagctgtgctagtagctttgcagatctgttagagggtataattaaaatttaaattaaacgttactaacaatattgggtagtctagaaagtgctactacttcaaattgggattacattttggctgtattgaggatcaaaatcatatatatagcatgtaagatacaatcttttcctttttcccaaggttagaaaagtttaaaagtaaggtaactgatttcatttttcattatatgcatttgatgatccattgttctagaacaagtacggagcttgttgcctctactattagcaaaatgtttagactgaattaacctgtatatcggcatcaatctgtttcgcaaattaatttacttttatggtttgtgaacatctacgatgttttctcttagatttttgtcagatttggggccaggcactgcggctcacgcctgtaatcccagcactttgggagggtgaggtgggcggatcgcttgaggccaggagttcgagaccagcctggccaacatggtgaaaccccgtctctactaaaaatacaaaaattagccgggcgtggtggctcgtgcctgtaatcccagctactcgggaggctgaggcaggagaatcgcttgaacccgggaggcggaagctgcagtgagccgagatcgcgccacagcactcaaacgtgggcgacagagtgagactccgtctcaaaaaaagaaaaaaaagaaaaagatttttgtcaaatttggacctgatttggaaaaaaaaaacaaaaaaaacttacggctttgactctgt

SEQ ID NO: 116165 - DNA, 1046 bp, Homo sapiens
ttgagtctattctccttatataatataaccatagtggtttacttgattttattggttcttgtaaggctatttgctggattcagttcatttttttttgttgagcccctgctttatattctagtggttttcctaggcttagtgaatggttttatgaaatttgaatggctttcattgcgcatcaagaaacttggaataactggaaatctgtagtgatcgaaaagaaaataggtgattaattatatagaagtttctgaggatccactcttgagctgttaaaatggggttttaaagctatagagggaaaaatattttctgtatagtcaacatgtaattattgaagaattgctgtatgtcctttgttttctgttgagtttattcattcaacaaatactgaagaagtgtctctgtccttatggctattagtctaacagtgagacaaatatgcttggaaaatgaatgaaaggggagagtttaataaccagcagaggtcagcaatataggctcttacaagtcagcataagagtgtatggttaagtgccggaacaagtgcagtttgttcataaaaggaagaaattagtaagtggtcagaaaattttcatgctttatgcttttgcatattaacatgataattgattgaataagatagttcattatggaaataacatttaaattaatttttaaaatatgaagagaattagaatttcacagctgggggggcaaattcttaaaatatattcagtcagatctcatagattaaaaaacaaagcccacagaggcacacttgctcattgtcttgtgcccatgtgtaggtagtgtagaattggcattagaacttaggtctcctgatttctagtccattactggtgacactgtatgtgctccctggttgcattttgataccaaaattcttgttttgtatttggaggttagagttgaggggaggcagcagaggataggattaaaaaattttggctcaagaatttgaaaagatctgggcttgatcctggctttgacactaactggttgtgagaccttggaaagttact

SEQ ID NO: 116166 - DNA, 2247 bp, Homo sapiens
taaaaactgtgggatataacatctaaaatcgggaaatggccttaggtgctgtttttacccgctattttcatgttttgacttctttattttaattttttatttcccccaccatttctcaagtcttatttttaatctggtttctttatgtagacacatttttttccctttacagtttgaatttgtttttctctgcatttttaaaggttctataattcttcagcttccttatcatgactgtttcatgttttctttgttgtagggttttcgtacatgtatcttttggatattattttttcccagattttgagtattctaaatttgattctttggtattggtttaatcttggacttaacagaaaacttgaaaaaattagaagctagtctttctccacttgagataggaattataacagaattatatttgaagatttaagatgctgaggagaaaattgaagtttaaaaactggatggccctttcatgccagccagactctttggactgtgaaataaatctgttttagggtagaagcactggatatgtgctttctttttgtttcttgttttttctgtacataaatggttcctgctaaacatggtatgatatgacactggaaaattattttactatctaatgtgctctaaggtgatgatattctgagaaaattttttaaaaatctaaagcttgtctttcagagttctaggaatacaaagatatagttctacagtttttctgaacttttgttaacataatagagtttttctttattatgaaacaaaaaataatatcacatttgttataatataaataaccttttctttttctaaaaaaaatttacaggtagaaaaaataattggccacctcttcctagcaattttcctgtcggaccttgtttctatcaggatttttctgtagacattcctgtagaattccaaaagacagtaaagcttatgtactacttgtggatgtgtgagtatacaacaatttacatctttgcttagaatttgtatttttgttgtcaaaatccgcatttttatttcaaggatagtatagcaaaccagtcttctttttctatagataaagcttaataatcatgatttcagagtgaaacatatcctatttaggtacttcagaattgtactatatgtgacaatgtaagtccttggctgagaaaaacttgtatgttgagaactggcattcttttgaggaaaagacaacttctctgtcatgtgggtaaaattttataagattctttttccttgaaagatgttatctagacatgatttgcttggaaaaaatagtgcatactaattttatgcagaggaaggccatttaaaagaattctgttaaatgtaggcgttttagctatttttaaaagggcataaaattattacataaactaagtgttctttttatagctttgagtacagtttactttttgttttcaattgcgatacttttattattgaaagtgcttaattaatacaggacattttgttgaacggaacattagaatatacgtttggggctctgatgcttacatcactttgagtataataactcatggaatactgaaacaaaatgtcaagccgttaacagttttactctgtgtgcacagacctcccacttactctctgtttcatttttattccaaacagtagtctcagcctcattttgataccctgtcagaaggggaggtagctattgagggttctcacatgcacaacatctgggttaatggataatttgtagggtacattcttgatggaggaaatttacttgtttttactttatgattaatgagactaccacccttcccttaatggatgagataattttccttaaaatcttttaggagcattcttcatgtatgtcaagttgttttggaatgtgagaagtgtttcctaatggatagtctatttttaactcttcattagtatttttcgagatattcttgatctaatatcttttgctgaatcctcagtgtcagtagtatatatttttaatattaaatgtctgattccatatatgtacatgctaaccaactcttatttaatcaatataatatatgcatttatattttatatatgtttatttttttaaatgggcagaaattgtcctagcattttattttattttgagacagagtcttgctttgttgcctaggctggagtgcaatggcacgatcttggttcactgcaacctccgcttcccgggttcaagtgattctcgtgcctcagcctcctgag

SEQ ID NO: 116167 - DNA, 1050 bp, Homo sapiens
gggtggggctaccaaggggctcaaggaaactttggggatatgctcatcatagtgattggggaatcaagtatataaatatgtcaaaaattattaaagcgatattttaaatatttgcaattcattgtgtgttgattgtaattctatgatgctgtttaataaaagaagaaaacgagtaagtttttttgtcaagagggattgtggtgcagttggaaattgaaagtttgtccttgtgaggttagaataacgatatctagtgttagcatgacgagttcacataagttattacaatgttgttaacttgaggcctcaggtggttgccacttttttttgtttgtgcttttaaggtttgaatgtcattctgcaggtaaatgtaaagataatgagaaaaatgacgtttttccccttctttctctccccctaacccccttttttctttctttctttttttttttcaaaggagtgacagttcatttagattctttgtattcttcttcgtctatatttgtcagtttgctgtacatgtactccaagctgcaggatttcataactggggcattggtaagtttttttttttactagttttcagctttaatctaatattgtaatataatttttggcttcctaatctagttaacacagataaaccagattagaaaaattaaataaaaagcaaaaattgttttaaaaatacaattttaaaatgtcataaggcataaactttggacaaacctgtgtctttgaagattatgttcccatctataaaaacagcacattttttctagtttaaataaaacatgtatgtaagggcgctaagaggaagactgcaaaagagactgaggtggtcagagagatagagggaccaaggaatgtggaagggacaggaaagagcttcagggattctaaggaaaagggatacctattatgtataaagccctattttaggtatacaaacagatatatttttatatacgaatatacatggacacttgtctttgaaaggtagaataactgcacacacgttatatacatatatctttaaacaatcgaatc

SEQ ID NO: 116168 - DNA, 1050 bp, Homo sapiens
gcacgcacctgtaatcccagctactcaggaggctgaggtaggagaatcgcttgaacccaggaggcggagattacaatgagccgagatcatgccactatactgcagcctgggcaacagagcgagcttctgtctcaaaaaaaagagtaataataaattcaaaactcataagcttaaaaaatgtacagcttaaaaaatgtacagtctggaattaaacacttgagactctggagtttggtttgcttttgaatttagactatgccatttataagctgtgtgacctcgggcagattactgaatgtctcagttcctcatttgtcaaatggggatttaaaacagcatctatcctattgggtgggttgtgagaattaaatgcactaatacacataaagaacttgaatattgcctggctgataagtgttgaatatgtgttagatattatgctatttttaaaaagtttacatcaacttttgcctaattacactttttattactttttagtggttggatttcatcccttactggtctcaaccaaaatattcctgttggaatcatgatgataatcatagcagcacttttcacagcatcagcagtcatctcactagttatgttcaaaaaagtaagtgaaattttatgtctaaatttttatagtgaacgtgatgtaaagttctcattttcctattttgctataatttggtgtaacctgaagccattttatcgttattgtatgagtttgctctctgaggattactttttacaattaaaagttatgcataagtacattttagaaaattgcatcacattttaaacttcagtaaaaagggaatattttaaaatcattttaactgaaggctttcatgagttaaagagtcagcctcatttttaaaatttggatttttaaatatactctaaatttcttttttttgatatgaaggatattagcctgttaataaatagaagtaaaattattatgtgatatgtacattttattcatatatatctcttaggtttttgttttgttttttaattttttattataaattcagagggaac

SEQ ID NO: 116169 - DNA, 1086 bp, Homo sapiens
tgactctagaattgttgggttttattaagctgttcttctcttaaggtaaatgtgctctgtcctatatatttatcctaattgaagtgaataggattttggtaatttcgttggctttctgttgtcttgcataactgaagtgggtcatcattggtgctgcagggcccagtatgagattgtgctgtttgtttcccccacagtgttgttttatactccacatttcaaatattgaaagaatatatgtctcctatacatctgcatggagaagggtctagtttagtccttatctttcacaaatagatttcttgttttctttcagattatttccaaatggtgtttttacaaaagctcctctttctattagaactatcagaaagaattgagtaatggttttgggccaagcagggagttgttataaatgtgtcaaataacagtaaatgaatgcatcacaggagactatggatcagggaatccaaaacttttcccttctgttaattggtatggctagaataacttaatatggaagtaattaatagatgatatatcatttgtattccttttgggacctgattttgaatgattatcacttccatgaaatttgttcatagactgtcatgttcacattaagtagtttttaatagtgaattttttgcattttgaaagaattttagaaaaaagttattttacctctttaaaaaacaagttttctgaagtgtttcaaatcttgtttatttactacagtatatattctgcagatactcatttttgtgggagcgctgaattgggtctatgatagagaacactgtgattaagtctcattagttggtgttttatggtaaatgctttgtgaagatatcctattatatataaagtgatagttttcttaggtgaaaagtgactcttacagttatccctctatatgcaggggattggtttcagaacccacacatccatataccaaatctatgcatactcaagtcttggagtcagccctgcagaacccatgtatacaaaaagccttctgtgtacttgggttttacatcccatgaatactgtattttctatgtgagtttggttggaaaaaaatca

SEQ ID NO: 116170 - DNA, 1144 bp, Homo sapiens
catggatatttcctgttcacttgtgcatgggctaaaaccaggaaaacttccttgtcttattactttacctaatagtttcttaatatttcagtgccccttgcagaaaaaatattacatgctaaataaatattctccatatttttgggggatgacattcagtgaattatttcagtggtgacccactgaaaattaataatggtacttatgattaaaaacgcatttaatactaactgcagtagttctttcaagaatctttagagataaggattgcacattggaaaagtaaaccatgtttcattcctttttccctatttatattgaaagaaataggccagcagagacttagggattttaaattggcttgctttttagctgtttcagtcaccagtgaagagcctatgtgcattttgtagtagataatgtaaaatttgtcatctttttcttttcttttttttagaatagctgatattttgataacaatctctaatttgcatgggcaccacatttcttatattaaaagaattagtgttttggcttctgtactgcttatggttgtaggattcaggggttaatggaatcacagaaatgatattctgcaagaatttcttttaaataaaaagtttgggggtgcaatataagaagtttatataatatgcagtacattatccaaaagagaaggtagttaatgcagtagaaagtagtggtaataattcctttttaaaaaaatttcggtagtcatatagtaacattttgctatatgaaaactttggtatattctgtggttacaactaagattgtgtctggcagctcttttttggggatgtgtgtgtgtgatttttaacagaggtattaaaggctagcctaactgttgtctaaaaagattgtacagtatttaagggattttccttttagcttttcatctccagtggcattaaacataaaaagaccctggcattttttcacatacttgaatccctaaatgcacctgtctttcactttttgagacagactgaatatatctaaaatttccagcaataaaaaaaaaagcatttaacttgcaccaagcaagaaaatataaatacagttaactgcattaagataatcacgttaaaattgttactatgcagcacagaacttcattctt

SEQ ID NO: 116171 - DNA, 1059 bp, Homo sapiens
tgattaaataaatgactcaaagacatctgtaagtcatgctgctgtgttttgaaagtctttaactaaattaagattgcagaatgatagtgattattcaattagattttaagtaaggattgtgatattagaggctggaaatccttattttttaaaaaatcagataggcataaatagttaaatcactttcattctccccaaacctgtagttacagaaaaagttttatgctagaggtgggatgccaagttttcactatccatgaagcagcgctgcatgtcactaggtaacacagatccatccagatggtgtttacatttgatttatttgggatcttattgacatcaggtatacttggaagacatttcttttattcttcagcgtatgaatttaaagctattttttgtaaatatttctaatcagcgataatttctacctatgttctcaaccaacttagccagtttgtttttcagagcctgtagtcttattggaaatctattttatcagtgtgctttattgagtgtggattttgcatacattcaaaacattaaccacaaaatacagcaagtgcacctatattcaccattaacttatatcccaagtccattttttcctgtacactacaaacaaaagatatattagagacttttgaaaaatgctgaaatactttgcttcagaattggaatgtttatattatgtagaaatcttcaaaggtagcattattaaatagcaaagaataattagaacccacatatctttttttgtgtggatggggaaaatgttttaaaatccagttatttaatatgagtttgagagagaaaattgttttttaaaaatatatgtgcattgaaatgatggcaatgcttatagtatgatcaagtatgaaaggaactttaaattcttatatttacttttctctcagtaaattgttaaattttcactcagcaaaagattggcatttgttaagtgttctatatttagtactaaaatcacagtcatgaaatcatagtcataaaatggtcttcacacagcagtcatccgtgtcatttatcattttgtaatat

SEQ ID NO: 116172 - DNA, 1049 bp, Homo sapiens
atttaatatgggtgaagctcatgttccattacctgtaaaggtctaatgcaacagaaaaatggtcattttacattggttagaatttttaactaggtctttcatattattttgtttagcacatgacagacttatacacatattttaaaaaatcaaacatggaatttctatatacatcaaacctttaacaatgtctgtctctgaattgctattatagtgttcaaaattatacaaacaaacatccagtaaacagcattttattttatgacactctgtgttaatacaataaatatacaaaacttccaacccactgaaacatgcaacattagagggacacatggagggcatttctgtagaaccatgacagtcaccatgatggcagcgcagtattagttactgacaaaatatacaaacatctctagataaataatccaagtcccaaattacaaatcactgagtaatgactttccggtgttcaaactttagtttgaaataaaattgccataatttaatattacaaaatgataaatgacacggatgactgctgtgtgaagaccattttatgactatgatttcatgactgtgattttagtactaaatatagaacacttaacaaatgccaatcttttgctgagtgaaaatttaacaatttactgagagaaaagtaaatataagaatttaaagttcctttcatacttgatcatactataagcattgccatcatttcaatgcacatatatttttaaaaaacaattttctctctcaaactcatattaaataactggattttaaaacattttccccatccacacaaaaaaagatatgtgggttctaattattctttgctatttaataatgctacctttgaagatttctacataatataaacattccaattctgaagcaaagtatttcagcatttttcaaaagtctctaatatatcttttgtttgtagtgtacaggaaaaaatggacttgggatataagttaatggtgaatataggtgcacttgctgtattttgtggttaatgttttgaatgtatgcaaaatcca

SEQ ID NO: 116173 - DNA, 1047 bp, Homo sapiens
caatttaactttggggtttgggtaagacaaacatttaatgtataggattttggccaggtgtggtggctcacgcctgtaatcccagcactttgggaggccaaggtgggcggatcacgaggtcaggagatcgaaaccatcctggctaacatggtgaaaccccatctctactaaaaatacaaaaaaaaaattagctgagcatggtggcgggcgcctgtagtcccagctacttgggaggctgaggcaggagaatgacgtgaacctgggaggcggagcttgcagtgagccgagatctctccactgcactccagcctgggcgacagagcgagactccatctcaagaaaaaaaaaaaagaattttcattagtgctggccgtgtttcaaatggcaagggaacatgggaactatcatgtggcaatgtagtgagtgttaaactttgtgtttgtccaaatcctgatttatttttcagttcatatctttctgggcttgacatggctgatggtgtagctgaaaccctcctaacactaaaagccatttaatcttttctgtaataggagcagaaaatagttaatcatccacctagtaatataagattactgtgaatattatcttctatacattaaaacagttctagtttgtagaataataccatacaagttttatttttaaattctagttattttcagtgcttacttaaatgtaattctagaattcctccacaacttttaatattttgtatgccagtgattctcaagataaatcatgattgtagtagttgttactgttggcagtttgtagtagtattcaggtattttggggatgggggaaaacaccaaaaatcagtgtcttttatctggtgatcactgtggtatctacagtattctagtctcctgcacaaaaactgaacccactgggcctatgcatccctcacactttttttctagtataaaagcaatacataatgtgttgtagaacaattaaaaattcagaaagtgatacatgagaaaataaaaataaatccttaattctgtcatcttggggtacctctgc

SEQ ID NO: 116174 - DNA, 1968 bp, Homo sapiens
tggaatcgtagttcaggcctccagtctgtcttggaaccagtgctgttttataatgggacaagtgcatctatgtcacagtaagacttctgttttttacaggatagttttccagatagatggttatccactttttattatttttacccaagacattcattctaaattgtatcatgtatgtctctttcttctgaagtagggtgtctcttgtcttggtgagtaaggatcagtactgcagagtgtctccagagtccctgcacatgggaagtctgcaggttcacactgtggtctttgggaagagaatatcttaatggcaaattcagtggcgagggaactggatgtggtctgatacatgtgccctcctcaaagcacagtcttcagactgtctgacagtttgccttaggatattgtaaaagagaaaatatctccacctagcaacagttggtggcctacaaatagctgctaggggctgccagaatgacttctgactatcagcatggaagatgacttggggaaagattaaaaacgtagaaaacagagggaagcacacagatgagcattaaccacacacagagatgctgcttattactcagtcaccagttgttgtacacttgactgagacagatggcctgacttctaaacatctactggaaacagaaaaacacacccccaccctgagaggttgatctgcgatgctgccaagaggagtgggcgttttcctgggctgcagaacagttctgcatcctctgcccatagtgctggtaccttcgcagtggtgttttccgttctccaggctcacactgctaatatttaccaccctgcctctttcacaagtggtcgtggctcacctcattcccccacgtatcctttgtcttctctcacctgtcctttcccgtccttctcccgcgtgctgctcctctcctggccagtgcctggccagctctcacaggtcagccgcggcctgtcttggcagctgtccttgctgcagccaggccaagctggaaacaatttcagagatctgagcctagactcaggctggtgtctagatacctgaaagtgtattacatttaatcaactgactacttttttctgtgtgatttcctaacaaccaggtattttctgtagccaggaaggttttcagtgcaggcagttatgcaaaagaccagtcctgtggtttggtctgcacatgtgtttcagtagtaactgtgtagctggcgttctgttggccagaattgcaaactgaagcttttcctccaaccatttcaaaaacttgtcaagaactttctacaatggctttgtttaaaaatgtaatataatcacatcaccttatcttttcattcatccattcaaatcagtgaatatttactaagcacctgttacatgtcagaccttgttctaggcagttgggacacaaagaacaaactgcataaagttccctgtcctcatggagtttacattcaagctggcgggggtagacaataaataagataagtaaactatatagtatgttaaaaggtagtgtgcagtagggtagaggagccaggagaaggtgtagcccgggtgagagaggccggggtatgctggaatagtgagagggaatgttgaagatagttagggtaggatttattgaaaagaagagatttaattaaccacagccttaaaggagatagaggagttagccatgtgggtatcaggagaaaacattccaggcaaagggaacagctagaatgaaggcccacaggctttgccgatagagtaaattgggatttctgagaaaggagtcaaagatgatagcaaggtctctggcctgcacatgtctaagaattgaactcccatttgttgagatcaggtggacaaggtgaagaacaggttttgagtggggaatggaaatcaagagtcctggtttggacataattttcaagtgccttgctagaggccaagtagacagctggatatgcacatctggagttc

SEQ ID NO: 116175 - DNA, 1061 bp, Homo sapiens
ctctttccagtctggaagctttaacttcctccctacccctgttacttatgcagcatctcaaaaattctgaaattactcagaattttaaattggcacaaggcagagattcctgcatagtttgactgctgtctaggagccactgatctaagactaagtgctgaaatacaggaaagaactggtttcttttctccttccagcctagcatcacccctcagagaaaaaatcataaaaaagagggactgagctatccttctcatgattcagtgggcactttctcccctattggaggtctcatcatgcacatcaagccaatgtaaagggcagctgtggttcttgaatctgtggctgaggacattgccatactggcatctgaaagggctggcttgctttctcccgttggccaatctgtgatagcctctggtcagccccagcctcagcaaggacttgctgcagctgggagcatctgccttttctctccctatgccccctctccctcagccctggatctcttcaacactgaaacaaatggtgagaaaggaggctgttgccagagcaacaaaaggattctttagaaatacactcaggctgtgtttgttcttacaacttacattttggcaaaaatgtgactggatgagaaatgatcgtaagcatattcttttgctacacctaattttaagatataaataggccacaggcttgtgtagccttcactgtctataaaaaaacacagcataaataatcaaaatcttgatattctgagtttagaaactgggtgtgaaagaatctgctacttcaatggaaatcccaaactctgggctaacttaagcagtaatgaaatataatcattgcctgttatgtgaatccagatagcaggatctgccttcagggcaccattaggtggacacccggctgatactttctaaatactgtgcacatgtccttgacattcagcactcactcagtaatgagggttcaggcctcacctgaatgtgcctgtgaaacacggaccaatttgcctcacttttctgaaccatagttttctcacttgtaaaatgggcata

SEQ ID NO: 116176 - DNA, 1069 bp, Homo sapiens
agcgttagttagctttggtatggaagctgtgactggtggtcttcatagaagaaaggccaggaatacctctgcacaggtgtcccacacgccatgtgactcccatgtccccatggagaatgcctaggtccccgtagggcataaacagttattctgatgctcagaactctgagactggggggctcccacttgtgattttgatactaacctatagattgttatgagttcgtgtcagagtccggcacctgttgtcatgtgaaatgttgaggtcaggtctgggaggagccacagcctgcccttccccaaggtgttccccctgccgtaaggaagctacagccatgcggcagtgtcggggctagataggagctccagaggcgcccccagccacaggcttggtggggagtgggtctcagcctcacccacctactgcagcatcagcattggggtgggagctgagctagcaggtggagcaggcttgggaggagacagcgctgggggctgacggtgagggaggggccttctctctcctggcccctttagtgtcccctggctgctctggctttgtgtggctctggtgggagagggggtcctaggtcgtctttgctctcctttattcctcccctcacactagccatcgtggacaatcccctcttccctttgggaggcactgagagatgaggcaggcagcagggggtgagatgggaagggaggcagctccagatctggggaatctgaggggggtctgtctgtcagtgtctgtgtctgtcctccctgatttgctcagggaggaggtgggtggaaggccaggaccctgcctacgtgggcgctcagcgtagtgccagttcaggactgtccgtgcagcccctcggcaaatggcctgctctggcgacaccactccttgatgtctgaccctgtggcgtggcttggggttcagatgaagcctcatttcctcttgtgggattcagaggaagaaaatgtaatggaaccagttctagaacactagaaaatgggctttctctcctcctaagaagtcgttgggttttttccgtacattccaacaaacttgttcagc

SEQ ID NO: 116177 - DNA, 1046 bp, Homo sapiens
ccatgaggtccccatttgcctagcagacatttatgaacagtaccttggtggcttaaaaatgttcattttctttcccaagtgcctaactctcttcctgaaagtagtgttttcattgaaggcttggaccatgctggatcttcacagagaaatcctactcttgattctatagcagacaatggtgactttgctgagatagagccttcggtgttgcctcctgatggggaatgtgttgggtaagggggacatgaagaagtggctaagtatcagccatctaataccctgcagatcgtattggagctggacgtgaagaagcgctctctgcgtggttttggaccaaatggctgtgaaagtgtatgatccgcctcacagtgacaagcagcttgtcagtggtttccaaaacatctgtctcaaagtggcggttgaaattcctacaagggagtgtttccattcattgtccatgagaaatgagagagagtgggagtgagtgatgcacgatccagaggaaatgcgtgcactctccacttgggattacaatgcagatgaattccatattttggttagggaattttttcttttaaaaaaagaaaagacaagaaagaaaagcttgtcgctgtcctggttactgaaaagcagactaaaatggagttaaatgcaggctggaacgttcatttcagctggatttttttttctgttttggggtgtgtgtgtgtatacgtgtgtgtgtgtgtgtgtaagaagatggcctgggacttcctggcacacttttctgcctttggccccagtttcccaccaaggtggcctgaccttgctgatgagtcactttaaaactgctgcggtcagcaagctgtggctccgtcactgcatccgcacagatcagctacttgaagattcagacaactgctacatatacatcctattaacaaaaatcacaacagaggttttcccagctaaagttttactgtaaaaatggtagccctataagaaagccactattagttttcatttagagatttttttttatgtctacccctgtcccctactatgtc

SEQ ID NO: 116178 - DNA, 1669 bp, Homo sapiens
gctcataaacctgtttaaagtttggctaatagtactgccatgtgctgttcagatgcaaaatttcagatgcttgtcagctagatgacactggggttgatagtgaggtctggtttgtgctcatagagttctacaactgtagatattctcattggaggcaggcctgtgccggggaggggcatttatttctactcccaggcactgtctgcctgagtggaagcaggagcgattttcattttacctgttatttaaggagctgcatgtgaaaacccgagtgaagaggccctacacttctcatgtgtttcccagtaatggcttagtcccccctttgtgggttgtcaccctggtcactgccagactggcctgtttaatcctgctctggggaaaagccaatttcattctgccaaagccttcaggatccaggtggtgtgttcccttgaaatgcccctctctgaatacttaacctaataaaaccagccttctctgtcttttttttaaagttgtgaattcatcccatagaaatacagtaacactttatcaagtcagacaaacacaagaacagacattctgagttaattgtgtctgaattgtagagcaatctgatcctgctttctttcttttttttttttttttgaggtggaatctcactctgtcactcaggctggagtgcagtgacatgatcttggctcactgcagcctccgcctccccagttcaagtagttcttctgcctcagcctcccaagtagctgggattacaggcatctgccaccatgcccagctaatttttgtatttttagcagagactgggtttcgccatgttggtgatcttgctttctgttatgtagtcagtcgcattatatgaacttggtggaaggtttgttttgagcaaagagcacagttgcagtctggggtgagccttcatgtcaggtggtccttggcagaggttccgtctctgtggacacagacctggattgggaccctggctgtggtaccagcaggctctgtgacctagggcacttttcattaccatgtggaattctcatctctactcatggataatcctttcttcccaaagtggtgggaagattgaccaacaaaaagatgggaatgcgtgtgatacgtagtaaacagcaggtgttcctctgcctgttccctggcactgggtatcatggaaagagcacagcatgtggagtctgaggggttgctctgccaggctctttctgtgcctctttgggggaatctcttaccacctgtgcctcactggcaaagtggcaagggtaatacctgctcagttttgcctgtctattccatgagaattgtgagaaggctttgaaaagtgtgaatttagggtgggtgattagcataaggggcctctactaggcatgctttttaataatccagactctctgggattaaatccctgctctaaccacttataattaggtgaatgtcctcgagcaaatgactgtcaccctgtctcgttctcacctatctcacctgatttctctgagagtaaatgatgtactgtttgaagactggggcatacagaactagcacctaatgaatctcagtaaacatgctcgtaaattcactaggacataagaagggaagccgagaatcagacatgaaaaaatatccacagttttaaaacccctcatgtttgaaccgtgtc

SEQ ID NO: 116179 - DNA, 1069 bp, Homo sapiens
aatcctggctgccacctgacagccacttgacctttctgaacttcatggaaaaaggggataataaaacctgccacacattatggttggcaggattaaatgagatatgtaacaatatatattagtccctccccttttcttagcacattgaaacagaatggcttgaaaaaggtaagttattttgaaaggggctgatgaaacaagaacacaggattcactatgaataaggagagtaacttacattaggtaccatttattgagtcaggcactgttttaagtgctctctttgcagttacttattccttcctcacactaacagtgtcagggactgttattttatctccactttgcagatgagaaaattgaggctagagaggttaagtaacttttatcaaccctgcctggctggcctcagagctcttaaacatcagcatggagcttttgaagaggataacagcagtaatgatatcttagattatttacagagcttcatcctttgaagaacacttctatgtacattgttaactttgtttctcattaaaaaaaataggagatggctagacattagattagaaaactaaggtacccagatggaggtgttatttgcccaaggttactaaatcaatatgtggccttgttggtacaagaactttttccacttgactcttgtgagtgtttatagaatgaaagatagaagagttcagaaatttttttaaagaaatgtttgctgttaaattttttaagatataagctgggtgctgtgtcatgcacctgtattcgtaatcactcgggaggctgaggcaggaagatcacttgatcccaggagttgcaggcagcagtgagctatgattgcaccactgcactccagcctaggccacaaagccagatgctgtctcttaaacaaattaaaaaacaatatggaacagacacaggaagttagttttgttgcttaaggtctctgtcaggctgttggccagctagaattagaaaagatagatccagcttctgagtgactcaagtgaaagaactggaaaagtaccaatgcatctattttcttggccacttggaacca

SEQ ID NO: 116180 - DNA, 1601 bp, Homo sapiens
ttactagtgagctgtgtttctttgttggatacctcatggcttcgcaagcctaggagtcagatttgacattcccaccttggtttcctgttccacattgatgttcaaatgtgcttggcttattatcatagtaattgcaaaaaccagtttcacaaagagatgatgtcatcaaaaggaatgtaatgcattttgtgaattaacttgaactagtagtttgtataattcccacacttcaccatgctttccttaaaaaactgtagtatcccttcatgctcctgtgagtttgctgtggctctccagatcatcttgacacatggggtgggaacccaggccttaacctatatttgctatctatgactaagtcagggttgccttaaggggtctttgtattaactgcattattcaaaagttggattccattgttatttagtttgtggttgtcaagttttggtgagcaacaaaaacatttctggctctgcatcctggaaatggatttataatgtttgggaagaggggtgtggacccaggtgtctgtattttctaacaagcttgcccagtgataccaatgcatatgaagatactaattcagtgcatatgatgcactgaattccatcacaaatagcttgagttcagggaccatgttgttcttcacttaaattctttcttattcctgtaacataccatcatgcacatttggtaagtgttcattgaatactactgacttatttgttacttcatttctctttcctcccaacttttcttttgttctgtatcttaaaaagaaaaacaaagaaggaagaattgaagaattgggtcttagagtttcctgactttccaagctgcttgttcacagtcttccataatctgctacgtcagttcaccactctcccacacaaactcttacgtcatgttgaatcattctactctgagacacactttggtatatttgtcttcattttttcttgcttctgtcccacacaaagagacctttaagtttcctaagtggaaaaaacactaggtttgggaaaaaattagaaaaacttgtgttagtttcctaagtggaaaaaactctggggttgggagaaaattgaaaaaaactggaagagacttagattatcttttcatacaatgcccccattttagagctccctgtgaggaaacacagggaagagatgtgatgtcccagaggccacacaggaagtgcaaagtctagctgggattagactgctgctctcttggcgcctcgctcgtgggctgtttccactgcaccccagccccaccagaccttactctcctagggtggtgctgatcatcagtgattttcctgagtcccacaggtgactgtgatatggaaacaatggctgagaaccaggtttagcaatttgctttgcttacaaaattattgtttggtgtgttaaatattactttgcagtttagtcaatagtaattgaatttctttttatgaggttaaatttttgtttcatatgaatgtatagactgtgcaacatgggcaacctagatcacttaatttttgttgtttaatgggaagaaggcaaaaatttgggagcagaagaaactgtcaatattattatcaaaggaagatt

SEQ ID NO: 116181 - DNA, 1035 bp, Homo sapiens
cagcccaccctagagacagtgcgtgagaagctggaatgatttctttcccttctagtgctgttgaattcactggtggtataaatttgctacacagacatggtttatagtcttattagatttactcgttattagtttgttcttaaagaataaaaacagttccttttgggggaggctgcctaacttacagggacccttcaccatcaatattaattacatacaaacatgagaataattcacattgctagtgagaacttcccctggacagaggaattcagtgagtgggccatgtctgtacattcttggtactgtctgctctgggacctgccttctcaactgtgaacatggctgaatcatctcagcttagtaaatctcaaggcacaccaaatcatcccttcgagaaaagatgtttgttctgttactttatcctcacagagaagtcaagggtccaaatatttatcatcctcagtgacacctcatttctcctttcatcactaggccaaatggtaggaattgttctactttattgtgttttcacagtttttcctctgaggcttccctgcctgttgttacttgatcttttggacttgagtacccccagggcctgcagggtcactctgatgtggggttggagcaaatggcacacatgctggtcaagtgttgggcagatttaaatccgattttcttttactttctagtgtttttggagtttcagttaacttttttttaaacagctaatttgagttcagacacaggccaaaataaaacattgtcctggtcatctgctatttatgttccattgtggaaagtgttttctcagccagaacctttgactttagttaccaacttccttcatactattttgttagtagtatctctctgaggacgttaagtatattgtctgcttgtcatttatttctctgaaagctttatttatttattttgagacggagtttcgctcttgttgcccaggctgcagtgcaatggcatgatcttggctcaccgcagcctccacctcccgggttcaagtgattctcc

SEQ ID NO: 116182 - DNA, 1015 bp, Homo sapiens
tagctaaccccaaattagggtatttgaggtctttccagtttgaagctggcataaataatgctgcaaacatctgtgtgtttttttaaaaatttttttaactgaaaaaaattttttagtagaatagggtcttgcttgtttcccaagctggtcttgaactcttgggctcaagccatcctctcatctcagcctctcaaagtgctgggaatataggcatgggccaccatgcccggccagcaaacatctttaagtagattgcttttccccctctcttggggtccattcctgcggatatatttctccaaagagaagtttctggtaaagggtatggactcattcgtagctctcattccatgttgctagttcccatttgtttcaagagccctctgaggacatataatgagaaagaacaaaacaactggaaggaaaaaagaatcgacttggaggtttaaaccctttttactgatgggggataacagttttcagatatctgaattgagactttgcttgctgtaggctaatcaataaatgagaaaattcagtgtagtggttaagagcacaggttgtgacatccaagtcagttacttaaccctgcggagcctcagtttccatcttgctaaaatgcatataatacctacctcggctaggtatggtggctcatgcctgtaatcccagcactttgggaggccgaggcaggtggatcacgaggtcagcagatcgagaccatcctggccaacatggtgaaaccccgtttcagctaaaaaaaatacaaaaattagctgggtgtggtggcacgcgcctgtagtcccagctattcaggaggctgaggcaggagaatggcttgaacccaggaggcgaaggttgcagtgagctgagatcgcaccactgcactctagcctggtgacagagcaagactccgtctcaaacaaaacaaaacaaaacaaaacaaaacaaaaccctacctcattgtgggtggtagtaaggtttaaataagataattgctatgaagtgattaatt

SEQ ID NO: 116183 - DNA, 1007 bp, Homo sapiens
tttaatggctattttcctatttttaatttttaaagggaaatttatgcaaagatcaggatgatttttatattttcattaaaattttcaactagattaaaaaaccctctttaatcggatgggagaagtcttcacaaagtcagtttgaatagtaagtaggagatagtaggaaaaatgctccattgtcagccaacagctaaccaaattaatgtgtaatggaatgtcataatccttttctataaagtaatattttgtttctctcttcctattctcttttgtcttttgggagaagaaacaaataaataaaaatagttgtttcgttgtttcggagagaaatacactgtctagaaaggactgtcttaaaatgcactgtggctttttaactcatgaagctcctaccatgtgtgcatgcgttctcagaactcgtctgtatcacatgtgggaaaatggaattagaaagacttctccctttgtggcctccgtatattctgagttttaacgatagattttctgtaaaaaaagtttgtgctcctacatgatctgcgatacacacagcagctttcagaattcttaaaaatgtaaattaggtggcaaattagaccactttcactcccttgcttaaaatcttcagtcttctcctgtcacaggtaggataaaatccacattcctcccagactccctaggctggtgtcatctggtcctgcctgcttcaccatcccccttagtaattgcctctgggctccttctgccccagccctgaagcctttctgatcctcagccctcaggcttctccggagggacttcccagtctttttccccaggattctggcgggacttcctggggccaggggctgagctcagcatcctctccttaagctctggaatgtgaattactgagcagggagcccagaaacctcataggccagggtcagaagatgacactgagccctgctggagtgcagaagctgacaatggacagagttcaaagcccaggtggagttctcctttga

SEQ ID NO: 116184 - DNA, 1117 bp, Homo sapiens
caggcctgacctgctaacagttctgcactgcagtttgcaccaacccagcaatgcagtaatttatttcactgagggaattgtggttttacttgccatgtattggtgtcattgaaaccacgttttaagaggaaagtagcaattaatgtttagaaatgggaaatagctttacaaatttgtggtggaagagacccaataaaaatgactatcaggagttttccaaaggtgaacccaacagtttctaaatggtgttttctgtctggtagcttgacagcttttgatttgtaagtgttaaccaaagcatgactgccacaaacagagcagggtgtgtgagagagagtattactgcaaggaagaaagtaactccaccgagatgcaggcaggcatctgtgctgacttaggaatgggtggagaggtctagagtgtgtttgctcagattacaccctgtctgtgtcattgctgctgctgttctccctctgccagacgacagcactgaaagagtggctgttactctctaacttggggtttgcctgcatccatgcataaacatttcagctcattatcttaagaaacggaggaccagagcatttgggaaccactgaatactgaatcctttaaggtttgttttctgtttgtttttattatgattgatgagattggggattctaaattaaaagtgactcctaaggattcagttaaaggatggtgtcataatgagaatgatggttttacctgggaggcagaggttgcagtgagccgagatcgagccactacactccagcctgggtgacagagcaagactccatctccaaaaaaaaaaaaaaaggagtttgagaatgatgattttcttttagtaggagaactctttttaaaaatgagatatttcactggagccacggcatatgtgcatttaactcataaaaattaaactgtacacacatggtccgaaaatagagagaaatcacattgagaatagtttggagctgcttggcagtcggctccattagagcgggcgccccagcacagggtttctcagcctcggtgctcatagcgttctgcgctgatcatgtggcattgtgggtgctctgttgtcctgtgcttcctatagtggatgcctagc

SEQ ID NO: 116185 - DNA, 1033 bp, Homo sapiens
ctgcttttatagattggccttgatccaaagacactgtccaacatgggccccttgtgtccagggttgacatttgggagaaatcagagcaaaggcaactagcagacacagcagcttgtctcctgatctgggactccagtgacattagcatactgggctctgcatcgcagtttcctttattgctgaaatgcctgggaaccaggtattagtacaaagattaatacatggcacatcctccctcagcctttgtggatttttgtttttcaggtgaagcctttatctttagttgtagttccttaaagaggaagcaaagtctctgaaacagcctttcaagtttcattgcaaagctgcatgcatatattgacatctctgggaagagtttgctctattccatttccagagcacaatcaatgcataatttaggaaccaccatttacttggactaggtagcttgtcagctgtgattgggtgaccagtttgtcttacctactgtaggggttttgttgttgatttcaggaaaacgtacaggtacttgtttccaggaaaagttgattttaaattgaatatcttagactttttcccttacaaaaagataggaggtattgttttatcattatcatgtcccctttcagttaagaaatgactgtttcctgttccttagcatcttcttaacactatgggcctttttaagaaggaagtcctttggataagtagttaataggagtaatatttccaaataggcaaaagactgaaaaaagtcctcatccatcttttttaatgttaaagagtaaatattctgcgttctatgattccttttcccccttttccctataaatcattcttatattgagcaatgtctcaggcttctgaaatcctgttttctcaggtttcttcttcaaatctggggaagacttggttggctcccttcagacctcctccattgatgcttatctttcctgactttatttcctaatggccaagcttcagggctcacctcgcctgcatttcatctacttacttgacatgactgcagaga

SEQ ID NO: 116186 - DNA, 1072 bp, Homo sapiens
ttgagaggtgtttctgttgtattgataagaagtactgaaataaacctgattgataagaaatactgaattaaataagtgctgtactggcatgtttgattttttttttgttttttaatttcactgttcagttgaaccttaaccagcagtgagatcttaaatatttctttagcaacaagctccccacatgcccggaaaattaagagggactctttttcctctcctgattctattgttcagcattttctttctttccacactgtgctgtgttgtcggggcacctggagttcaagcttcctttctcctggggcaggctgcaattggactgaatttcacatgttttctagttttaaggcatttagccagttgtttaaggaaggctgtaattgcattcacaggagcctcattcaatcttcagataagtggtgcatggcacacacttattaagggcaaaataacttcttaaaaaattaactttctcttgctcatagagaacacattttctgaattaaaaataacagactggatagtctgggaattacaaacttaccagtaagcagtgtttttgtatttgtaaatgactaacacttgtatattaaatagatacgtaagaaaaacatggctcacaactttaaaaacaatctaaaatcacatttgttttttttttaaaatggccaactgtccgttcttagaagatgattctacattctagagaggtatgtctaaacagatactctttcatttgctccttcttacagtgggcctttcagggttcttctgcagtgaaaactcataattaccgacttaattactgactctgcatggattcatgctgtaattcgtagcatagtgtgccggcttaaactggtgactgtaagtcatttttgatctgaatccttttggtaagtgggtgtgcttaggttgtcttgactatttatgcattttgtttgtttgtttgtttgtttgtttttcccagcttgtgcttaagtgtattgtaaagaaagggcagcatgagagggaactaagctgatgtgtgaaatgtttacactatgttaccaagccaaaaagagctgta

SEQ ID NO: 116187 - DNA, 1079 bp, Homo sapiens
ctagttttgtgtatgtctacaaaatattgaatacggttaaaaaggtgtgttatctgcacattttcctaaactttaatcagctagatcaggagaaacacccaactttgattttgacagttggcaggtccagaaaggagaacctcagtgtatttggatttttcttctgggtttgttctgactttgatttaataacatgttataatgattaagtggttttatggagactattttacaaatatttttgtcaaactttatttaagacttccaaggtatttacttgggggtgaactttggaagttcagtcaaactaactttcacaactcttcaccttaaaaaaaaataagcaaggaaacctgcacccagttatagtatttgaaagaagaatatttcagctggttaataatgaacaatgtttaacgctgaggtgacatcagcagtagaaacaattctttccttgtgccttaagcacagagcatggttcaactagacgtaaccaggttgtctggcctttgactgcacaagggtaataggtggatgatagtagcccaggttgatgtatggaaactagggtgttctgacagttttaaagctcttcctgtttgtgggactaagaacatttcccttgtgggctgaatctctctggtcctaaaagcacacagattcccaggaacccttgcattgctaatgggcagctgcacatgtgtgtggttcccaggtcttcatctccaactgctttgcacacccttcctctgaaacatttccttccctgccttagagagggtggccaggctctcctactctctgtactaggataactaactcttgttttcatgtccaccagggatgaggtttatctaccttcttttttgaggttaccaaatggccctcaagggctactggtgttaatttgcatttcattcatttgtggcataaatgagagtgtgccaagcaggccccagtgaatgcttgttgaattgcaggcacaaccgttactcctcttactgctgtggatttagggtaagtccagtggggatgattaatcattgttagtctgtgtaaccagcaataacacctcacct

SEQ ID NO: 116188 - DNA, 1296 bp, Homo sapiens
cgccgggttccagcgcgcctggcaccgctccctgggggccgccccgtggtcgcccctgctgtccctggtccgtggcgtgtgggtcactctggccacagacgtcagctgcttctcaaatctggactgcatttttgtgggcagctcagtgatttggggtgcgggctggaagaggtgggcgtggagtggggaagaccgcatctgggatgggcggcttgagcccacgggctgggcaaaggactggggagactctgcgtgtgtttctggatgtttttaggcacacagtttttttttttcttttcccttccattcagcggcccagtgttcttcgaacttagaaaagcaaaggattttcttcaatcccgttcgacttttctgttatttcaggatggtcatgagttccatgaaagtccatgtgcttgtttcaatgggagcaacaccagagtaaagacaaagtcctatccccacccccgtcctcgcctccacccgggccatttcctgtatgtcccattttctctgttgtgattgtgcgagtgtgtttgtgcatgtaggttaccatcggtgggtgacctacgtggaaaggagaactctttgaaattgcaacgcggccgctatggaaagtgtgtgctggagccgagggaggaaagattccggcgagccagagctgttagaggctcaccccagagaggtaaaccggagtaactgagcttgaagggacatttataacctgcacattgcttttgccttaccccttggccagagagctccactcctgctaggtttaagagaggatcagatactgacttctttgatgttgacttttgctggtattcctgattctttcctactggttctcttttagaaactactcctttttaaatttaagagatagagaacacatgttcgcgggaagaggaaatgttttttaagataggaaagagaaatagaatccaagagtctcatttctttttgctgtcatactgtgataagcttattgatctgttagaaatctgattctgattttgaagtaatatcagataaaacactatcttataatagtatttttctctaagtggtcacatggagagcagactgtggcttcttgtggtttgcaaagggtgcagcaaacattttatatcaggaaaaagacattgtgtgttgtaggagagggggatggggaggggcagtcatttgtcttcagagcagcctaattaggaagaataattacactgcaaatgaacattgttgaatataaattgagtcatgatatgtgaaccagtcatttgtctataggaagga

SEQ ID NO: 116189 - DNA, 1008 bp, Homo sapiens
gcctcattttttaaaacaaatgaataaatggacaaatgagtaaatgagaaagtctcacaccatgaaagatgctagtccaatgagctgaatacagaggtaatataaatgtcttccagctgttgcttttctgttctcaagctgcccctcctggggtaggagcataatctacatcactgggcagtcacaggacactctatagcaaggttgtagcgtcctctccagtggggggagaaaaggaactgtgcctaccaaaggtactctcttgtcagcaatttccatttctatactttatgggacactagaaactaaaagcaacaaataatctgatataagtccttgtatagtcatccttcaattcagtagcaatattttctggtcactactaacctgtattgtattaaaatgagactattggaaggaaatggtgctaaaactaataacatctcttaccaacctttacccaactcctgggttggcaaacagctgaccaaactgccatcacctcccacttggaagtgtatggccgacagcatgaaatagctgagcccagatgttccttctgcatcctccgaatcccagggctgggtgtaggtagccgttggaggccatcgctacagggcacctatctgttatcgctgctgtcctcccaacagctgtctccagttctagttccttggttttcaggcacagtgggggatgttctgcacccagtggacttcaaaagagttttgaagacttaattttttgtaaaacaagtacttgagattttggtttatccataatagaatgtatttcattagattctctgattctatataagaatgtgaaaagattgatatattgttgttagaaataatgttatttctttccaattttttttttttttttttttgagatggagtctcgctctgtcacccaggctggagtgcagtggtgtgatctcggctcactgcagcctctaactcccaggttcaagctattctcctgcctcagcctcccaagtagctg

SEQ ID NO: 116190 - DNA, 1065 bp, Homo sapiens
tgggtggatcatctgaggtcaggagttcgagaccaacctggctgacatggtgaaactctgtctctactaaaattacaaaaaaattagctgggcgtgctggtggatgcctgtaatcccagctactcaggaggctgaggcaggagaatagcttgaacccgggaggcagaggttgcagtgagctgagatcacgctattgcactctagcctgggtgacaagagcaaaactccgtctcagataaataaataaataaaacaaaacaaagttcactatgacccttattccctgtccccctccacagaggtgaccactgctaacagttttgactttatagaccactttagatgtgcttatgtatacaatatggatttatggagcagtggtgtgtacaatacttttttttttttacatagataatatcatataaaatgttgtggggttttttttttgccacatacttttttctgtcaatgatctgtcttggagatctttccagatccgtaagtataaatcagtggttttcaaccaggggctagtgagccccccaggggagatttggcaatttttgcaggcatttttggtggtcacgacctgagtggggaatgctattggcatctagtaggtagaagtcagggatgtactaaacatcccacaatgcacagaacagccctatgacaaagagttttccacctgaaatgtcaataatgctgaggctgagaaaccctgataaaggtctactttattcttttaactgctgcatggtattctgtagtttatttagccagtcatgtagcagtgtatatttacatgatttttttttcttttttgagttggagtcttgctctgttgcccaggctggagtgcagtggtgcgatttcgactcactgcaacctctacctcccgggttcaagcgattctcctgcctcagcctcccgagtaggtgggactataggcgtccaccaccacacccagctaatttctgtatttttagtagagacttttaaaaacatgtttatttgtagatatcagtgaatgtttcttccatttacttttgacccaactgcaat

SEQ ID NO: 116191 - DNA, 1047 bp, Homo sapiens
caatgtaaacaaacgatgactgcttgaagatgcaccagccgtgattgtggagacctccaaattcatgacagagttgttaactggcaggtttgttatttcctataagtacaaggaagggaagtattaaaataattcatgcccattagagagaggaaattaacattcccttaaaaattgttttccagtgaaggaagcccatcccccagaattgagctgctgcataatattgacccgaacttcgtggactcttcaccgtgtgagtaccagtgcattgctactagattaaatctaattggcccaccaagatggtttgattacctagtgtgtctctagcctagctttctcttttttcctgagttgctataaaggtaaacagttcttcgggacatatctcccgctcatctcagagggcagtgtgctgtgaaagcaacaccagcttatgaaataagaaaggtgaattctattcttgctctgccgcttactagcctttaagccattgaactctccctgccccagccttccccatttacaaaagaagaactcatggcatctctgaggctccttctcactgtagatgtcatgttgctgccctgttcttacctgagagctccagagccaccttccagaaaactcacagtcagataagccacagttgggttccaggtagtgtgagcaaccacattatctgattgggctggtcaggtactgcccaacacctgctgggtgtcacaagtgtgactttcctagcagtcctggaagtgattccgcttgattctgcctcctgcctaaattaacctgtaaagagccttaccatttccttcagggcaggcatgcatgtagtgcttccagatcacaacggactgtaataggcctgtataaataccatgcgagtggccctaatgccctcagcatagtgagtttgggcatagaaagccttagcaattagaccctttgcccagctttcatcataatgctcatcttgcaaacagtgcccttatattcccttattcacatgggggctcccatccgctcctttctggacatact

SEQ ID NO: 116192 - DNA, 1070 bp, Homo sapiens
attctttgaaatacccaggagactgaactagaacttatggaccgcaccctatttctcatatagttaaccaactaatgtcctaactcagtggattctgccccattgctgataagtggcaaccatcggccaggtgccatctgtgggggtacaaggacaggcgaagctgaactgcccttctgctgaggccacatctgcagttggcgctatgccaggagagccttggagaagttgcacatgtgtccattgacagtgctttctctttggagtgctcttaaaaagaataactgttgatagaatcgcttattgctaatggcaaaacatcacagagaactaattgcaaaaacagtcacacttactacatccgtggcctcccctaatgatatgtggaaacaccttccctttcctacagtagcaaaagtggccaaattctctgtacaacccggagaattttcctatctgagtcataactgaagagctgctcctagaatcagattccagatccagccacccttgtccccatcatctccactcttatttccaccaccatcttcatccaatactttccgttgagcactaacaaatatgtgcaactgaaggacactacataatacctcagagaagtgtatctatttaaaacagagacaacaggcttcttctaaagtattgagccagcatcacttacagcaatccagacaacagagtgaaataatcgttctgtctcagcctttcttgatatcacgggaagagtgtaggtatttctttccagtgtatttttgtatcacatgaatagcaccttcttctaagtttcgatacattggttatgagtgattgctactctgtgcagtatcatgaacatggaggaatttcttctttctactgatggtgaccttttgttgttttgaatatacgggtctgctcagcttcaatatgaaatggaatgtgtatttcaacaactggcctgagtgaatgtttgggccttgagtttttgtcaagaagtgatgtggggaggtttgaagaaagattcttgtaagtctgtgatgtcaaatgatgagattgtctgtcaccgaccc

SEQ ID NO: 116193 - DNA, 1048 bp, Homo sapiens
attatcaccatcctaacagatgtgaagtgttacctcattgtggttttaatttgcatcttaataatgactgatgatgttgactgtctttacatgtgtttattgccttttgtgtatcctctttggagaaattgctattcagattctttgcccattttgtagttgagttatcattgagttgtaagggttctttatatattctggagatgagtcccttatcatacatgtgattcacaaatactttcaatgcattctgtaggttgtcttgatattatttttattaatgcataaatctgaactgtcttatccttctatatttaatgcttcaatatcctcttaactggtttgcacaaactttctttccagcctctgtttctctaccttgctctccagtctgtgcatgagccccttcaggtccctgaggaatacttgaagccatatgactttatccaagacaagaacaggcatcactatgcaggaatggtgtcccttatggatgaagcagtaggaaatgtcactgcagctttaaaaagcagtgggctctggaacaacacggtgttcatcttttctacaggtaagtctgtcaataggaaaatcatctcttggcaaagcctaggacatggtatttgataagtggaatgaagacaaattggagcggttagcattgccttattaaaataaatgcaaactgcaatagtggagacatggtaattgtggatggaaagatatatctaaggaaaaagaatgatgggcttcccccgttccctcagatatcaaaatattctgggactgtggcttgaaaacacatgttcactaactgagtaagtatgagtggacatcactcatatacagggctgctgggtagtgaatccctagagtggcttgttcccagctctctctacaacccagacatcctctatggtcacaactcccaccaactagaagggtctctgtatcactgcaaagagacagattgtgacattatgaagacaaataatggagccatttaaatctatgaaagtgtctccaagtttagatttttttggtatta

SEQ ID NO: 116194 - DNA, 1039 bp, Homo sapiens
ctgacctcatgatccgcacacctctgccttccaaagtgctgggattacaggcttgagccactacgcccagcctcagtgtttaaaatttctatgaatatttttatacttttcctacatatttttgatctataaacaatatatagttgtacttcaaatgttttaaaattttatagaagtaacatatatacctcttttttcttgagatggggtctccctgtgtttcccaggctggtctcaaactcctcagttcaagggatcctccctcctcagcgcccccaacagtgctgatattacaggcatgagccaccatgccctgcctacatgcttttttctgtttgtggttgttctctttttttttttttttttggtcacttaacatcatgtttctgagaattaatcatgttgaaagatggtaaatttagtttttcacagacgtcatattagttcattcattttttctgtatttttttattgtagggactatcctatatacatttattgattactatatgatggagattgaggttgtttccagatttttactattatagataatattattattggtggaggtctattccaatggggcttttcctgtagctgcatgttgttggaaactcctcatagactaactctgtggttttgctttactcacaggactattagttaggtctgtgggaaggaactacaagacagttgctaaaattatgaaagacctaataatgtatcttttactgtagatattggcatattccacagatctgtactattattcttgagtgtgatagcttagaaatgagtatgattgaacacatgtttagagagggtgtcaaattgagaaccaggaagatccacctactctaaaaattaccctaaagtaaattggttgtagaaattagatcccaaagattattgattttttccataggtgaattttgaagcctccgtgaatatatccatattaaaaggagatgaaagaagccaaaataaagaattatggtatgacgggataactgaattaagcatcacttctattaaa

SEQ ID NO: 116195 - DNA, 1370 bp, Homo sapiens
aggggagaacctaacaggctgggggcgagccccacatagttcagcacaccgttccccgcggcaacacgctacttctgaacgcaggagcgactctccgtccgggctccctccaggagaatggaggcaaatgtacattcgagggtctcaatacctggaattcgaaacgtctcagttcctccgccttagttcctcttttcccgggttcggaggccacctgtgcagcagggcacacctgccactctcatcgccctcggagccggcaaccagccgacagccggctccagccccggggaactggaggctgcgcggaaggaaggagagtcgggagcgcggccgctcgcgggctggctcaggggacgccgagaggaggcgccggcgcgcgcgggcggggtgcgcgcgccgccgccgccgcgtcaccagcgtgcggcacgtgcccatgtttacgtccctcgtggagccgccgacgtcagcagtcgaatggcaacattgtggcgatgctgaggcgcagagtttaggagacgggttcatcagtcaggccggctccgggctttctgcagcagcaccaggggcgggggcggggatcttgacctgggcgagcgaccgggacgcatacagcgccggcctgaccccgcgggacccgcgcctcaccaccggagcgccgcagacgcagctccacggcctcgcgcggggggcggcgggcggccgcgaggcgctgcggcagcgcggagcttgtaaacagatccggccgcaggtgaccatgtgaactacctgctcccgggacgcttattgtccttctctcgatccgcgccacaaaggagctcggcggtcggggcgcggagggacaggcgaacgagccgggagagccggccggcgcactaagatggctgaaggcgcccggcgagggtgagcggggggcgcggcgcagccagcggggagtcctcgggcgggccgggccggcggcccttccccgcggcgagaagccggagccaccatgtcgttcgcgctggaggagacgctcgagtcggactgggtggctgtgcggccccatgtgttcgacgagcgcgagaaacacaaattcgtctttattgtggcctggaacgagattgagggcaagtttgccataacctgccacaaccggacggcccagaggcagaggagcggctcccgggagcaagcgggggcgcgagggggcgccgaggccggcggagctgcgtccgacgggagccgcgggcccggcagcccggcgggcaggggtcggcccgaggccactgcctctgcaactctggttaggagccccgggccccggcggagctcggcctgggcggagggcggctctcctcggagcactcgcagccttctgggggacccgc

SEQ ID NO: 116196 - DNA, 1068 bp, Homo sapiens
tccctaatggatactactacacgtagtttctcaaagcaagttactgtttttactattaatgcaattgagattggtggagaaatgcacccccgccctccgcgccttcttttttttttttttttttggaagcagttttgctccgtctcccaggctggagtacagtggcaccatctgggctcactgcagcctccccctcccgggttcaagcgattctcctgcctcagactcctgagtagctgggactacaggtgcgcgccaccacgcccggctaacacgttagcccggctactttttgtgtttttagtagagacggggtttcaccatcttggccagtatggtctcgatctcctgacctcgtgatccgcccgcctcggcctcccaaagtgctgggattacaggcgtgagccactgtgcccggcctgaaatgccccttttaatggtgtttatattcctaagattgtgttgttatctgcttatgtatatataatagttgaaccttgttgttagattagggagctagagcctcatgtttttttcgtagaatattagatatttttctttattagatttgagtatttaagaaatgtttgtttctcacttataccatagtactctcttacaacttcccgaatccagattttcactgcttcctgttggtttactgtatgctaaatgtcacccactataacatgatcctagagttccagggatctgtttttatttcccttttttatcacctcacttcgggagtctaccttaaattattttgaaggaagtgacaaatcttaagtgaccacatatattctcagaagtgtttggttaatattgacctgtatttctcttaaactgcaagaaccgttagtgcttctttctcttattagatttacagatatattttttaaaatacatattcttaaaaatcccttaatgaatgggcctgtctgattgtaactttttggatactcagaaaaagcgactgtcaggccggtcgcggtggctcatgcctgtaatcccaacactttgggaggccgaggcgggcggatcacgaggtcaggagatcgagaccat

SEQ ID NO: 116197 - DNA, 1034 bp, Homo sapiens
agcctgggcaacatggtgagaccccgtctctacaaaaaaaaaaaaatatatacaataactagccaggtgtggtggtgtgtgcctgtagtcccagctacttgggaggctaatgcaggagaatcacttcagcccaggaggtggaggttgcagcaagctgagatcgcaccattgcactccagcctgggtgacaggagtgaaaccctgtctcaaaaacaaaaaaaaaaggaaaataaaaaatgggaagtgttaaggctaagctcaatactttgagcctcaaaagaaatattcaggccatggtcttgagtagtgagacaccagaagtatggagatagtgatgaaaagcagtcaatgcttttcattccctcttgcttctgtgttttagggttccgaggtcctggcatgatagggagagttcaaagcaagtatttataggttattagaattgattttcttagttgtgaaactgtcttgttccacagctcttggataagcacaagaatacagagagcatggtggagcttctggacttgtatcagatggaggatgaagcctacagcagccttgcagaagctacaaccgaactctatcagtatttactacagccattccgagacatgagagaacttgccatgctacgaagacagcagatcaaggtatttttttattaatcctaactagtagcctgcctgtttcatagttctcagcctgaaaggccatgcgttatccacaagaggaactttaaaaaaaaaaaaaaaaagaaggtacctggtcctatttctgcaaagtttcttgtttggtagaatagggttgtagcctgagtatccattctaaagcacctcaaaaggcaattctgctgagtagccagggttgaggatagcccagaaagtaatgtgttcaagttagcacaaagttgtaaatacattgggaggattcctattttctccctttcctgcactttccttcctcctctagtcatgtctcctctttaatgttttggagactgtgtactcttagacttcattaccagaaatttt

SEQ ID NO: 116198 - DNA, 2014 bp, Homo sapiens
caagactctgtctcaaaaataaaattaaattttttcccccacaacatgggtgaaaaagcattttttgaggcaagcatttaagggtttgattttatagctgaccttaaatgttatgtgtaattcatatataaatgttgctgaactagaacattaaaattgtctttttacctaataggttaagttggaatatcattatgtaagattgagtatttgagaaaattagcaattactttgagaaccttatgcgtggggacaggggtgagtatatttgaaaaggtatgagaaagtaaggttgtctgtgtgtcttattttctctttactaacgtatcagggtggagagtaggacagtcacacgacttagacatactcctttatcaatacttttggaaaatagctgtgctgtcagctttttgagggggggatttgttttggtcagtcagttttatcataaatttggcatttgggttaaaacagcaacatggaacaaataatttttagatgttggaaattcctggttttttttgttttgttttgttttgtttttttgagacagcgtctttgtcacctgggctggagtacagtggcatgatctcagctcactgcagtctcgatgtcctgggttcaagcagtcttcccacctcagccccacaagtagctgggactatgggcgcatgccaccacgcccagctgttttttgtcgtagtttttgtgcggaggtctccatctgttgcccaggctggtccagaactcttgaactccagcaatctgcccaccttgattgcccaaagtgctgggattataggcatgagccactgcccagcctggaaattcctgtttctttaaatgaatcatggatatttgtctgctaagaacttgactagaaggccaggaataaactggacgacctggatacccacctactttagactgctgcattgtttagcagacataatctctatagcacagcactgactatccagaatctgtacacattcttttacataattatatcatgatttgtattgggtattaatattagcaaattggttgaccctacttgtcagcctatattgtccactagcatcacttaactgctacatttttcctgggaagtagaatgtaggtgaagaggaacagaaaacatattttgaaaatttgtgtcttttctgacagtaaaaatggtatttcactgcatttctttttctaagacattgagaaaatgccccatcaatcatgactattcttttattcttgatcctacttgtgaatttgcagatataagtttttgttagccaacaactagatttagttagcaactcatacattacattagattgagtgtgttgtattgctttaaaaagatccgctaatttaattatcacacaaccttgtaagttgggtactcttattatttgtattttcctacttcatagataagaaaactaatattgggataattatgtacttgttcacagctaatttgtaagtggtagaactgatacagtactcaaatcaggcatttctgattccaaagattttttttttttaactgcattactggttacttgttacttctaagttaaaaaatctactcagactttttaaatctggaggagctaaaaaaaaaaaagcaagtataattgattagcaaagtagttgttttaagtattactaagatgtattagtaatagaaaaaaagaaaataatttatttttatttttatttttatttatttatttttttgagacagagtctcgctctgttgcccaggctggagtgcagtggcgcgattttggctcactgcaagctccgcctcccgggttcgtgccattctcctgcctcagcttcccgagtagctgggactacaggcacctgccaccacacccggctaattttttgtatttttagtagagacggggtttcactgtgttggccaggatggtctcgatctcctgacctcgtgatccacccacctcggcctcccaaagtgctgggattacaggcgtgagtcact

SEQ ID NO: 116199 - DNA, 1067 bp, Homo sapiens
ttaaattaaaatgaaatgaaataaagccatcatgaagcaaatcatgaaacatctggattaaattgtagacttctattttgtggttaaccgggattaaccagaaaaccctttagattccaattcgtgtggctgaaagactttaaaaagtatatcagggccaggcgcagtggcttatgcctgtaatcctagcactttgggaggccaagacgggcggatcatctgaggtcaggagttcgagaccagcctggccaagatgacgaaattctgtctccactaaaaataccaaaaattagccagatgtggtggtgagcacctataatcccagctactcgggaggctgaagcaggagaatagcttgaactcaggaggcacaggttgcagtgagtcgagatgatgccactgcactcaagcctgtgcgacaagagtgaaactctgtctcaaaaaaaaaaaaaaaggtatatcagtgtgctttctttccctggcagaggattttaacaattccccatctatttataattccttgataatttctctgaacatacataatctaatagaatatgaatgcatactagtcttgaagattagctacttatttttgtctttctcctacaagcatgtagctaaattatgattaactaaggttatattcccctctttcagttttaattcgtcaagtatttattgagcattgattatataccatggtggatatgagcttaggatttggacagtgctgtccagcagaacgccctgtaatcatggaaatgttctatgtttaccctctccagtagggtagttttcagccatatgtggctaatgagcttttgaaatgaggcttatgcaacagaggaacagcattttaaattaaatttaaataaccacatgtggcttgtggctaccttactgaacagagcacctctatagatctcagttctgcaaacttaactctttaggaaagcttcagtgagttccttaacctgtctttgaaatgtaaatattatataccttctggaatgttatgatttcatgagttaatgcatataaagcatttgctatagcacttgaca

SEQ ID NO: 116200 - DNA, 1028 bp, Homo sapiens
caagtagctgggattacaggcatgcatcaccacgaccggctaatttttgtattttgggtagagatagggtttcaccatgttggcctggctggtctcgaacccctgacctgaggtgatccacccgcctcagcctcccaaagtgctaggattataggtgtgagccaccgtgtctggctggttgctgattttattttttaaagtcatctacatttaagttagcataatatagcagctagaagtattttacactaaaactgtgtattaaaaatatttcatgtttcatgctttcatatttcatgtttcatgaagtattaaaaatatttcatgtttcatgaacaaaaaaaaattttgttcagtgaatcatcccctttggcccacattaggataacttctcatcttttttcctattaatgataaaaattgggacacagcataatggaattattattaattttttaccagaagagagaaaaattacatgatgaagaagaaagaaaaagtgcctgggttagccaagagagacagagaacactggatagacttcgaacatttaaacaggtattaaaagtaatggtccatttattgtttttcttttttttttttttttaacagagctacatatacacctgtaggatttctttgtgggaaaaacttggttttcccttatttataaactattataaccatggaagtcctttttaaaattgttttaatggcatggctccatttcctctggtggttttccgaatttagtattcttgtgacctttgacccacagcttcagtagtataagaggaatgataagggcctctgggaaacctagattcctcttgagtttaaaaaattagttaaatcacaactgactatccagctcaagcatcagcatgttatttattccacatacatcagcctgtggtggtaatacatcaaatgaccattggcagaattagaggtggaggggagcagcatatttgagaaatgcttcagcagttctcttgccagggtaagccatgaccacacactgatac

SEQ ID NO: 116201 - DNA, 1335 bp, Homo sapiens
ctcactgcaacttccgcctcccgggttcaagcaattctcctgcctcagcctcctgagtagctgggactacaggtgcctgccaccacacccagctaatttttgtatttttagtagtgacggggtttcaccatgtcggccaggctggtctcaaactcctgatctcaggtgatccacccgcctcggcctcccaaagtgctgggattacaggcgtgagccaccacacccggccacataacatcttttatttgaaggagaaaataaataggcatgtgctcataaattgtttcaataacatttaaccagttccaataacttctggtattttagaggtatcctgggcaagtcatacttaaatcaaccagattacgactagctcatgcaagaagaaaaggtgcagcaagtcctgttctccaagaggatcattgtgactctttaccaagtgtgttacaggtagaagagaaaactgaagaggtgggagaaggaagagtcaagcgtgggccatcacagacaacagaaccccagagccttgtgcaacttgaagatacttcattaacacaacttgaagccacctcattacctctcagtggtgttacctctgaactgcctcccactatatctcttccacttttgaataacaacctcgaaccatgttctgttaccataaatccactcccatcccctcttcctccaacaccaccacctcccccacctcctccccctcccccaccaccaccacctctgcctgttgctaaggacagtggcccagagacactggagaaagatctgcctagaaaggaggggaatgagaagaggatcccaaagtcagccagtgccccctcagcacacctctttgacagcagccagctggtcagtgcacggaagaagctcagaaagactgctgaaggtttgcagaggaggagaggtacgtcaacatattttcatggtccatctgttgtatgacatcaggcatagtaaaaaactatattttttgacgttgcaaagcttaaaacactttatttttgacattatttgatagtaaacaggttttcaaagtcacactagaggagaattcttagtgcataaagtacacagaaatgtatgccttcttgggctgttaggcatgttttaaaaacagatcttctaaagtgatacattcatgtttggtaatgtataatgggtggctccttttgtgttagggaaaaagttttgattttaaacctgagatttttaaaaaaatactcatatcagaaagggtaagatatctggtaaggactgtcaccacagggaagacattggcaggatcatgtaacatttgttcatacatttgttgaggac

SEQ ID NO: 116202 - DNA, 1058 bp, Homo sapiens
aagtgacagtctcattcttgccctaaaaaaacagaaaagggcctggcacagtggctcacacctgtagttctagcactttgggaggctgaagcaggcagatcacttgaggtcaggagttcaagactagcctggccaacatggtgaaacctcttctctactaaaaatataaaaattagccgggcgtggtggcgggcatctgtaatcccagctactcgagaggctgaggcaagagaatcacttgaacccaggaggcggaggttgcagtgagctgagatcgtgccactgccctgggcaacagagtgagactcagtcttaaaaaaaaaaaaaaaaaaaaaaaaggctttccaggttcagtggttcgcttctgtagtcccagttactcagaggttgaggcatgaggatctcttgagcccaggcgttcaaatccggcctgggcaatatagcaataccccgtctgtaaaaagaaatcaatacgtcaattttttttttaatgcaaagccttttctgacaaagtatttcagtaacaaactgttatgcacactgaattttgatgtcatgttagctgacctcaaaggagttttctaagatcattctggaaaaattgttgcattgtctgattatttaactttctaaacccttaaaaaaaactacttattgtcacagttactgtattatctagacaaatttgcaggtatcattaatatataaaaattatctacatatctaatgaatactcctatacatattaagattctctttggttacacatgtagcattctcctaatataatagagagctatagtctactacattttaatatactaattatagagtaatatggcacagattacaccaaatatatagaaacattaaagataacatggtataaattaaacagtatatcaaatttataatgatggtaactgaaatgttgtaatttgtataaaatttatagagtatacaaacatgttctattaattattattctttcttgatggaatatgtttctctaggcttcaaacattcaccaaagtagggaagacttgagtcctagaagg

SEQ ID NO: 116203 - DNA, 1051 bp, Homo sapiens
tactctagtagcagtttatggggcaaatagtttagactgaatttacctttttagtatatagttttcatacagtgttagagtaaaaataataaaaatgaaaatctaatagtcttttaaaagtgatcaaaatctgtatttagattattttgttttcatttttactgctttaagaatacagtcatggccttttgtaaaaaatgtcttttttacactttttgagggaacgtaaatacactgtatctttaaagggtcttttttttaatggtctgtattattttgtttgtaaacaggtgacataacagaagaaaaatatcattcaagattggttctgattcttttggaaaatgacagtttaagcacttggttcctcagttggataacattagatccaaagttcattggttcagtggtgtgaagaaaggaagcacaattggcaggttatcactttccagtcgttccaatagatgatggttaacatgaattttacatgtgcaatgttcctgactgcaatgaagaaaaggccttctggagatttctgttttttaagcacattctccttccatccacatatttacatccttgtaatggccagttaagctagggcttgctgtaagttggaagaacactgggttgacagagatctactgtgagctgtattgggactgctttgagaaccatctttcaatgcactgaaaagtcatctgaaaaaatagcttcttccatatcagcttatattaaatactgtgacactctgagaaagtttatcatcatgatagctgtaagtcaggcattaaaatcaaatggaaatacacctaaaatgtccgcattactcatttccaaaggatttttcataaagatgttcagcaacatctgaaaagctgcatttatggagatacatctattaatatgttcacaacatgatacatttaacatggcatatttttaggagtcttatactttgtaaggttttgaagtttccgtgcttttaaatcactcttcatatttcttgaatttataatagtttgaattttatgtgcatccttgtttatgg

SEQ ID NO: 116204 - DNA, 1093 bp, Homo sapiens
atcttggcctttctgtggagggagttaagaactaaaataccaaaaatcactttatttcttttaagacaattatctggcctaaacccagaaagcagtactggagcaaaagcccagtgtatatgaattggtattcctagagaaaaaaagaaatgctcacacctttgttattttaaagtgttttcttgaaaataattagggagaaaattttctggcaacaggttatgtaagacaacaactttttttattatttcaaaacaaaacaggcacatgccaccatgccccagctaatttttatattttttatagagacagggttttgccatgttgcccacgctggtcttgaactcctggactcaagcaatctgccagcctcggcctgctaaagtgctaggattataggcgtgagcctctgtgcccagcctgacaaaatcttttatttatttaaatgttagtaatacgtttattgatgagactaggagcttctctgcagcatcttcataatacattggttttagttcccacactattcccacatcttatctgggaagattagaaatacagatgtaatatggaagcttcaacagcatgggggtggtgatagtgtcctatttgcccttggtaaaatattaaagcgtatttcttaacccaaagagtgattggttatatgaatatatttgaaaaagttaaagcaaatttgcaaacctttacaaaatcatgtatcaattttatgctatccagtttttacgtacccatgtgtcaacatttcatatatccagttctttgggtgctggttcactttttttcatttattcaaattcagaaaaatacggacggatctaatgttaaattaaccagaaaccctggaacattcatatcttgagagggaatttgctactcttttacttttgggatttcattataaaataggctcattttatacatatgtcctgtggtctgtcttccagagtgtgctgtaatcataagtctctagcaaagagtggagggtggagggtgtgtagaactccactcagcctcatggatacatctacaagtctctcaacccatcctgttacagttctccatgagagtcacc

SEQ ID NO: 116205 - DNA, 1308 bp, Homo sapiens
cagcattctctctgtttggaatgggatcagtatacaattaatacaatttaattttacacattccctaagacaccatttttaagttacagtcacatgagtgtttgtataaatttaagtcaatgcttttagcctaggcaaagctaaatacaaggtttttggggttttcttttttcagctttattattgaagtattacaaacttaacatcagataccaatgtgtaaaaagtactattgggtccttaagggctctatcagggagttgaaatttcatacgctttaccaggttacttgtaaaaaatgaacagctgtaagacatttcaaaaccattgcagacacattgttaaaatgcagccatttgataatgaaagcagaaaccttaagttttacctaattattgcactaaatgtaaatgataacataaaattaagtgtgcattttaaacagattctatttcccacttactgcttagcatagaaaaagagctatggttagaggagtgaccagcaagatttatttcagatggaaaaggggtgagaaagtggaagcaccttactgttagagcatgttgcatctatttagtgctactgaacaattcagtagttatttctgaactttgctgcaaagtgctctttagttaaagcacattaagaagggtcactgcttaattgctttgtaaaatgaagcaatggtattttttatccgatatagtgtaatttaaaagttttcctacaaagtgagtttatattgttgcctaaactatgttatgtaagcaaagggtttggaaaggcgggagggagtctagattcggcgagagtgtgcgtttgtgtgtgtgaatgtatgaaaagtttccccattgggttattcttaagatgtgtttattgtaaagttttctacgttttgcccacagtaaatgtacaacttcgcaattgtaggatttaattgattgaattccaaatttatactgtctcttcccttctgcagagacattatgccactgtaaggtgcatgtacagaaaatacctctgaggttgacttgttaaataactgatgaatgttatttcacactgaatctcaaagcagtcatttgttttgcgggttaggggaaagttttgttttttgctggtgttttttgttgtttttaattaggcacactaagagtggctaaatttgggggaattggtggataggaaagaccttgaaaagtgatgtgtagatgaaaacacaaggtatggatgttggttacagagttcagttttaacaagggaaatttggggattttttttttttttacttgcatgttctatggg

SEQ ID NO: 116206 - DNA, 1065 bp, Homo sapiens
ccttcatttgtgaaccaagaggggtaaatgatgctacccatacagtgacttctgagttctttaactttgacagaatctccattgtttcattgaatttctcattgtattatatgtctttccaagtgtgcaaactataatatgtagttaatgaaaaatggaaggctgcagattattttgcatgaataattaattgcccattagggctaaggagactgacatgatttttatcggttctgggtaaatgaaaattttaatggaaaactcattcaccatttactagctttgtgcaatattataaaaggtagaagcaaaacactagcacattgtgctttgcttggcttgtaaggatggctttagtaccattacattaaatggacagtgtgcacagtgtattgtaaatgccaactcttgcaaatttacaatacttaaatatgttcaattaacatcctaaagtattaaaagtacagaggaaaaactaagcaagcatttatagcaataccatgaaatctccagtaatcgttttgactgttgccttttgctctttagtgcagcttttctgcattgtaattgtattgctttgtatttcatgttttttacactcatgacttcagagttaagtacttgtacaccaagtattgcaatcacctttctcttgttgtacatgcaatgtaacaacctacagttttggtgcttttaacaatattcctctttttctttaataaaggatatttatttgaattaattaacctgattttgtttgtttaaaatatcagtggtacatattttcacttcatttcaaataggaggaccatagcaagttgtatatctgttatgacaaaagttataacatggagaacaggatccagagaccatccatgcctgtatttctgcctcttcctgagcgctgtttgttgtgacatattttgatggcaactttctttgtgctattaatgaactttctcattgtttataaatattcacaaagtttggaagtgctgacttccaaattggaaaatttttaaatgggggtggggagaggcagaaaaatatttataaagttacaca

SEQ ID NO: 116207 - DNA, 1052 bp, Homo sapiens
ggtaagaaagagattacacatgtggctggagcccagtaagcagtggggtggatagcaggggccaaatcacatctccttgtagtttatgggtaggaaatttatggctttattccaactgcagtggaaattggagagctttatgcaggggagagacatgatctcaccacgttgtgggtatagaatgagttgcaggcagacaagagtagcagtgggaagacagggcaggaagccagtgaagcgtctagtggatagatgacgtaggctgggacccaagggtggcaggggatagagaaagaagtgtgtgtgtgccaggtgtatattagagttaggtatgacaggactgggagatttggatgggagccgggaagtgaggttgagaaaggtatcaaggataacttctaaattctgaaaggcagaactggaggaattgtgaaagacggggaaaagtgggaaaattagggttcaggttttgatggtgatagggtcaaggggactgttttgggcatgttatatttcagatacgtgtgaggcttccaaagaaagaggtcactaggcaactgaacacatatggacctgcgtacatacagtgaactgagaagaggcgaggacatggagtcatgatgagagagatgtcatctggaaccatgagaaagagtaactaggcagagagggaagagttatgaaagaagcctagaaatacttagatattttttgtttcaaccatccatgaaagccaaatcatcacgcttctatgtaacggagtgaaagcatgactggggttgagatgatgctgaagtactgccttctgataagtcaacttgatgcaatgacaaaagttagataacggtaggcaaagttggaattggcattagaaaacctttcagcaagtgctgggtcacaataaatgtttggttgcattttctgacaactcttggaagttccagagttaatcctgtgtttcagaaattgtgggactgacccacgagcttgttgcacaggtaagccatcctgtttctgaaaagaggtgggtcacaaagtgccctatagggaag

SEQ ID NO: 116208 - DNA, 1039 bp, Homo sapiens
caaccaaacatttattgtgacccagcacttgctgaaaggttttctaatgccaattccaactttgcctaccgttatctaacttttgtcattgcatcaagttgacttatcagaaggcagtacttcagcatcatctcaaccccagtcatgctttcactccgttacatagaagcgtgatgatttggctttcatggatggttgaaacaaaaaatatctaagtatttctaggcttctttcataactcttccctctctgcctagttactctttctcatggttccagatgacatctctctcatcatgactccatgtcctcgcctcttctcagttcactgtatgtacgcaggtccatatgtgttcagttgcctagtgacctctttctttggaagcctcacacgtatctgaaatataacatgcccaaaacagtccccttgaccctatcaccatcaaaacctgaaccctaattttcccacttttccccgtctttcacaattcctccagttctgcctttcagaatttagaagttatccttgatacctttctcaacctcacttcccggctcccatccaaatctcccagtcctgtcatacctaactctaatatacacctggcacacacacacttctttctctatcccctgccacccttgggtcccagcctacgtcatctatccactagacgcttcactggcttcctgccctgtcttcccactgctactcttgtctgcctgcaactcattctatacccacaacgtggtgagatcatgtctctcccctgcataaagctctccaatttccactgcagttggaataaagccataaatttcctacccataaactacaaggagatgtgatttggcccctgctatccaccccactgcttactgggctccagccacatgtgtaatctctttcttaccttaggacctgtgcgcagactctgccctctccctagaattgttcacctccctcccttttgtaagtatggccaacttggtgtctcccaaaattcatactttaagttctaacccctagtacctcaga

SEQ ID NO: 116209 - DNA, 1566 bp, Homo sapiens
cacacctggaacttgaggcatgggcgtcctctgctcttcaatctcctatcctgtctgaaggttcacttttttaccctccctgctcccatctaaggctgatgtactagacaaccggagaaaggaggttgtgctcagggctcttccatagtgatatttgccaccctctcatttccttccactctccttccttgctacgtggggggtgtcattaaaaaaaaaaagtctcatttgaggtgggaaattcaaaagtagagaactgaccctttcattactacagtaataacccaaaactgagggccaagtgcatagaatacatttgttgaaaggaagaataaatgccaggaaagcagcagaaatccaaatttcaaaatatcatcccatcacgtacctcttgaacatctctcatattcagttcagctgtttttgcatcatttacagttttctgtgtctcttacctggattgctacaattaaaaaaaaaagatcttcctgaatatggttttctataagctttcttgttttaagaaactattattaatttttataaagatgaggtctcacaatgttgcccagggtggtcttgaactcctgggttcaagcaatcttcctacctcggcctcccaaagtgctgggattataggcatgagccattgcacctggcctcccataagcttttttttttttttttggacagagtctcactctgtcacccaggctagagagcagtggtgtgatttcagctcattgcaatctctgcctcctgggttaaagtgattctcatgtctcagcctcccgagtagctggaattacaggcaagtgccaccatgcctggcaaatttttgtacttttagtagacagggtttcatcatgttggccaggctggtctcaaactcctgacctcaagtgattcgtccacctcggcctcccaaagtgccaggattatatgcgtgagccaccacgcctggccccataagctttctttaggccattcttgatactgtagccagaatgttttactgtctctaaaatgtgcatccagtcatgctatgtctcctcctcaaaggtttcagtggctttccactgcctttgggaaaagtcagaactgctgaggacatgaaacaaagtccgtagtctggactctatgacttgctctgattccccaagctcagccagagtgtatgtcaggactgtgaattcaaatgtgtggcttgctttcctccatcactccaatcttcaaagtgaacatctattcgtcttttacacttagttccaatgttaccttctcagtgatattggctaattctctcctgtgtatatacctttcataacagcattgatgtatgattgcttcttggttaatatgcatgcttccctcattagattataagcttctggaggatagggctgtgtcttcccatctttgcattccagtgcctggcagagtgcctagtgacattgtaggtattcacaagatgtttgactgaacagcaaactggcagaggatgctgtcagaagaaaagccaccaatcaggagacaaaaggctcttgacataagagagagaaatgt

SEQ ID NO: 116210 - DNA, 1127 bp, Homo sapiens
atcagggagtttagtatgaagagttaaaaaaatttaaaaaacagtgtaagctgttgaaatggcaagtgaattattttaatgatgtaataaaatatttttaaattttgacatagtgatcatttaatgaaaaaactcaccaaaatgtctccatttgaattgtattgataatgtgggacatatgtgtgattcaatatatacatatacccatatgtatatacagaaaattatttttaatactttcctactgataatgaaatttaaaattggaaattttgtgagtgtttttcttgtccaatagagcctaattgtttccttttttagtgatttaacaatctcttgagggctgcacctttaaattcccagattgtcaatagacatgtacagtatatgggataaggtggacacaagtgcacatataaataaaatcttcttaagacttttaactattcatttacagtaggagagtatgtagaaatcatcatccacaagtcataattaggttgtgtgcctactgtagttttttccatttctgtattatataaacatttgcatattaaaatttgatttttcccagagacaagtattatatactgtatctatatttaaatcaaactgtggtaatatatttctcagaaaataatgttggggactatagcctgaacatgtggacttgaagcgacatggaggaggaggttgatcccattgtgtataagttaatatgtgataactattgaatcttgtacaaaaacaaaaattgaaaaaaaaaaagaaaagcaaaaatacagtttttattttgaaatacatttgttctctggagaatgtactttatctttttttcctccagtcttttacagatatttaaaagcatttaaatgatgacagcatttacttaaatctttcaggtgctactggattttgcattagtgtgttatgttgtgaaatcctaactttgacataaaaggttttataagtattcccctgcctggaaaattagtttttgttctcctctctctctctttctcttttccactttctttctgcagactaaaacatgctcacgaagttgcatctctccttgtctctatagaagatctccagcaccatcatagatttgatgttctgctgtc

SEQ ID NO: 116211 - DNA, 1032 bp, Homo sapiens
caggcccctgtagtcccagctactcaggaggctgaggcaggagaatggcgtgaacccgggaggcggagctttcagtgagccgagattgcaccactgcactccagcctgggcaacagagcgagacttcgtctcaaaaaaaaaaaaaaagtaggggtgcggggaggggaaatagggaaatcaacaaaaatactgacttttgtgaatctagtagatacataattcacagcatcaccttgggtcaattcgtttttcttctcacttaggaactagcagtaggtccactgaatagctttttattcccttcccttagatctggctctcaaccttccaaattcactgatgtagggaaactatgatttacgttaaagtatttaaaacacctgtaaggcactttgaacctttcacaaatatccctgagcaagaagttagtatccacatctccttcctaaaagaggataagctgcttaaaattttcaaagggaatttcttaagaggctttagagtatcatgggtagaaaccagcagcgaggatacaaagtggaagtgaaactgggacctcctgtggctcttcacccttgtatttccattcctcagccacagctacattagggcatgtggcaaagactacagaaggcactgtgccaggcaagcagtgcacagatgttagcagatgttacagtgtggagccatctccaatggagctgcccatcagcacatagaaatgttgctcttactgctagaagcacagttacaggaaccaggacatttctcgggccctcttatgggactctccattgtagcaaataaaaatggaagtagagctagacttttgctgtgctctctcaaatcaaatgggaaactatgcactaaagtacagagtgtttttatggagtacacataacatagattcccttctcccctctcacaatcagaaattaaccataccacttcttagaatcatttctgtttacttattttctcattgcttcattaacttgctaaatttattctgaggttacataaaaggtttaa

SEQ ID NO: 116212 - DNA, 1878 bp, Homo sapiens
acgactggctaatttttgtatttttagtagagacaggatttcagcatgtaagccaggctggtgactgaggtcgaactcctgacctcaaattatccacctgcctcggccccccaaaggagatgacaggtgtgagccaccacgcccagccctgatcttaaatatagtttggatttactgtacttttaagatgataaaaacaggaaaaaagtgaatggctgttaagagctctcaggtactatattctccacactgtgacatgtttccctttttaatgggtggtaagcaaatcttagattatagtaataaactagaatagaaataatttctgggaataacttttgtttggatgagactgtggactgtatgtaaagctgggacttggtttcacaagaagtgactttatcattgatataattgtaggtgaaaaatttaagttgtaggattctctttaataattgacttaaatatcattattcctccactatcaaacctcaaaaactagattaagtttttctagattaatttgaaggcaaggaatatttgtgagagatcataacttaacaatttagagatgtcagaatttttttactataattgtgaacaatagtattttacaagaagtacggtagtaatttggtcatgtacattgttctgcattctctggaaactgagaagcagtttatatattttaaaataagatgaaataaatataatttagtgactaagagtgtttattagctttctgaatagatacatttacattttcatgtcttgattttttttaagaactgaccttcattctctaaagattttgaggaaagtgttaaaatttgctaaaccattttgtcaagcactatcacttggtaaagattattcacaagaaaaaaactattctttatgtgagataaagacattactaacccacctccaatggcgattagacccttcctcttctctacctctgccttactgttacaattaatgggaaagaattgttcatcaatccattcctagtgattctcagtttctcttttcaagaagactagctggaattacaggtgtggtcatttgccatggaacagattgatcctagattaattatgatctctttcttgtggagggctttaaaaaattcctttttcccctccatttctgttcttagcctgctacatggggatttcattggaagggaggtaggtgatacggacagttttgctctaggacgtagagaagaatgtttttttcctttggatttggccatctttcctcttacccaaatagttagggccaagatcaaggtgtaaacctaggcagaggccaggcaagccacaaaatgtgtgacatttgtgatatatgtgacagtaaatagtggtaaggcctttggtaaaatggagtgtgcagggttcacctaaacatattaaagctgtttaaaatgaagccaaaagaggttggagactaggtaacccacatagtttctagtctacatctttaaaagaaatctctgtaaagattggatccagttcttgcttcatggggataatacataagattcatacttcatgtggaaataaggtcacaatcactgatattgaaagtggtcattctccagggactgccttccttgtagaatgtgtcaaatgtagatatgactgaacagtttaaataaatgtacattgtacttttgttttctgtctgccattttccatttagagtttagcttggccgtatattcactgttgacaaaattgttaattttggggaccttgttttattatatctcagctttattgagatataattcaaatactaaataacaactacctcaggtatacaattcagtggtttttagtatattcacagagttgtataaccatcacc

SEQ ID NO: 116213 - DNA, 2892 bp, Homo sapiens
cagataaaacgtgttgcaaatttcattcacccctttgccctccccctctcctcatccacttcttctcctgtaccccttccattatctacttctttcaccaaaatcacatcttcttgcatttttgtgcatcttttcttctgaagtatagtaattctttgaatatcttttattctgaccaattagttaaataaaccaaacatttttaaattattcgaaactgtttctaaattgtgttatatttccgtttctaaattgtatgtttcagagagttttcttgtgagtagcccagcttcaaaaaactttttctcctagcttgccatgaataaaaaataaaaatttccatgttttatgtttttaagtctttgactcaaatttcagttgaaatttggttcatcagtaagcatacatcaaaggcagttttaacctcaagatgatattgtgtactttaacaaaagtgtaactattttttatcccccacccctttttttaaaggaatccgcaggcggggatcttcagtctcctttaacaccggaaagtatcaacgggacagatgatgaaagaacacctgatgtgacacagaactcagagccaagggctgaaccaactcagaatgcattgccattttcacataggtacagattcaattcagcaattatgattaagtaaatgtgtaaatatggaaatgtttggtttcaggaacccttgtagttacaagctttgagtgaaaactccaggttgactttgactttttttttttttttttttactgcttctgttaacctcagaaatgaaatacacaaactttttattaatttatagtttatagttgcatagatggactgcagtgaacatttcctttatgtagaaaaaggagcactaggctaattacagtacaaattgtttttcagtgaaataaaatcttgtaagttgcttctacctgtcttttaacatagcctctaaaaggcctcctttattaacctggtttctatttttgtgtatgttcttgaaggttataagttggaatttttttttaagtaggctttccactctgaaattaagctttatcatagtctttgagatgatctcaccacgtgatttcacagaaggaaacagtgggataacttttagcatgggtttgttaatgttaatggcagatttatctttgcacaccaactaacaggagataagtcttcacttgcttttgaattttaaaagaatctgtttctctgaaaacatactatttatcctaaatgtgttccaaaccagttacattcattattggccatacttggtgtatttaggatgtaaggaggtctgtgcaattgcaatcttgcaaatgtaaaacaagtacctatcagtcatctgttttaaagttaattttttgtccttctttggaaacttttcactaggttagttttagttaaagttaggaaaacattttccttcattgaacatttcttttggggaccaattttaaaaaaatcctttggcatattaagcaaaattgaagtgagatactcttcaaccctctttctcatgagaatttttattttgattgaaatttgttgaatattaagggcattggattaaatgcccttagtagaggcttagtagaggctaacattgggagacctcattgtcaggctgaggaagaagaaaaaattagttaaggttttttaaggaatggccaggtgcagtggcatatgcctgtaatcccagcactttgggaagctgaggtaggaggatcacctgaggacaggagttcaagatcagcctgggcaacatagtgagacccctgtctctaaaaatatgtaaaaacttaggccaggcatgttggtgcacacacctgtagtcttagctacttgggaggctgaggaaggaggatcacttgagcctgggaatccaaggctgcagtgagctacgattgtgccacggtgttgcagcctgagtgacagagtaagaccttgtctataaaaaacaaaaaaggtttgtttaggaatgaacagaggaaaactgtgaggctattctaatttgttgctaacagtgctaataattttacataaaacagtagatatattgtggagttatagatttattgttgtggtataacgatattttctgtttatagtgataaagatgactgaacacatgaaaaattttagttgtttctatctgaataatatgtttacattacatagtcttttaaaatatgcagttacaattaaataatcatattagtatgcaattttaaaaaatattttactatgttgaggaaaggaaaaattttcttcctattaaactatatttaacatatccatttaataaacagacttaaaacttcactgaacataattatatacttgatttctttggctaacacttaaattgagccatctgtgtggaatactgtagcatttagaaataaattctgtatttaacatttgtaaaagctatttctagtttactttatgcacctaaaattttctaaatgtctacgattttgttaatccttagtatttggagttactacctggaattggtcttctctacgatttttctctgttctcaagagtctaataagagttactttgacttgaagtacatagctgctttgactactggaatttatagatgagtcatggagatacttgacagagttctgaatataaaatttaacaggtcaatttaagtttttaattatgtgaaaggtattacataatcttgtagttcttacagaaaaatacttcacaggatttttttaagacattctctgaacttgttttgattttacattaatcagtattaatcagtattcactagttacttgactgaaaacaagatttccacctgaggtatagaacactgagtattttaagttaatgctagaatccc

SEQ ID NO: 116214 - DNA, 1060 bp, Homo sapiens
caccgtttatggattgggattctcctctgagcatcatctttcgaaagtgagttaaatcataaaatttgaatgaaaatcttcatcttcaagtcgtatatcttaaatatataataccaaatggagagtataaaatataggagaaatttatttaatattctcgaaacagcagtagtgacttcagagcaagaagtaagagatcattagattctgctgtcacttggaaaatgtacacattaaaaacagtcaccattggttgagaaggatttatgtggttaattgtctgtgtgataggaattaaaaggtggggattatcacttcagaatggatttttgtcagagattagtaccctcaattggagatggtctacaagataggcagataccaagctcttttgaattgtgaaaactcaagctgacagtgatatagatttcagcattttgatgtgacagcaggtacatataaattactgtgtttaggggaaattgtgctttatctggatgtggaatactccgagctctgatgcagtgcagactgagatactatagacatcatgaggaatttttagataatactcaccatgtgaccagaaaggccaataaaatgcaaagcatcaccaggctaaatattggaaataagacagttctcctgtcaataagcaaaagccatgtaatgtttataccagcagcaccttgggttcttgtggatgttacacagaaaagaatatataagaaaaaacaatctcagtatactaagtgatcaaagagaaaagtaaaactcacttttctcttcagagcttgtgcctgccagacctaaagatttattcttaaaacctctgtttgaagcattcagttaaaagaataaccatatattttaaatactttacatatgatttggtatatgcaggatctgatactggaactcaggctagagagttgaaattatccaagtgcagagaaatcaggctcttgtagatatacagtgtttatatttacattaaattttaagctgtttttctttacagaaattattctgtattcaaattcttaaactgggttctttt

SEQ ID NO: 116215 - DNA, 1157 bp, Homo sapiens
cacgacattttcatcaactaatcaatacataactatgttttatgtgtgtttctacttaaagacaccttgcttaatatatattgttaatgcattaacattgaactgatggccaacagcactgtaactcatgcctcagtgaaacttatctaacacatattttctccacatcacagccttcttgcacctaggaacagctagcatctgggaacacttcagcatgatgcttatgggccattttacacagtaaaagcaccaacaaagtgtgaaatgtgtaaaacatggtgctaaatagaccataaaaaggacacttgtaaatgtagtatgagaactgaaacaagaaggcattgtcactttgttcagtttcagatggaaatgtgccatgtcaggtgatgcatggttttgcactgccctgtgtgtgtctgtgaaagactaagaatgtgccacactattgatttggcggttacagataaattttagtgagtaggtgaattcacatgtacagactcttcaaataatgaggattgactataattgtttttagaaaccttatgactgaatacttagaatatgcaaatttgaaagtttctcttactttcaggtatgtggaaattgttgattaagcagaatcatccttgcagttttcatgttctcttgtctagtgaaataaaactggctgctttcagtccatcattttcttttctgccctgcagggaacaacctatcttcagcactcgagctcatgtcttccaaattgacccaaacacaaagaagaactgggtacccaccagcaagcatgcagttactgtgtcttatttctatgacagcacaagaaatgtgtataggataatcagtttagatggctcaaaggtaagctacgtttactttgaatgatttggctggttttgcttttttcagtatgacattttagttctattcagaacattttatcttcattaatataaaatgtttccttttgagttcttaaaacttttaagaaacaaaatggattattaaggtagcaacatgttttgtccactaaatgactaaccactttattacattgttacatgccaaaatattctacaaatttgaggtcattccatttatttaatgttcattgcatatctgttatgtgtcaggcattatgccaggtacta

SEQ ID NO: 116216 - DNA, 1011 bp, Homo sapiens
agaatgggattgccatgattatccttagcgaagctcacagtcatatggaagagggtagagtatctgaggtttgttggggagcagcaaggaagaacagttggtagatagtcagcgaacagggtctgcagcagagtcaaatcctcagtggaaaatattaccagccttatttctaatacttcttagaatacttagaatactttcaggctactttcttttggaaaattaaaaagaaaggaaattatttgaaaccataaccttctttataatctcctttgctgcagtagccatttgtacttacatatctgaaaaggatacttctaagctaggcattaaaggtataccaggaaatgtacaatttctcttcctttccttgagtttgattgtatttattggacctatgcctttgcactctcttgggatgaagatttactggttaatcatataatatttttgaaagtatagacttcattggtaactgtaaaacagcatcatcattgatttttaaaaatcagagctatccaagtgatgaatgttaactgtctgctttttttctagaccaaaacttatgtatctcctggaaaatagttttttgttttgctctagtttttttatgatcctcgtttctttcttattacgcagatgcctgagagctaaatgtagtaattctttatgtcagctctagtgagtttgagtaagtcttgtttttaaaataaaattctgattttattacttttttctcagggttatcttaacattcttccagttttccacatccatagtaagttttagcatccatcactgtatgtagtacttttaaagaattgtagctcaagatgaagaacttgagaattattgttacaccaatttcctagaattcgtttatgaatcaacagaaaaatactccagtaagcttttcttatgtcagtaaagtagtttgaattacttactgttctggttattcatgtaagaagttaccgaatagatagtgctctatgattaaagtgtgtgtgt

SEQ ID NO: 116217 - DNA, 1035 bp, Homo sapiens
agattaaaagatcaaggaattcagatcatacatttttttttcttttttaaagagacagggtcttgctctgtcacccatcctggaatgcagtggtgtacaatcatagctcgctgcagcctccaactcctgggctcaaatgatcctcctgcctcatcctcttgagtagctgagactataggcatgtgccaccacagccagctaatttttaaattttttatggaggcgaggtcttgctgttggccaacctggtctggaactcatgggctcaagcgatcctcccgctttggcctcccacagcactaggactacagaggtgagccactgtgcctggccagatcatacaattaaaaaaaaaaatccttccagaagtctcgatacttctattatagcaaggttactttacaattttgtatttgctatagagtaacttccaggttttaaaaaacatgcacctgctatatttttggttcatcactaggtggagttgttgcagtataattatgtgttgggtagccattagcagaaaaacctttgcattcttcaaagttcgtatatggtttttaaaaaagaacattgtatgtataagcaatcagcttattacacatatcatggcatagggacatacagttggtagtatgttatattatgcagtcataatctctgagcagcatcaaaacaggtatcttaatgagatttttcatggggtaggatatatgtatgagaaagagaggaggtggtgagatttaaaccagttccctgataatcgtgtggagtttcaatttatattattaagttgtacaggataattctttctaggaaattccagtgcttgagctgctgcatccaaagtcatgctatgccacttcatagtggcactgaaactaaattctccagccattacctatcaagttaaatggtaattagtgtccgtctattcctggacttatccttgtcattctcattttggcctgaacaagtattgttcagcttctcttgccacttcagtcacccaaaagcaagctgagggtagaatgt

SEQ ID NO: 116218 - DNA, 1538 bp, Homo sapiens
cacagaattttcattaaggttaaatagaagcattttttatgcccaggtctttaaatcttttggccatgatctgcagggggaagaaaatgcatcttacattgtgacaagcatatataaatacgtggctgaaagtttcttggaacaagatatatgtcctcaccatgtatgatgcacttctgatattgtacattttcattcacttttaaaaataccccttgttgaccagtagattgatcatgactccctggattgtgacctagggtttgaaaaacactgtagtaaacttgtcttgttaagatgcccgtttatctataggattccctctctcaggtagctcagaagtcagtctccctctacctctaataaaattcactttcaggaaagctaaatagggaaaaggcctcccacttagattattgtattcctgtattatatttttggtcagtgaaaaatgttaattgcttttcacagtcagaaaatgtatttgggtttctatgatgccatggtgactgggttgtattaacactacttttatgaaatagagctaatgcatctaagcacaaacaccacatcactacagggattatatttgcaaaacccaaaattgagacattatctgacaaaagagttttgtctatagtttttgttacgtgaaacgctgacaaaatttgaaagtaatgtggggcgaggtagcttgtgtccaatgtcccagcgggaggctgaggtgagaggatcccttgagcccaggagttcaagttaggcctgggcaacataaccccatctcttaaaaataaaaaaaaaaggcaaattataagtcacatttaattatacttaatatagccccttttcaacagataaaaataaaataatatgaaacctggataatcttgggaaattgagactgtatgactaccatacataaaataacagatgtgctattcattggtaggcttatagctagatgactcgaggaccatgtagaaaagacttagctgtaattagtacctgtgactagacaaaacttgatcaaatgaaagttagagtcacttccaagtctgagggatgttggaaagaaaaatgcatagagaaagagagtgggaatttactgcttgaaaaacactcaggagtttaacttatttggcaatagaattgtgttatttttgacgtctagtttaacattaaatatgttttgtgtaaattgttttttgacgctgagccaggaaaacattttaagcagctctaagttaaaagtttgactaacatgcatttacttactcctccattacctccaccagctcaccctttcacaatggagtaatttagaggagtatcagaaacactttggtatggaaaaatagaacctaaattttataccaaaggaccataatttacctttatgtggttagaattggatatatgagatgtcgtttgagtactgaattttagattctgtctttttcactattggagctaaaataaggttttaaacaagctcagaaatgagtatagcaatttgttgcgctcagatggcccagaaa

SEQ ID NO: 116219 - DNA, 2125 bp, Homo sapiens
tgacagtgatctagatagatattatgaggtaaaagagattgccttggtcagccattagttgataaagggaaccaagaggagagaaacaagtttgtagcaaggtgagatgacaaattgaaggaaccttgagatatttgtcgtcagccccgtgggaatgctttatagttggatattattggtctggtattcaggaaaagagaactgggctgaggatagagttttgggaatcagaatgtgtaatttttggttggagctatgaatgtggatgagctcatgcagggtatttatagaaaagagcagatcaggcatctctgggaatagtcatttaaggggcagctgagaaagctgtcaggtgagaatagtgtcacaagagccaagaaagggagtgagtttcaagaaatgagtagtagccaggatcacatgtaccagaaacatcaaatgaggcaagaaataattagattggataagtaatggtcctttaacaatcttaccttgaagtttgagaagtgtagggtggaaatcaaattgccatgaagtgaaggtgttgaaggatgaggagcagacactagaaatgtgtctgcttctcctttaagaccaagcatctttgaaatagtagctcagcaagctctagggttcaggaaattcttttggttttgtttacagaatgggattaagcattccttttaggatctggcaaaggagtctgtggcaaggtgtatttaaaatattagagtagagagggataattattgagaaagagatgggtgagaatgcaatatggagcacagatggaggagttaaccttcagtaggagaaatattgtcctcatagaccgaaggaaaggatatgaatagtttgtaggttaaagaaggagactgagggaattccttagctgatggactctgtttcctccattcattcattgctttaacaaacattcattgattacctgttatgtgtcaggcggtgttctaagtatatgagatctgtgaacaaagagccttgccttcatggagcttacattccagtgaatgataaaaggcagggccatctgctaagtgtagggatataaaggttggtcagagccttgggaatagagggaagaatgggagacagtgctgaggagcttaaaggtcccagctgagattagaagccacacattctggtgttcttgaagccgtctaaatctagttattattgtacctgaagagcacagtagagttagaagggttttcattttcaagccaggtgcggtggctcaggcctgtaatcccagcactttgggaggctgagacaggcgatcgcctgaggtcaggagttcaagaccagcctggccaacatggcgaaactccgtctctactaataatacaaaaattagccaggtgtggtggtgcatgcctgtagttccagctacttgggagactgaggcacgagaattgcttgaacctggaaggcggaggttacattgagccacgatcgtgccactgcactccagcctgggcaacagagtgagactctgtctttaaaaaaaaaaaaaaaaaaaaaaaaaaaagacaaagttttcgttttcttcattctgctgaaaatgaagcaagaagtgggtatatggcatttttgtagtgttctattctgttattttaatatacgtatcactttttccccccttagcggcccctttccttctataaagaacatttcttatcttggaagaccaacctaatacgtattaagtttgccaaaatatcaccaattttttaaacatttgatggcttttctgtggaaaacatcctgaaaccaagtcctatggaaagtcttagaggtcttttgagggctgcgactgcgtttaatatttatattcccatttcctgctactgctcagtacacataccacatgcgaagcacttgcgctcgtgtgaaccaaagtgtatagggattctttaatacggtgggttttttttttccttctttcatagttaggaaagtcacagaagttaattgattggtataagcacttaaacattgttctgattcttactgagaattcagtatattattattttggaaacagtttcagaagttatcctatcttccttattcttgataaatatttttagtctttctagac

SEQ ID NO: 116220 - DNA, 1037 bp, Homo sapiens
gtgggaaggggtgggaatttcattgctctgttatttaaactttcagtcagttcctccatttcagtcgcatacttcacacctcctctgcagtccctttgcctctaaattctagccagcaggttgttcacttagttccctctttgcaggcacttttattatagtttccttggttttgtcaaaccaggcaccattccttctattttccatctttaatacattttgaaaactgtattaaagttacttaagaactgctgctgctttttacagtctttggtgttataggtttatacctttttttccactccccttaactttcattttagtggaattttggaaaaggaagataaatgagtacaattaatttgccatgtttgaccagaatcaccgagcccttagcttttgaatttctataaggcatctttcagaatgtgttgacactgttgacagttaattgattggaatttggcggatgataaagtgttggctttctaaaaatctctccctgtaaccaacacctgaaaaatcaatgcatgatgtaagcacatgttaaaattaaaaacttaaaattgatcatcaacccaaacctaaggaaaacagagcactgactcagctgtgtcaggtaactaaggtgttgctacagtctcctaacactgtgcctcatgagcatttgtaaaaaacgttaagcacttaatttgtgtcgtgagtcatgccaggcactggtagtacaaagataagtagatagccatgtaaacaaaaaattacaatactgtgatttaagtgctgtaatagagatgtatgttgtgtttggtagcacagagaaggaagtgcccacctccaccttggaaggtcagagaaagcttcacatagccagtcatgtttgttttgagccttaacaaacaaataagagttgggggaggggaagatgtatgagtggttgttagggtattttaggtagagaggtggcataggtaaagcttcagaggtgaagtatgctaattagaaagttaaggtagttaagggagatgtgactagaagga

SEQ ID NO: 116221 - DNA, 1049 bp, Homo sapiens
gataagtgaagcttacaaatcaaacgtgagaaacttttgtccattcaaaagcttcagtgactcctgaagcatgcttgcttgcttgctgccccttccttttgaagttgcaaaaactagaagtttgaactaagggaggaaaacttgattaagctgccttttttttttttttttttttctttgagacagagccttactctgtctcctgggctgcagtacacgatcttggctcactgcaacctccgcctcccgggttcaaatgattctcctgcctcagtcccctgagtagctgggattacagatgagtacaccatgcctggctaattatttatttatttatttatttattttttagtagagacggggttttgccatgttggccaggctagtctcgaaatcctgacctcaggtgatccacccgcctcagcctcccaaagtgctgggattacaggcatgagccactgcacccagctctattttttataagggaaaatatccaagacaacttgaaactggtctctaatctttttaaacctgattacttttaacagtacttaccagttatgcccatttcttggtcagagttctgctttttgatatttctgaatgtatggttttaaactaccagatactgctttgacttctgaagttttctgcttttagaagacatcttacttacttctatgttattctgtctagatatccttaagtttgtccagtgtcgttgaagcctacatgtttctttctttctttctttccttttttttttttttttttttttgagacaaagtctcactctgttacccaggctagagtgcagtggtatgatctcagctcactgaagcctcctgggttcaggcaattcttctgcctcagcctcccaagtagctgggactacaggtgcatgccaccacaactggctaatttttgtattttttagtagagatggggtttcatcatgttggccaggctggtctcgaactctcggcctcaagtgatccacccacctcggcctcccaaagagctggaattacaggcatgagccaccgtgc

SEQ ID NO: 116222 - DNA, 1804 bp, Homo sapiens
ggaggaccccagccccacagccccatgcagatggcagcctggcggggggtcgcaccagtcctgtcctcacgttggcagatagagatatctactctgaagcctctgtaggggcctgggcacctttgggagcctgagctggaactgaagctggagctgcagcctgggccttggtttgatccttgtccttggcctttggccagcacaccctgagccccttggcaatgcgggcacgagcatgcttcccaagcttggggtggacagtgtaggcaagttgagcttgcggctgacaccctttgggatcttgggcttaacctccttgggctttaggagggccttgatagccttggcatgtgcactcatggccttggcactgttagcctgcatcttctttaggcccttcttgttgtgtttcttggcaaactgcatgttcctcaggaacttggggtccacccccttaagagattcgtatctttgtgcttcgggtttcttgataccatttctgtgccatttttgggactggttgtgtgtggtgtggttcttggacttggccatgtctgcaccttaaggcgcggctcctgaagcgcctagaatctgaagagacaggatgaatttaatactaagggggctgttgtttaaagtgggaaagttagcaccacacataacatgcatttagacacttagcataattaatttgtttataaatgaatgtatctgccctttagttaataaagttctatatatggactgaggagaaaaaggagcgagcattttgtggtgctatttttttttttttggaaagcctgtatttggggctatgaccctttctcattgatagtgacttgagtagagagaggaagggtagatggaagtagaagagcatacagcaaaggcatttgctgacgtttccacactttatgcgtatttatgcctaataaatgtttgtggaattagcatagctgcctggacctatttcaagcaaaaggaaacagggctttaaatggcttttaaagctttaccttggcaatccataattaccttactgtaatagatatctaaaatttaatactgtgggtaaagtgtttcacatattacaaccttctttttttaaactaatgttaggttataataaggatttatcttcgtcttaattgtagataattattgcaagtctaggggcagtctaagcaaaggaattatttttaataaaatcagtgattgggcagaaaaaaattatggctcccctaatagtagtttatgaactttttggaaatggagaagaacagctgaaacttgacagttggcaaagtctgtcaaagtatcttggatgttgcatgaactgttaattgcagtgaaggcaactaaagtatgggtttgtaaaataggtgtatcagatcccctaaaaattaaggcattcatgtatgtaaaatgaagtctctgaaaagttttgaagcctcagtgaggagcccctgttaggtatgacccccacccccacctccaaatagtatctcataatgacagcagtgagtcagtagctatttcagaactatcacagtaggcaacagaaatcaagtaacttcaaccacttatttcatgaaaccctttgtttttacttagctcattttggcaacctagtgccatcagcaatggtaaagaattctttccctcccttcccttattaagagctacttatacataaaatggggctctccctgctaatggaatctgttaatgctgtttctgatttatctcacctgcctatgggaacttctggagtccttccttcccctctttccccaaataactt

SEQ ID NO: 116223 - DNA, 1091 bp, Homo sapiens
cgaatctgtttatgtatgtgtattattgagcggtggtggtgattgtgttttgtgttttcaaacaaacttgccaccttgctaagctggtcatactttaaagaaataggcatgctaaccttttaggttatttttgcatttttgtagagcggtaccagaggtcataatttaaaaacacatatatcgtttgtaacttgaatatggatttgtgagtaatgtttacaaagacaacgcattctacactttactggtcagactgctgcatcagtttgtaatcaaaatcacattattttagcttttgctgacggttatctttcaaagagaagtactgcattctctcagtacttttagataatcagttgcacaaaggaacgattttaatgagtggttagacaacagtccttgaaagtgatccagagtaaattgttgccctcaccgtgccctctgtcttgtccttgaatattcaaagctaaaatgtatagaattgatttactggggcgttaaaacgaaaatctgaaattcagtcttactgatgcggtcaccacggtacgggtgcatttcgtaggaaaaagctttttgtttaaggaacttgttcactccttttgtttttcgcttttaagctcagcccttcagtttgagttaacagtatcagatctacaccttccttcggacccagagccaactgagagtgcattttccagtcttttattaactcttcacactgtgggttgatgaaatgctagtgacacttcctaatttaagctggaaacccataatatattaatggagcaatctgatttcattgacaggttgtcactgctttttggcagaagaacttccagaattttctctttttgtgtgtgtgtggttgaacaaacacatctgaagtgtagttgaggggcatgttttaaagaatggactctgcaattcatcgtgatggtttaggtgtgtacacacgcttgaaactttctgaggaaagttcttgaatagtaccttccttttggagttagaatttgaagtttaacatgcataactttgaaaatttagagcatgttgtaggagacgttcctcagaaattaatgacaaagttataa

SEQ ID NO: 116224 - DNA, 1010 bp, Homo sapiens
aattacttaagtcagggttcctttttttttttttttttttgagacagagtcttgctctttagcccaggctggagggaagtggtgtgatctcagtttactgcaacctccgcccccgccggggttcaagcgattctcctgcctcagcctcccgagtagctgggattacaggcacctgccaccacgcccggctaattttttatatttttagtagagatggggtttcaccatgttggccaggctggtctcgaactcctgacctcagatgatccacccaccttggcctcccaaagtgctaggattacaggtgtgagccacagcgcccagcctagtcagggttcttaacgaggtagctagagcaaacaacagcatctgctgtaactagaacacagggatttagtaggatagtatacgtagctcatagaatcattgggagagctggggaattctcctgctgaagtcccaggaacaagaacttgtaggaaacagaacactcaaattaggtattttgagtcatgcttaataaaaattactactttttttttccccagagacgggatctcgctctgtcacccaagttggagtgcagtggcataatcacagctcactgcagcctcagcctcccagggtcaagtgatcttcctgccttagtctcccaagtagctgggactacaggcacatgccaatacggccaactaatttttgtattttttgtagagatggggtctcactatattgcccagactggctcaaattcctgggcccaagcaatccttccgcctcggcctcccaaagtgttaggattacaggtgcgagccactatgcccagcaaaatgctactctttacaaaggtggggcacagtataggaaaaccataagagagaggagagtgcctggcatagcagcacagactgtcccctctgtgcctgaaaggacaggaggaaggagcaatggatggaacctggagacagagatggctgtgtggaaagcgttgtctgaagtagctatgtcct

SEQ ID NO: 116225 - DNA, 1204 bp, Homo sapiens
ttgtagcatacacatcagtacttcattcctttttatagctgaataatactctattgtatgaatatacatcactttgttaatgcagtcctcagctgatgaatttctgggttgtttccactttttgtctgttatgaatagtgcagctataaatatctgtgtacagatttttgcatggacatatgttttcacctctcttggagtgaaattgcttggtcatatggtagctctgtgtttaactttgtgaggaactgctgaagtgttttctaaagtggttgcaccattttgcatcctatcaacagcgtataggttgcactttctttacatgcttttgaacttgcaaaacttgttattgtctgcctttttgattatagccattctagtgggtatgaaatggtatctcatcatgttttggatttgcatttccctaatgcctaatgatattgagcatcttttcatttgcttattggacatttgtatatcttcttggggaaatgtctattcatctagatctcttgcccatttttaaattggactgtttgtctttttactgttggttggtaagagttctttatgcattctacatattagacccttatcagataatgacttgtgaatttatgctcccattatgtggcttgtctttttactttctttttggtatcctttgaagcacaaaaacctttcattttgatgcagtccagtttatctattttcctttggttggttgtgcttttggtgtcatatctaagaaaccattgttaaaggtcacagagattaatgcctatgtgctaatttttaaaatttatttattttattattattttttccctgccccgcctatgtgttattctgagttttatagttttaattcttatatttaggactttgatccattttgagtcaatttttgtatatgatgtaaagtagggggtccagctttattcttttgctgttggtccagttgtcctagcagcttattgaaaaaactgttcttttctcctctgtaatttttttttaaccatattgaaataggaaaaacaatcaggcaaaatcagtgggagaaaggaaaaaggcaaaggaaactgagaaaagattaacttgggtttttttagttagctgtttttttttttttgatatagagtctagctctgccgcccaggctggagtgcagtggtgcgatctcggctcactgaacctccacctc

SEQ ID NO: 116226 - DNA, 1015 bp, Homo sapiens
tttttaacaatgactaaaagtagaaattatttagcttgctgcctatacttggcctaaatagttcgccaaccctgctctaggtcagtaaaacttaatccttcaagtatcatgtaaaattttatgttagccacttttactggagatctttttcacatttgttacaaacttggacacttttctttttagctttttattatggaaaatatcaaaccatatactagagagaaaaacgtatcataaatccttatgttgcccactttaacaattgccaacatatgaccataacaattaacaacatatgactaatcttatttcacctttacctccctccctcattagtttgaatcagattgcagttattttatttgtaaatatttcagtattctgatattcagttgatcttttttgtttatccttctgccagggccatactatcttgattactgtagtgttatattaagtatagaagtcaggtaggttaaattccccaatttttttctcagctattcttggacttttgcctaagtcaaatttaaaattcttctgtcagtttctagaaagaagccttctgggcttttgatttctttttcatttcttgtgaaacaaatatcagatgggcttttgattttgattgcattgaatctaaaggtcaattctgggagaattgacatccttgacaatagtcttttgatccatgaatgtggtgtatctctccctttatttaggtctttaggttctctcaatattttctagttttcagtatacaaatcctgcacatctcttggtacatagatttctaaatatttcatgctttttgctgctattgtgaagttcttaaaaagtaaatttttaattgtttgttgatagtatgtatgctttaagtagtgaattatctttttagaaaattaaaacatgagagaaaaggccttggttttttatattatgttaaaaatattagttttgtttacacattcttctggtgtgctttattgtctgtagaaatgttaccctgcag

SEQ ID NO: 116227 - DNA, 1128 bp, Homo sapiens
tgattctcttgcctcagcctcccaaatagctgggactacaggcacgtgccactgttcccggctaatttttttgtatttttattagagatgggatttcaccatgttgtccaggatggtcttgatctcttgacctcgtgatctgcctgcattggcctcccaaagtgctgggattacaggcatgagccaccacgcccagccttcttctgttcttacatagtattcagaaatatacttccttagtgcctttgcttttttcctttcccacttttatctagagtagaattttttaccctctgtactattggcattttgggccagataatctttgctgtggtagagttgtcctctgcattgtaggatgttcggtgacatcctggcgtctacctactagatgccagggacctttcacctgccctgcctggtcctgttataataaaaaatgttttcatattcatatgtccactgagagtcagaatcattttacacctttccttttctcctgatggctctgtactgtgcagtttaggtttctcttcctggcagtttctgctgttgctttttcttggaagggaacctcattttgtttggaggtctctgatctttctgtggtccccttgcatttacctatgaattgtagcctatgaagctgcttgcctattttggttgtggtacattgatgtgggctgctgaatttggtgagtgagggggagaaggtattacctataagcaatttgatttctgcatgttctgcttttaagactgtttcaaatcccattcccttttttattgtgtctgataccatgtgaatcttgctgctgttggtatttgtcccactcctgagtattcatgatgaatacccggtcagtcaattgtgttttattttgtggccacattttggtttggtttgatctctttgatttattctcctagttgctctgtcttttgtggggtgagtattcagagatttaaaaaaatgttatgcttctttcattgccaaattgcccagaatgcctctgccttcttaaaatgaggattctaaatatgtgaaagacaacattttacgtgatgggtgatacttttgcctcattatggactataaggcagtcctagagagggagagattaaaaa

SEQ ID NO: 116228 - DNA, 1035 bp, Homo sapiens
ggcttgaatacaaaattattggtagagagattagctttgaacaggggaaaaggacgcctttttttttttccccagatatgttcatttttaggtctgtggttaagaggctgaggaatatcacatttggtattctcaattttcttagtaaactttaatttaactgtatttgctagagaaagggagataagtttagagggcttgaaaaaggtagtaaacattttggaatggtatgaaaaacagaagtgatatctaaccaaagacttggaagtaattgctaagtgatgctaagggccaacctaagactataaacttgaaatactccaattttatgatttttaatttttttttcagttttgtttcttagcaacttagatgtaagagcagtgaaggtggttttttttttttatattgacctaagattagggttttgtaggacaagtattagaacatgacaaggagataatgttgttgaggcacgataagagagtggttcaagggatgcactgtgtagtatagactgcatagggaaagaaataacaccatttttatgctgatggcttgggagaaaatggaggattcaagggaatctagatctcttgtggttctagagcaggtatgaggagagtgagaaagtgtgaactggatagaagattgaagccaagatattatattggaatttaaaatttcagagctagagcagttccagtttattgtaaagaccacattataggagtgtatactgatgaagaatactggaggaaataaaagtccggaaagggagtatgttgtgatatgtagcccatttcagatagggaaatcacctatgttgatggcaagagttgggctggagggaaaagtgtgaaccagatcagtagataaaagggtggtagggccgggtgtgatggctcacacctgtaatcccagcactttgggaggctgaggcaggcagatcacttgaggtcaggggttcgagagcagcctgggcagcatggcaaaaccctgtctctacaaagattgaaaaattagctgggtgtg

SEQ ID NO: 116229 - DNA, 1089 bp, Homo sapiens
ctggtgacatctcttatatttggtatttgtgggtgtgaatactagggattgggcaaacttctttaaaaagccagatagtaaatacttcaggctttgccactcacatattgtttgttgcatatttttatttgtttgttttcataatcctttaaaaatataaaaaaattcttttctcaggggccatactaataaagtgagcaagtgttaaacagtttgctgacccatggattatttttattacgaagtatctgtgactgtacttttctgtgacttgtatattttactttgtaaaatttatgtgtggtttttcagaccattctcttcctgtacttgagtaatagtagctttgttttgggaaatattaagaagataatacatactcccttttaaaatagtgtcagtataattgatttatgcttctccatatagcaattacttttacattgctgaacaaaacttttacttttttttgcggtggattcaagttgagtcagcagatactggagttatttgaaacatgtcagcagcaaataagtgatttaaagaagaaagaactctgtcgaacacagctgcagagagaaattcagctgttatttccacgtatgtttccctattttgcatgtcctttaggtatatgcattcctattttaaattttatcttttttttttttaataggcacagaaccatgcacctactttagattttaaatactcttattactttcttctgtttctttagaaagcagactttttttggttgggtcctctttaaatggatttggtacccggagcagtgatggtgatttatgcctagttgttaaggaagaaccagtaagtaaggaaacatttattccaagtgtgtttctcatgttaatgagttaagaaattttacataaaagtcattgagggaaaaaacttgctttgttgtgattacttctttgaattttgtttaccataattgcaggaaacctaggtaattttttatttttaaggcatgtgcacaataagcataataggaagtatagcattaatttaattctaagtttttaaagtgagatggcttcactatgtgtttttttttttttcaag

SEQ ID NO: 116230 - DNA, 1901 bp, Homo sapiens
agtttggatatgttaccaggatgcagcaaagaagagtatgtggcaatattatcttcttgatgtatttcctttccatttgaattctcactgattctatttttaatctttactttttttctctttgaaaatgcttattaagggaaaatagatttcactaaaatttaaaataagactcgtgtttattaaatttaaaatatttttctctatgaatgacattttgcctttgtttttttttctttttctttagcaacaatattgtgttaatttagtacaggttgagtattcattatctaaaatgcttgggactagagttttttggattgtagatttttttttttgaatacttgcattatacttaacatttgaacatccctgatgcaaatctgaaatgctccaatgaacatttcctttgagtatcatgtcagcactcagaaagtttcagattttggatttcaggtttttggattagggatgctcaacctgtagtatgtttacctgaatttcctgttaactgatactcctgtgtataatactgtagtaattggtattcattaagctgacttgaggcagcctttttaagatgctgaggtttcttctgaactaccaatgattaattaagctcagtgtaattttaatatgccttattatgttttacatctttaaaaatacaaaaaattattgagtgttaatgtatatttttactattcatattattccactagcgaaaatgacttctagttactgcaagtcagaaagagatttattccaggaagaatgatatttttctaggctttgaaatcatataaagagaaagtttaaaaaaactcacattataaacagtggagagtacaagggttgtaattaaaactttttcgtgctgctagattatactcaagcacatcccactcatcctctagtgttattcacatatctaaatcatgatgtcatagcttttacacaaactgaggcaccatagatatgaaactatccttgagcagcttaaaatctaaatagggctaaaattctgtttatttttgttggaggttgctttttgtacatttatgctgaaggggaaaatgacatagatggctatttcagaatttctttgaaaattgtgctttaagcttaaaatcaggaattgatttagaaatgtagatgtgaaagatagcattaaaggttgactttttctgttatttagaaaaataaattgaatatactttgagtatattgaaaaataactccaaaggaaagtatatcttgtatgttttctttttgttgagatactttaggaaaatgaaacattaaacttagaaagataatgaaaaaacactttatttttaacttttcagtgtttttttcaggtaaatcagaagactgaagcacggcatatactcaccttagtccataaacacttctgtactagactttgtaagtctgacatgcctcaagtttgtatgtcacctgacgtaactttacttaaaatgcctcttacattatcttctggtaagaactgtttattctggtcaggatcagtataatatgaattcttttttccaaatgaatttcttttaacttttgatgaaaaagaagagtgatcatttattcaacatatctttattgcacttactgcaaaatataccacctgctgcagtgggggggattcaaagatatgtaagttttagttctttttctcaaaagtttataggttgttagggaaattaaagcatgaatataaatagttgtaatacagagtatctgtgaaaagctaaaagccctataggactttatatgtgtgagagagaatttcatctggcttgcaatgatatgcatctttacttgttttaaaaatatcatcactgaacatgagacctaaatgtattacttcaacagaaagctaattg

SEQ ID NO: 116231 - DNA, 6255 bp, Homo sapiens
ctcatagagatcacacttatcgaatgcatccaagccccgtgtatcatgttgcaaagcatttccacacataagactctgtaattatgatttctacagttaccatgataccttactgtgtgctgtaccaaaattagctattccctctgctgctagcctagatatattttcactcttacagtggtctaatgaacttctctatagatactatattagatcacattcctgaaaataaccttaatataaagccccctaaatggtattactggagcctccaaccttagaagaatttgataatgtcctcacttgtattctttttcaaagacgttttcttaaattattttagcttagtaaatactattttttaaaaaatgtgcgttggaacactgtgaattctagaaacatttgcagctattcacattatcttttgtctttcagcgggctacattgagagacctcagctgattcgagcaaaagtgccaattgtgaagttcagggataaagtcaggtaaataattaatgagctttctttttttagttcctttagatcatttttagatactcatctgataaagataattaagaagtgtatgttgtagcattacagtttattttaatcagtttttagaaatcatttgacttggtgtttgaaatggttttttaaaattgagcaatactttatgcttaactgtacttagctattctgcttgacattttgaatatgtgagactatctaatttaaagagtacatatttgtattttagatttttaaatgatctcttgccttttggaagtgtaatgcattctgaagaatataattaatgaaatttgacatgtactaatatcaaggggtttgttttaaatacagttatgattaaacaagttgtgtttcatttttatgaaagatacatataatacctagagtaatagatatgaaaggaaaacagcaaaatatacttgttccatttcaaaatttacatttatatattctaccagcttgggttctgaatgtcttatgggcattggaattgttttgtaaatagatgttgattatttcattagttaaactgatttgttactgttttctaaaaatagaattgtgacagatttcataaaatttgtccagttttacaaaattaatactgaaattgtgcccacaaacacacacacacacacattgttgatccttatcattcatagtttgtgttttcacgaatttgcctacttgctaaaagttatttgtaactgcctacatgaatattcatacgcttttgtggtcatttcgtggacatacacagagtaatgaaaatttcagatcacccaataccatgtttccagctgagatagaattaggtgacacactgtcttcttgttcagcttcatactgtaaacaaataaccttctcacagtctaattaatgccatatttttcacatttttgtgcttttttgctatttagaatggcccccaagcatagtgtggagttactttctagtgtccccaagtgcaagaaggctgtgatggtgccctatggagaaaatatgtgttaggtaggcttcgctcaggcatgagttatagtactcttggccatgagtccactgttaatgaatcaaccgtatatattaaatacaatgtcttcaaatagaagcacaacataaaacttggttatgtattgatgagtttatgaaaatgtgaccaggctggcagatacctaaccctgtgcttaccctaggagcaatggtatagtattcactaattcagtgtttgcagcaactttatagaacgtagctactatgaatgatgactgaatatatatattttaaacaaactttaatgcctggctcaagccattcctttatatatctaaacatcaatcagatctataaatacttattaaatttctgccaagtaaattgtgtcagattttcctaaagcagatataaaatatatagggagataaaacataaagttataatattagctaattataagtttttaataatatatggttgtagttatagttacaaaggtagttttattctttttctatttaagatcatcctgcaaactttttttgttcctaagctttttttttttttttaagagacagggttttaccatgttgcccaggctggagtgcagtggcatgatcatagctcactgtaacctcaaatgcctggactcaagtgatcctcccatctcagcctactgagtaggtaggacaacaggcacacaccaacacacttggttaatttttgtatttttggtagagacagggtctcgccatgttgcccagcctagtctcgaacccctggcctcaagcaatccttctaccttagcctcccaaagttctggaattacaggagtgtgccgctgcacctggccaaatcctgcttcccaacagaaccatatctcatgaatatttggttatatcattaaatagtgttctacagcatcatttttaatggctttatagtatttcattgagtgaataaattgtcattaacttaaccattctcctgtatttgaacatttggtgtgtttctggtttttagataatataaataagtattttgtgcataaatgctttccatattgaggatcacttttttagtatttctagaagtagtgtttgaagcaggaactgtggatatttttaaagccctgaattcaattttggaaaaatttttaactgcagactagttgccatctatgtgtttttcttttctattgagttactatgtggatgtagtacaaattggcttcagtgttagaattacacaaacacaaagaataactctattattactgtaagtttcccaaagccaaataacgtataatatctgaagtgttaatactactatccatttttattaatatgcatggataatggaaagattgtaagattttcttttgttccaccaaataagaaagactgaaatggtagatttcaaattttatacttaaaagctataattaatatagaaatattttgtttttattttagacagtcttttcacagaaaaaattagtatttagaagttgggatctcgcataggtatgagtagaactgacttacataaagtaatccttaattttttatgagtttagccattttttatacattgcatcattattgccgtattttctaaattatgaactgcatatatttgctttcaaagaagtaatcattatgtgtttgagtagtatagatagctcttcccaggtatcaatagccaaatttgacatgatactgtaatttactagcctttttagaggaaatataatgtgtagacagagcttttaaattatttcccctgtatttaatttggctttttattcctgttgttttaaagtatatgatgctataattccagattatttgagagtgtataacttaatgggataacttgctcagaaatgtttttggtcacatagttttgtttatctggaaacttgtgagatttaaaaattttcggctggatatggtggttcctacctataatactggtgatttgggaggctgaggtgggggaattgcttgagcccaggagcttgaggctggagtaagctatgactgtgctactgcactccagcctaggccacagagcgagactccatctctttaaagaaaaaaaaaaagatttaaaaattttatttggggtaattggagccttagcagtatgttactgatctttccactggaatcttattttatattttcagtactcatcagatcacattgaaataacatactgagtatttgttcattcttatttctttagtgtgtcattttaaaaacacagatctatggcctttgggcccatactattttgcatcatgggatggatgagcattaatttagttattaggaaggaagtttttttgttcttcagctaaagtttatttatttatttattttttcttaaatagttgtgtggagtttgacttgaatgtaaacaatattgttggaataagaaacacattccttctcagaacttatgcataccgtaagtttgttgtttgtttattaaaaattagcctttttttctttattcatttttaaagatgtttggcataaatagtgacatctctttagttgtgtttaagtatagtgtatcttattttatttgtatatgttgctacactaaaatcatatactgtcagttataggtgaatcaagtggcattttaataattgataatttttaaaaggtaactaaggtaagttttagacataagacacaaagtgaacagacacagtgtttaatatacacggagacagtgttctttgttttggtatggagctgggaaatgatgtaaactttcaaagaaactataacgtctcttaccatgttaagttttaattttactttcagttgaaaatcgagttcgtccgttagtgctggtgattaagaagtgggcaagtcaccatcagataaatgatgccagtcgtggtactttaagcagctatagtcttgtattgatggttttgcactatttacaaagtaagtataatggggttttacccaatttttaaaagtaaaagacagctttattatggtgtcttctctgttgaccctattttcaaatagtattgttttaaaagttctttctaaggtccatgaaacacatttcctgttttgttgctttggacaaatgtttcagaagtgttattccttggaaaatatagaagtttcactgtttttttttttattttttggaagtttttctatagtcacttttgttttcaaagaactttcaccactgtattgtggacccattatcttgaagcagacgaatgttcaaaaggcctataaaagttagctcaagtactattcatcatatttttaattttgaatttgagacaggaattaaattattttcctgttggttaaagaagcttttaatctctgagttgccctccttaactagattttatcttcatagggctgttttatcagattggctcccaaattttaattttgtctggttagtcattgtttatgaggccattctggtaaaagctatacttttgtcgcatgcatagtggcaaacagtaataagtgaacacttgtaatttggaccattcataagtgtgagaatttttacggtactgaaaatttcctagacgtataggacagactgactggatctatttgaaacccttactttcatatttctcaaaaatatcttacatatgtagcaatccaagaaataaacattaagctgctttatactttctacttagcctgacaccaagagttgttaaaagatggatgcatctactgttttgtagttattagaccaggagactgagatgtttaataactaaccaactgaacatatgaatatgtggtgacatgaagaccgagtgaaagacttggtatgaatgtagtagaagaccgtttgccaggatgtctggggcttgatctgttctgggttggtgatacttccacagtttagagtcttggtttccaaagattacaataataggagaaaacatattttagcatatataatactcatttcttcattctatgaatatgtatagaatacctaccaaataaatgctaggtattctaggatctgagaatacagcagtgaacaacatacaaaaacaattaccttcttcatgaagcttacatttttgacttgtaaaatgtcacattttcatagctgttacctaccaaaacgtgaattattaaacaactcacagattactaataaaatgtgacatttttaccacggttgtgaattgagctgctgatagagcactatcaacatgtgatatgctcaataataattattacagtgtagtcattaaaaaaaagtattgaaaaatatccttttattgcattgtttggtgctccttgtatttagattctgagagggataacagataatattagcaattttgtcaacagcagcttgggcttggaaagttgagatgatttgatgcccttatagctgtgtttctgtactgaggatactgggaactgggaaaagaagaaggcacctttccttatgctatagatcaaaaatggttagggttggggattacaattttgttaacctaattcctggtagactgggcttctttggatagggattggaggatgatacccaaattgagaatttctttatagtgagtcacttttactagtataggaggatagatagaagtggttgggacaaaaacaaagattgtcttaccaatgccttaaaaaagagcagttcagaggtgagattggttgtca

SEQ ID NO: 116232 - DNA, 1065 bp, Homo sapiens
ctgccataagcagagaaaggaaataggtcctctgtatgtagaaaaggttaaaaagattaacacatttcctagaataaattccagtagtcaataattgactacagatacttgaaagatgactcatcaaagcatgagggggaattgagaaaggattttaattataatttaagagttaatgaaaaaggaggccgggcacggtggctcacgcctgtaatcccagcagtttgggaggctgaggcgggtggatcacttgaggtcaggaattcgagactagcctgaccaacatggtgaaaccccgtctctactaaaaatacaaaattagctgggcgtggtagtgcacggctgtaatcccagctacttgggaggctgaggcagtagaatcacttgaaaccaggaggcggaggttgcagtgagcctagattgtgccattgcactccagcctgggcaacaagagcgaaactctgtctcaaaaaaaaaaagtaatgaaaaaggtaagatcatcaattggctagaaataataacattaatgaatattcatggaatgtttaccatattcctaggcatacagagctttctggtagacattttaaaattgtctttgcagagcctggccaacgtggcgaaaccctgtctctactaaaatacaaaaaactagctggatgtggtggtgcacacttgtcatcccagctagtggggtggctgaggcatgagaatcacttgaattcgggaggtggaggctgcagtgagcccaaatcgtgccactgtactccagcctgggtgacagagcgagaccctgtctcaaaaaaaaaaattaataaataagtaaataaagttgttcttgcgctttcaaaattaatgattcttagtgtgattgaagacctgctatttaaaatttaaatttttggtacatctatatggaaagtttatgggtataaatttgtggggtctctaccagcaagctgttatggaaactatgggcaaagtaaaattttgtagattagctgtattcaaggcattacctattaatcatgtattctgataatgagcttttgttttgtttttact

SEQ ID NO: 116233 - DNA, 1401 bp, Homo sapiens
gaacatgcacacataccatggaattttattttatgccagttttcaacatggggatgaaatgtgatacataaaggaaatttaaataaagcatcctactttgtactgcgtggtaaaaatttatacccttttaattatagttggagaccgtgtaagttggtcataatggttcattacatttacattaatagatttcagaagtcattttttaaagtttttgctaaatcatacattaaaagtgaattaatatgctttgttattgagtttatgtagttgttatacatagtgtattcctaattcttaaatccttcctaattcttaaatttgaaaatgtattacttgtattttaccatactcatgacattatattttacagttatttcttatattgtgaatgttaggcactttacctttttatattgttcttttcatattaaaacaatgtaaaattactgttaattaatgagattggatttgtttaaaacgattggtgaaggatgacacaaatatggtgataacatgaggatataatttctttgtatgaaattttattaatagcagattgtgcccttagttttctgacttttgctgagcattctttaaaaatgtactaatgaggttaaagatttttctttcatttttatttgattttttttgttgttatttgcagtatatcagttttcctgaacgatttcaattttggtattgttagtggaaattaaataataaagggacaattatgaaagaactatttttatctcctagtgtcattgaactgtatttttaaaattgtagtttttgattgctacatccatcttaataatgtctattcagtatctgtagagcaatccttgtcttgcttattgtgtgtgtatgtctgatgttggacaaattatgtatgtccctttattgatagcctattattctaaaaccatgtgaggaacattgatttacatagggatatatgtagtttattaataaaaccttagtttgtcaacttaaatatattttaaatacaaacttagggataagaattaatttcatgaaatatttgaaaattgttgaattttagcataaacccttatggtcttatacctgggatgtagctgacaaattattgcattgtaaaatgagtcacgtgaatcacggaagctttaaactttttctttttatagccctacctgaacccatccttccatccctccaaaaaatttacccagtaagtgtttcttataaattattataatacattttatgtcaagtgtatgtagaactattataagtagtattaatgtgattataaaagtagtaaggctaagtacatgataacattttctatatataccaagagaacatttaaaatgtttcatatactgtttcagaaaactctcttacttgttattt

SEQ ID NO: 116234 - DNA, 2800 bp, Homo sapiens
tatgtattcataatctataagaatccttgtgtttctttttcagttttcatgtattctttctccagaattctctgtttctttgttttatatcattagtgttttcctccatagtcattctttttcctgcatttatttggaaataatatttaagctacttgtttagaatgtttgactactcttctgaaaccacgtaatttttacatattggtttcatatacttataagaagagctgtcttctaaacttactaaatggtcatatttcaaagagaaatatcaccagcttagatgattaattttcaaaaaacttatttattgtgtcacacaaaatataacaaatttacttgacatggaacatcagttaaatatagtttaatatctgataattgagaagaaccaatgttcttggttttgaacataagttattattgtaatgcacacatgcaaggtgctggataataaacgttcattttaatacagccctgctgtggtggagatctcacattctgtggaaggtcatctgctaggagagactgtataacaagagccttttagaatcttgctatctcatcttcctttttttaaactagtttctgctattatgaagaattattataatgagtttccagtatagctaaggatcagtctttatggtctcttaaacattatgaaaaatgaaagaaagaacagaaatagaggtaacttgaactttttggccttattcttttgaatctttttatttattcttttttttttttttcttagagacggtcttgctgtgatgcccagtttggtctcaaatgcctggcctcaagcgagccttctaccttggcctcccaaagttctgggattacaggcatgagccactacacccagcctgttggccttaattttgaatgtttttctctctccataaagtattgactctcttgtttgtactgaaaggtcatatttcattttattgacccaacctcatcttgctttaagacacaggtgtcagtgtagaaagagttgcatatgttctttagcaaaggagctaataaacttatcccaaaataatattgtgtattgaaaaatgcttctgcagcagtctcacttaaaaccctatgctacatgaagctctttttactaatataggagactggcgaaatatcagtgtactgtggttggggtcagagggaatgctttcataatactcagattcttactgacggccccattttcacttctgtgttctgtttttcttattagctttctcccatgacagagtcctgacttctgttcatatccactacctctggccctatgctttccatctgttttgcttgtaagcttatttctatacctgtaatggggaaatagatttagccccaaggccttaaaaaatactaatagcaagacctgcgagattaggaatctcctaatttgcatttacatatggttacattgccatcataaatatttaattaatttacctttactataagatttttgtttacatggatagggacttactacctgttctcacacaagattttttgttttatatgaaacctgtaggctggtcagcagaacacatttttaatggtccgtctgatggaacaaacaagtcagcttgtttgctattattaataataaccatccgggcgtggtggctcacgcctgtaatcccagcactttgggaggctaaggtgggtggatcacgaggtcaggagttaaagaccagcctggccaagatagtgaaaccccgtctctactaaaaatacaaaaattagctgggcatggtggcaggtgcctgtaatcccagctactcaggagggtgaggaggagaattgcttgaacctgggaggcggaggttgcagtgagcccagattgcgccactgtactccagcctcggcgacagagcgagactctgtctcaaaaaaaaaaaaaaaaaaaaaaatgtatatatatatatatatatatatatatatatatatataatagccatcgtttatttagtatccattatatatgtcagcatactgtacattttatacacaatttaaaaaatcctgaacaaataaacttgcaaggtattattcctctttcactaatgaagaaactgttttagaaatgttacatgattgatacaagtggtactaacaatttttccattatactctttcttgggggaaggcaaaattacagtagtattcactaacattttatctaatttctgttgcttattacattttatttgtatacatctgattgttcatatacagatatacctttaagggcagcagttacggcagaatttcagcttgtataaataagtttaagataagttaacaacaacgaaaaaacaactttgttactttacaaaggaaaccgcggagttcttttaaatttctagcttctctaatacaaaatagggtttatttttaaaataagagaaaacagttttggaatggaataaatttgttcagtatactatgctttttagtcattttcatattttcaaaatttataacattttaaatatttttaaaattggtatatttcagttcagttgtgatatgaaagggataaaaggctataaacatcattgtctctaaaaactgtattatagtatagaattactgcttattactaaattcttattgacttaacgtagctgatggaggggtacgttattcagttgaataaatgaagctgagaaagttaaatatataaacagattgagcttatgaaggaatctttattttaatgcaagcatattactatgagggttaacttaaatttatgctaggtagattt

SEQ ID NO: 116235 - DNA, 1022 bp, Homo sapiens
taatatcctcttttataaatattatggtaaaagcttgctgaatattgcttgttggtatgtttcctgtctcattttccctgccttctttgtcttttcaagcttaattcaggttgaacatctctcttcttttccatctaagatacagaaacaaaagaaagcaaaatttataaaatcttaaaattagtataagtactatttctatattaaagttactcttacggcctttgggagaagtttgaagtgacagaaaaaactcttactttgtgcttgatatagcctttatacatgaagtataactgctccttgtaggaataattaagaatgagataacctttgtgaagaaatctatatggtattgggtagatcttggtttgtatagtaaggttttatttatgagttagaaaatcttctgctaaatagcgatctgtttggttaactgagtgatatactcaagccaaggattagaatgttagtttttcaggtacattctggtctactgcaaatactggtgaagtctttagtggaagaaaaatttcaggtttccaaattgccaaatagagtaaatttcttctctctttttcaaagaggagcctagttcaggatttataaagtttcttagtgtgtgttttaaatggctttacattttttccccttcttctttttgacaggagtcttttagtcctgctatacagctgcaccttgtacatcaagctccatgtaatgttcctccttacctctcaaagaatgaatcaaaccttggggacctcttactgggctttcttaaatattatgctacagaatttgagtaagtaaaactttaaattgtgtttgttcacttatatgtgtgtgtgtgtgtatgtatgtatatatatgaatacgaatatataagtaaatgctacagatttagtcaggagctgtgtttgtcacttccagtgttgtaaagttgtccagaaatgtatagtttataaaatttcctatgtgacaatgaattattggaagctagatagattttatattcttag

SEQ ID NO: 116236 - DNA, 1093 bp, Homo sapiens
caggctggtctcaaactcttgacctagtgatctgcccgcctcagcctcccaaagtgctgggattacaggtgtgagccaccgtgctcggccacggagctttcatttatattaagatgaagaaagattaaagactggatgagacatagtacataaatagactgtgaaggtttaatggttattctagagttctctttaagatattgcaataacaatagctaatgtttagtgagaatttatctagtgtgctgtagtaagctgagtgattcccatggatttcagttaatcctcataataacctctgtcaagcttagggaatttgtgtacatgaaacttgcccatggcaatctacagctagattgtgggagagttgggattcactttcaagctggactccaaaactacattcttaattgttagactgtattgacattgtttattatgttatataaattagggactgggggatgtttgtggagggggaaaaggattcacagaacaaagataacttttttcccatgtatagtgtaggattagagcatctgtatacaaataccttgaaaatcacctgctttgttgaacagaaacaagatagtggatgtgtaggtttgtatgttaatttaatattaaaggaaactagtctgctgggtcagatgatactgatgcttggaaagaggtttcagaacttcaccatctagtacatttgtcatttcatatgagatattttcagaaatttgaaatgtggggatcacagccaagaatgtagtcatggtaataaactagaagctgtataaaagaattatggcaattgttaaaaatgtctataaggatttcttctgaactttgaggtaatcatttaaaaagttcttttttctttttctttttttttttttgaaacagaaccttgctctgttgcccaggctggagtgcagtggtgcgatcttagctcactgcaacctccgcctcatgggttcaagcaattctcctgcctcagcctcctgagtagctgggattccaggtgcgtgccaccatgcctggctaatatttttttgtatttttagtagagatggggtttcaccatattggccaggttggt

SEQ ID NO: 116237 - DNA, 1373 bp, Homo sapiens
tagaagattacttctgtcttaacaaataacagattgttactgcgttgttaactatgaccatagttgtttttgtttgtttacttgtactttcttttcttttcttttcttttttctttttttgagatggagtctcgccctgtcaccaggctggagtgcagtggcatgacctctgctcactgcaacctccgcctcctgggttcaagcgattcccctgcctcagcctcctgagtagctgggactacaggtgcacgctactgcgcctggctaatttttgtatttttagtagagatggggtttcaccatcttggccaggctggtcttgaactcttaacctcgtgatccacctgcctcagcctcccaaagtgctgagattacaggagtgagcctctgcgcccagcctgtactttcttatttttccagttacttcattttttcaataaatatgtgttgaaaacctggtatgtactatgcacctaggtgaagagtgaaaaaaagaaatatccagtatcttggagctttcatcctacttgagggagacacaatgaagaataacataataaatagtaaatgtaagaaacaaattcttagaagatgataagtgttgtggaaaaaaaaatatagaggtgggaaatagggattgtggtgctgagggttggggcacaggtttcagtgttccacaagaaaattggggtaggccttagtattgatacaataaaaataatataagagaaattatgaaaatagttaacatggttactgtttttcttcttatagctggaatagtcaaatgatttcagttcgtgaagccaaagccattccaaggcctgatggtattgaatggagaaataaatacatctgtgtagaaggtagttttctgtttaccatctacgtatcatcatggtactaagagaattacttgagtaatttcagctgtgtttcagttaaaagtaatacatttatgtctgaagtgatttgtaagtcttttagtttaaaatttttaattttaaaaagtcatttaaaattttttaggtatgagaaataataaacataaactttaggcattcaccctttctagttggtaagattcgagctgtctttatccctcttacttgtggttgatggataatttcatgacttacagatggaagaaaatagaatctttatatgtgattcttatattgacataaaatgagttatattcttttatacttaaaatattagtgcaagttggacttttattaatagaaattgatgttgctttaaaaattaaatgatctgaagaaattttcttctctaaaattaatttacatgtagttgaatatatccttgagacactttgagtgagtagaaaactgacttcaagggacaaaatt

SEQ ID NO: 116238 - DNA, 1475 bp, Homo sapiens
gtatactacctgtaagagctgctgtcctgaaaagataactggcctctatttcttaataaattcttccaagaaataaagaacaatagtttcatcataatacattatgtttacctccatcatagttgcttttttcatagttcttgttttcatgttttatttttaaaaagacatataaagattgcatattttattatgacatttcctaataaacccctttgatttaaaaatgtatttttaaaaatgtttacattgatgatgagtaatattgcatgtgttttcaggtgatcagataaaatatattttgggaaattaactgaacaaataaaaagtttttgatataacttcaattaattgtaccacatgctaatcctgaagagatgtgtagaattttggaaagggtctaattcatacatgcttaaagtataacctacgttagatagtttgttgtcaaagtctgttctagtaaagtgaagattcaagtcagttgttcagttacttgaagcaaaacgaaatctttcatttcagtcaaatcactgcagtcatgaaatactgaacaattgccttaagtctttgcttgactcactgggatagactgaggctttgggtgtgtctgtattagcatttcattagtacttcacatgcttttgatgtactcttgagattgctttaaattttgtattgaaacaacaatacattttgcactgtagtaatgggagcactaactcttacaacagttagtgaatcgttttaaagaatcagttcagtgtagacattttgaaaagattgtttcctgtgctttacgatagcttagtgcaatgtgcacttctgttttacttgccattttcctgctctgttttctctgtgacatgaagcaacagaaactgagatcaaagttaagattatatcctgtttgtagtatcagatatttttctgtgtacaattataggattgtaatctaaactggaatttttaggcagtaagtcaccacaaaatgttttagataagacacaataaaattattataaataaaagcttaatgtttgtaaaaaatctcttttttagtatttcttttttcacatgaaagaagtggtggctgctaaaaaaaaagctacagtgtttattaagggtctttttgatttatgtaaatatttgtaaattggtcagtgcctgtaaatttaaatataaaaagtaaccttgaaaacagttttaactttttcaaaagaactatgtccaacattttttagacctgctgtagtacagttttgtacctctaacgtattttttttttgcagaccaaatgctaaaacttttgcttttctttgacttgtaaaaggtgcacattttcattttcttccttaagttcaaatttttgtatgatgtcaaatgcaataaaatttatatatggacattgttgaggtgccttttttttctgtgaaaatctttgctttgagatgagaccgaggctgtagttatca

SEQ ID NO: 116239 - DNA, 1133 bp, Homo sapiens
ccttggaaatcatgaaaaataacttgccagagtttgcatcagccctcagtaagtcatgaaccatagagaaggtcatggggccatttattctttggaccactggctacttctgaagttctggcttccttctctctaggaggagtcgtgtattcaagcttttaagttaaatgcataaaaatgagttttacttctcttctgacttgatttttaattttatgaaatgggaaataatgtttttccatttttctgttcattttgaagtgggaatttgaggtgtttgtaatgtcatgttactgttctgaaagattgacagtaaagaagacaagaaatatatgtatgtagtatgcatattagttttgtcccaccaagcctatctttgaatggcaaacattttaaaaacatctgttctagttgcacaactactctagcttctttataaagtaaacaatcttaaagtaagcaatgttggccataatttcaatattctagccttgccgagtgtgaatatattttactcagagactatgtacaaatacactaaagtggtgatggtgatcaatattgtaaagaatttattctgataaatgagaaactggatataatgtcaaaatagctattttctcaataaaaatctcaaatctcctgactgcttatgaattctcgatttaatgttatttattctttgaggtaaatcttttcatcgcgaagaattttttgctggttgaatgtggttgttcagggctgggactgagctatagacatagtgggtttttaaaaaatgtccattctttttttttttttttgagacagagttttgctcttatcacccaggctggagtgcaatggtgtgaactcggctcactgcaaccttcgccacctgggttcaagcaattctcctgccttagcctcccaagtagctgggattacaggcacctgccaccttacccggctaaattttttttttttttttttggtatttttttttttttttttaagtagagacggggtttcaccatgttggccaggctggtcttgaactcctgacctcaggtgatccacccgtctcggtctcccagagtgctgggattacaggcgtgagccaccgtgcctggccagaaaatgtccattctttc

SEQ ID NO: 116240 - DNA, 1024 bp, Homo sapiens
agctgtaaagaacattgaaggtggtcattccttcaaaactgtgttttgaccacacaaggtgggcattaacaaaccaaatttcaacttaagtttgtttgtattatattgggggtgctgcgagactggagattttataaaagcaagcatttttatttccatttataatttctattcaatattgctagatatattaacatgaaggaatggggaagcttatttcaatcaaagctaaaattttcagaagtctgtaaaaatggaaaaacaccattgaaagaggcagaaacaggtaagggggatagtatcttagaaaacctgttggttaaggcagctgcatgtgataaaagtggtacttgaacttggtagtgtttccttagaacctcctccaaaaatatgcatttaccaggcttgttacaattttttgacagtttttcatcaactgtcaaaaacttcaacccttttaaaacctagatataaatgcttacatgtaaagaaaggaagctaagcagtgggtacctgggatctctctgaactatttttataacttcttgtgagtcttaagtatttcaaaataaaagtggttttaaagtaaattcatagattaaatgtatcattatctatatataaaccatgatttaaaactttaattttctaaacatagtattcaacttagttgaataaatatatgatagaagttaaatagaatttttatttcattcttaagaaaaactcatgtttgtaacaaatgatatctaaagatctattttgccttaccagaaaagaaaaaaaaaaccctaaaaccaaaaactccttttccctaggaagtcaaaaatgctgtgatttaaaatatctaattatatttttttctttctatggtagtggggtttacttctgaggataaaatattttgaaaaagctctgtcccttgacatggtagttctcccgtgccttgtacttgttctctctccatatgcacagtgtgacaagatgctcacctttaatgaagaaggtgtagcttttcgtttta

SEQ ID NO: 116241 - DNA, 1088 bp, Homo sapiens
tgtctttgtagtacatcttcagttgtctttcttgtattaattccagaagaagtgaatgtactggttatcgttactatgctaggctgtaaaattcttactgaaattgcccacttgttagacactactcaggaggagcccatggccagggtagtagaaatactgtgcatctggtccaagttttctatgcttggctcatattctttcataagatgcatattctttcataagatgcatatcatgtagtcaaaagctttctgacaaccaattatttttcatatgtttcacttatagtcgaagaatacaaaggaacaatcagaaatagcagcttttaatgaatattttctatttattggttgctgaactgttaagggatttgctgtgtggtaattttacttataatagaaacttgcttattttagtggttgaggtgcttctgttgtcctaaaactacttctgaggtttttaaaatgtagaaccatgtttttgattagtgtcttaaaagattactgtggtgctcagcaaatcttatcaagtcgtgcaggaacccatatgttaagaaaatgagctttgtagtcaaaagactcatctaatttgagctgagtggagctcagctgtgtttgacccacatcctcccaatttgttctgtatttaggtagttatttatacaagagtctttaagtcattctaaatattttttcttgaaagttttaactaagtgagaaataaggtagtcttcaaaatcttggtcatctgtttggatgagggaaagtacctcatgagttgcacattacttctacaacagggtgtgtgtgtgtgtgtttgtgtgtgtcagtcatcttcaaaggcagattattagattccagcaatctgaaatctattattccagcagtctgaaacctaaatatgttatattggaaatcatgactgtgagactttattgtcctctaggatggatgtatattggagaagggtggttagcacattcatcagacatctgcttatgctgtggtcaaggccagtcatttttaatttatatcagatttatatcagaccctccaaaaagtatttgaaatatattacagttataa

SEQ ID NO: 116242 - DNA, 1038 bp, Homo sapiens
tagtaaaccttttaagagactatactgtgtaattcagaattgagaattttgaaaaaaaaattaaacaccatcccaagttagtattttcttatgtgcttaaaaaaatccttaatttaatttttttttttttttttttttgagatggagtcttgctcttgttgcccaggctagagtgcagtggcatgatcttggctcattgcaacctccgcctcctgggttcaagcaattctcctgcctcaacctcccaagtagctgggtttacaggtgcccaccaccacgcccgacttcttttgtatttttagtagagacagggtttcaccatgttggccaggcttatctggaactcctgacctcaagtgatctgcccccgcttgatctcccaaagtactgggattacaggcatgagccaccacacccggccttcagttaatattgtcttatgtgctttaaaaatccttaatttatttctaggccttctaccttggatgcctatgtttttggttttcttgcacctctttacaaagtacggtttcctaaagttcagctacaagaacatctgaaacagctctccaacctctgtcgcttttgtgatgacatcctgagcagttattttaggcttagtcttggaggtaagctggctctttttcagctaatgtttgtttgcatattctcctatgtatgtataagcaaaatccactacttattttaattttagaagtttgtgtattgtctttaaatagtggtttatagcacttcaaggatttgtgtttttccgacttcatttttattctcatgttagttcttatttaaatagataaatagatatttgccttttatctattccgctggatttttacgtttcttcttcttgttctttaaatattacccctttgaagtgggtcattttcttctaaaaggttaaaaccacaggtattaagtctttgctgaaaaacagtatttatcctaatgcaaatggacaattactttaaatgatttttacctgctgcttctagcattttcctgcatgaacagaaatca

SEQ ID NO: 116243 - DNA, 1049 bp, Homo sapiens
gttttatcctgagtcattctaactggaaaatttgtatgaagacacttcatataaagatatttatgaaaaactctcatgttgattgagtgatctttcatttaataaaagaacatccttgtagtgttttttctcttcttttgcagcttcacacattctgggttgagagtgacaattactttactgtgacaaagccatggtttgcttcacaaattccttttcctttgagtttgatcctgcctggaagaatgtctaagggagcactgaataggattctcctgaccagaggacagcctcccctctaccacctccgagaagtggaagcacaggtatagtatggattattcttcaagcaagggccctagagagaaaggacaagataaaatgcagacttgagtttacctagagatgccttcctcaaaagtagttttagagtatcttttctacttttgagatataatttcatccttattagatatacagagatgccaaggagtgcctaaatcttctatcaaacagattgggaacatctcagtttttctttggagatacgtgagtattcccttaaaaatcattttggtattttgtgcacatatattcagtgagcagctatttaaagcaagtcctcttatctccccaaaagatgagttttttacttaaaaaaaacaagatttaggccggtgtggtggctcatacctgtaatcacagcactttgggaggccgagttgggcagatcacccgaggccagaagttcaagaccaacctgcccaacatggcgaaaccccatctctactaaaaatacaaaaaattagctgcgtgtggtggtgggcacctgtaatcccagctacttgggaggctgaggcaggagaatcgcttgaacctgggaggtggaggttgcagtgagctgagatcacgccactgcactccagcctgggtgacaagagtgaaactccatgtcaaaaaaccaaaacaaacaagaaaaaaatttaatgggcttttattataggaaactttttctaccagtgataatctaacattgacttaataggctg

SEQ ID NO: 116244 - DNA, 1032 bp, Homo sapiens
aagcaatgtgcccgccttggcttcccaaagtgctgggattataggcgtaaaccactgcacgcagcctaccctctgcctttttaagatgatgtatttatttaatttttgccatcattggtgcttcaccttcctgcgaaggaaattccagagcctgtatttaagctacctaggcttttacactccctttattgcctttccaaatagtatctcatttggtgtactctagtgtcctatacctcttggaaacgaaagagggcccaacctacaactaagaagggacaaaccttgaactaagtaagaccttacacacccagaaagaacactgggccctccttcttcagggacaatgcagtagccacttggcttgtggaatttactgaaggctatttcctgtaacttgctagttaacttagttttgtatttcaggcagaggtgcgctctgtaatgttgggcctttgacttcacagtactggagagctgttcacacagatgtttagacctttctctctctctctcttttcttctttctcaacaactctttcacagaggcagtcattttgaaaggttgaaatatttggcctttaccaaagagctttttttttccttaagcaaaatcctttcagaaagaaacaaatggggaagggcagattaagaatgcatatgtcccaatccacttctataggagtttaatcatattcacatgagtaaaatgatggaagaactctttaaggtaatcctttgggataaaggatcctgggaagttctctcaggtaaagaaagcttacagcagatttgtaatatatgtctggagagctatttataagaaatttaagaggattgttttgttttcctttattaaagatttaagcctttttactttgcaaaaagaaaactacaaaagttttatagatataactttgctaattttttaaacttttctgaaacgattagctgtagccaaattatgtggttacgttttgctacattagaatttgaaaatgcaatatgtgtggtaaatctactgtttgaaat

SEQ ID NO: 116245 - DNA, 1080 bp, Homo sapiens
gcaatgtgtggaagtggccgaatatacttaaaaagaggtgcgcagaggcaggcggatcacttgaggtcaggagttgcaagaccagcctggctaacatggtgaaaccctgtctctattaaaaatagaaaaattagccgggcatggtagcgtgtgcctgtaatgccagctactcgaaggctgaggcatgagaatcacttgaacccgggaggcggaggttgcagtgagccgagatcacgctgcacaggaatttccaaaatacgtacttgcaaagtaatacagaaacgtgactttcggcagctacccaagatgatgcctattttcagtgttgatgtattcaggcagggaaaaggtttacttggtggaaactcctgttagaatttcattcggggtggaaagaatcttctcgagctctctgtaagtgaggatctaagaataaaaggctcagcctagtcatttttttctgtgccctactgtatgagttgggcagaattgagtgccacctaagctgggcttctgtgtgccaaaatgctggtgggtgaaattagtgaaattctttctattcattcctttgcccttctcccaagaaaacccatggggaaacaaattacaggggatgaattcctttagaactttccctacttagagtgtttgagattcagtttcaaaaggcactccatctgtgtgtgtggtttagagagccttgttttgtaaattccattaaatttccttttttagggcaggagctctgtactcagcagttaaaagattcatctggagtcgcaaaatgaaaagccgtgttctaacctgaggaatcagttaggggacaggagttccgtgggccaggaatgggctcagggagtggggctgcgtgtcacacacagtagctgtgttgcagtggcctagggccttgggggttgtctttaggaaacaccctgaggggaagcaggtaaagagcctgggcagtattgtgactagtttcattgttttcctcctgctgaggtctagcagagcccttgctttgtcctctcggctgggtctggctgccagctggtgtgatttgagaaactgaccttacgcgca

SEQ ID NO: 116246 - DNA, 1115 bp, Homo sapiens
ctgaggtgggtggatcacctgaggtcaggagttcgagaccagcctggccaacatggcaaaaccctgtctctactaaaaaacaatacaaaattagccgggcgtggtggcgtgtgcctgtaatcccagctacttgggaggctgaggcaggagaatcgcttgaacctgggaggtggaggttgcagtgacccaagatcatgccactgtactccagccggggcaaaaagagtgaaactccatctcaaaaaataaataaataaaaataaatgtggcattaggtaactcttcctgttacggaagttgctagggtggagtgggggttttgtgcttagggcacagattgaagttgccagagggtacagatggctttctggcatcttttctactgacagccctgtagaattagcgagcgtgactttgctgaatggtaaacacacacattcactcattgagcctgggctccctctgtgcttcacagacactgaagagcagcagccggggaaggagggaccacgggtcatttatgacgagaagaaaggcaccgtctacatctactcctacttccacttcgtgttcttcctagcttccctgtatgtgatgatgaccgtcaccaactggttcaagtgagtggcccatttgcttaggtatttttgaagcaaagccttaaagttaagagttaagtactgttcgtgtttgtttgtttgagaaggagtctcactctgttgcccaggctggagtgcagtggcacgatcctggctcactgcaacctctgcttcccaggttcaagcgattcttgtgcctcagcctcccgagtagctgggattacatgcatgtaccaccatgcctagctaatttttatatttttagttgagacggggttttgccatgttggccaggctggtcttgaactcctgacctcaagtgatccacctgccttggcctctcaaagtgctgggattacaagcgagttctgagttttaacagtggatgggtatgttttaaccctggaaactggtgatgcttatggcaactttaagaaaatggaaagttagctctatatggacagtctggaaaacatggtaatgaaggaaaaataggaactcctaagcattcatctg

SEQ ID NO: 116247 - DNA, 1065 bp, Homo sapiens
tggagatttcaaagattttaggagttgcatgcaagtaaatgcgaatgaagaccaaatatatatttcacaatatcacatgtagccactcacattaaaaaaaaaacacacctcaggagtttccaagttacagacagaaagataccacgattatcatatcacttacagcaaaatgacttctcaactagtttaggagctattgttggctgttgattcacctcagcactgcttggtatctgcaccctacctctctttagaggctgccttgtcaactgaaaaatgcacctgacttcgagcaagactctttccttaggttctggatctgtttgagccccatggcactgagctggaatctgagggtcttgttccaaggatgtgatgatgtgggagaatgttctttgaaagagcagaaatccagtctgcatggaaacagcctgtagagtagaagtttccagtgataagtgttcactgttctaaggaggtacaccacagctacctgaattttcccaaaatgagtgcttctgtgcgttacaactggcctttgtacttgactgtgatgactttgttttttcttttcaagttctagatgaacatgggaaaaatgttacaatctgtgtgcctgactttggtcaagacctgtacagagatgaaaacttggtgactatactggggaccagcctcttaatcggatgtatcttgtattcatggtaagtcttgggagttactcaaggtcacttttgcagactttaaaattacaggaaaagaattgaaataactttcagtagctgtgaggctgcaaccatttgaggaggggggaaaataaccacaagtaaaaaggcgaagagcgtgaactcatatttgaacttcgttcaccttacttgtttttatttggggtaaataaagcaaatatatggtatgtaaatatttgaacttcgtttaccttacttgtttttatttggggtaaataaagcaaatatatggcatgttgcagcaccgttgcctaaccccctttaaaagatggtcgaatagtagtttgctatacctttactggagggcaggggagcacaa

SEQ ID NO: 116248 - DNA, 1040 bp, Homo sapiens
catgttcttgcttaaaagtgggagctaaatgatgagaacatgtggacacatagaggggaacaacacacactggggcctatcagagggtggaggtgggaggaaggagaggatcaggaaagataactaatgggtactaggcttaatacctgggtgacgaaataatctatatgacaaacccctgtggcaattttccccttacaacaaacctgcacatacacccctaaacctaaaataaaagttaaaaataaatgaataaataaataaataaccttaaagccattctcccagtgaatgctgagccccatagccttcctctttagccaagagcagttcttgtattctgtccccaaaagctttttgatcattggcaggtaagagctttttgccctgtcatagactgtagtatgtgatgaccttgtagaatccagaatacatcccctatgaaatctggtttaccacttactcccctccccaattaagctatgtggttttatcaacaactatggtaattttttttctgatcttgtgatttaagaactaatgttacaaacctcagggagactagttagtgtgttttaagtgtagccataggcttgataaagtattggtagataacttggcagaacctgatgtctttgaagtagcaatgttcagttcagcgtgtaactctctcccccttaatatctttttagttttatctgagaaacatactacatttttttctcttttctttcctttaaaggtggatgctcaagtttgaggactgtcatggggactatcaggttttttaggcatgtgctttctttttcttcaaattaaaacctgttgtctgtctcttgtcacttttcaggacagccacactcggggctcttacaatcaggggtcataagctgctatgtcacctacctcaccttctcagctctgtccagcaaacctgcagaagtaggtaagccagcctgttagtgggcttgtgtttgcggtgtgaatattttcattcatggaggaatgagctattgtttaaatattggagaggccttgga

SEQ ID NO: 116249 - DNA, 1028 bp, Homo sapiens
ttttttttttttgagaccaagtctcgctctgtcacccaggctggagtgcagtggtgcaatctcagctcactgtgacctccacctcacaggttcaagtgattctcctgcctcagcctcctgagtagatgggattacaggcacccgccactatgcctggagtttttttttaagtagagtcagggtttcaccatgtaggccaggctggtttccgactcctgacctcaagtgatccccctgcctcagcctcccaaagtgctaggattgcaggcatgagccactgtgcccagccccagctcagtgatttttatagacaaattggaacccatgtgatgtgacttattcaaggttatagcgtctttgtggcagagccagaagtcgaaccgagtccttgtcccctgtctgaaccttgtttctttactggtcattgttgactttttacccaataaaatttgaacctttgattttcctggcaatatgtgtttgcttttaagttgtgggtcattatggattttatgaattagggcatctattagggtacctggcagatgtagtgtggaggataagcttggatatttcagggtcagactgcctgtgttcagatcccaactataccatttattgactgagatgttgtcaacctacatagattctcaatttttctcttctgtaaagtgagtgacatttataatagtaatacatatcttatatggttgtgtgacaaatatgttaggtacactgatcatctagtaaaaattagctgtggttattctcttttgagcaaaatacaacgaaaggttgcctcattgtgttcttcatggtcttttgcagcctggcgctatgtgggagccgtcggaggcttcctcttcattggcatccagctcctcctgctcgtggagtttgcacataagtggaacaagaactggtgtgtgcctttatggaaagcttcccattgactcacagaaactgcccagttttgaccaaggctgtactcaactgcattgctagggatttgcagttttgtttccctt

SEQ ID NO: 116250 - DNA, 1037 bp, Homo sapiens
ttacttgatagtttgtggctttgagtttggttgctttgagggttggagggaaacgccttgttctcaggggtctgtatagaaacaacatacagcctgcatgcggtggctcacgcatgtaatccctgcactttgggaggccgaggcaggcagatcacctgaggttaggagtttgaaaccagcctggccaacatgacaaaaccccatctactaaaaatacaaaaattagctgggcatagtggtgtatgcctgtaatcccagctacttgggaggctgagacaggagaatcgcttgaacctgggaggcagaggttgcagtgaaccgagattgcgccactgcactccagcctgggcaacagagcaagactgcatcaaaaaaaagaaacaacatacagtgtgtgagcctggcttaagtgccctgtccttgggtgcccagagccagacttaagaggtaacacccttagcaggcacattcctttcaccctgtggtgtggaatttgtatgtgatgtattttttctttttccaaaaatggggtggactttggaacagcaaatatttaatcggagcaaattccccttgccagaatcctgctagcttgttcaccttggaggttctttgcccaaaaatacttaccacatactgaaaactaaatgtgctaagtcacccacagagtataaaggaggtcttgattaggatttggagcaggggggttgtttacctgtttttgatgaatatacagtgtcaatgtactcaccctgtgatgagccttaaagggccctggccgcattccagattctggagtaagcaaacaagggaggggatttgttggggatggtggctcagcctgctgctgttagcattctccttgaaatggattttggaggaagaaaaaagaggtagggaggcagagaaggtctaaaggtgaaagatgggctggtatagatgaaagaggtgctaatgtgcatgtgttatggggaagatgtggttcaggaattagagttgctgatggagtagaagagagaaggtggggaagaaaataa

SEQ ID NO: 116251 - DNA, 1061 bp, Homo sapiens
tctacaaaatatcaaaaaattattcaggcatggtggcatgcacctgtagtcccggctgctcggcagggggatgaggtgggaggatcacttgagccaggctgaggaggtcgagactgcagtgagccatgatcttgccattgcactccagcctgggcagcagagggatacctgtttatatgatttaattaatcatacaaatgtttattttattttccttttggacatttagtgtaatttttaagaatgaatgtaaatactctacactagagccctggaaatagttctgctacaatacaacatgacatacgcattctaaaaattaccacattaagcagaactgcacaatgaaaccacaggtctcacggggaaaatttggttaagggcacaatattctaaaactttgtcagtgacacatctgaaaaaaggaactgaataaaaatgatatagttttataaatgttaaatggttaagaaatacataactactatggtaaatttggcattttatttgaaaaagtcttcaaattaccttgtggaaatgggtttggagagttaggcttttgagcagttgagaagcagtgggaggaaggttatctggaattggatggaaagttgtaacatcaaatgtgtttggtgtgactcagtgcacttgttgagctgagctgtgtgcattttttgtgtattaccacgaagctcaattcagcttggtgcagttttctacctggtgtttctcagtagacagaaatgcacatcctattatgcctaattgttccgtaacatatccatcctgttggagcaattttgtgttttcaaagtaagtatagaataaatagctcagaagccttggacttgcagagcttcaggaaggctgaccaagccttgctcctgttagctgtctgagggagagagctggccccactgacttcctttggaccacctcccagaaaattggcgctggaagggtcttctgttcttctgacccaattgtgctcgatttcttgtaccataataaacaaacaactccagaggcaggaacttcctatctttgaaggcagctctact

SEQ ID NO: 116252 - DNA, 1037 bp, Homo sapiens
ggtgaattttacatattgctgtttgcagttgaatttagggttatgattggatcctgagaacagtatcaatcaagttacctctctaaatcactgtgattgttcccaaatattaggcatcccaagtagcccagagtaaacctttgctgccctgcttaaaatgtattttaaaacatttacagtgagaatatccccatattcttctagcttatatattaatgatatttcaaaacattttagaacttaatctgagagtcagtatagggcagtaggaaattcaaatactgagttggtgtgattacacagaacatctgtttgaattttaaagggaagcaggattttacttttggcttttcttccgtagtttgccttgtgagattaaaattgctgatgtttaaggaaagcagctgttgtggaaagacttagtgggtttttatcagagagtaaattttgaaacaatttgtgggtttttgaagtaaggttacagtatatagtgattagacagcattttcactctctcatgaaaactgtgtagtcaaaacaaaagtaggaaaaacacatgcataaccccttaaatcttatttatgaaaagataactagcgaagatgggaaaatcagacttgtgtttaagtatcatttttttataaactagctaagtgcattttgaaacaaaattcatgaggtctttgtggaatgccttttccatttttttgttttgttttgttttgtttttgcactcacattatgtctcagcaatttaatggagggctgatttcctaatgctttgatccttggtgagtgtggttcaccccaactagggaggaattcagtcttttgttcttgattccatgctcattgatctcctccactgccattctcagaaacaatggcagtattttgtttccatagtaatgaaactgtttgctctaataggattctatagtggtaatttttctttagctttgctagccttatccctaaggactctaggactttgttggacttattttgttagctgttactctttttttttttttttt

SEQ ID NO: 116253 - DNA, 1047 bp, Homo sapiens
caaggccacacaaggtggatggaagagttgtggaaccaaagagagctgtctcgagagaagattctgaaagaccaggtgcccacttaactgtgaaaaagatatttgttggtggcattaaagaagacactgaagaacatcacctaagagatgattttgaacagtatggaaaaattgaagtgattgaaatcatgactgaccgaggcagtggcaagaaaaggggctttgcctttgtaaattttgacgaccatgactccatggataagattgtcattcagaaataccatactgtgaatggccacaactgtgaagttaggaaagccccgtcacagcaagagatggatagtgcttcatccagccaaagaggtcgaagtggttctggaaactttggtggtggtcgtggaggtggtttcggtgggaatgacaactttggtcatggaggaaacttcagtggttgtggtggctttggtggcagtcatggtggtggtggatatggtggcagtggggatggctataatggatttggtaatgatggaagcgattttggaggtggtggaagctacaatgattttggcaattacaacaatcagtcttcaaattttggacccatgaagggaggaaattttggaggcagaagctctggcccttatggtggtggaggccaatactttgcaaaaccacaaaaccaaggtggctatggcggttccagtagcagcggtagctatggcagtggcagaagattttaattaggaaacaaagcttagcaggagcggagagccagagaagtgacagggaagctacaggttacaacagatttgtgaactcagccaagcacagtggtggcagggcctagctgctacaaagaagacatgttttagacaaatactcatgtgtatgggcaaaaaactcgaggactgtatttgtgactaattgtataacaggttattttagtttctgttctgtggaaagtgtaaagcattccaacaaagggttttaatgtagattttttttttgcacctatgctgttgattgctaatgtaatagtctgat

SEQ ID NO: 116254 - DNA, 1056 bp, Homo sapiens
tgctgaaaaatagtttcatttgttagaatataattgtcttccactaaaaaaagaaaaaaaaaagcatttaaggctctaagtatctcttgaagtaccacttttcctgaatcccagagtttttatgtgcattatttttatgcgtttgtagtttgatatgttgtatttataagtagttttagctttccattatgaattcttctttgacccatgagttatttaggtaagtgtttaaaaatttacaatagtttatatatgcaaatattatgttgttagagttggttttcatgtcatttttacatatacaggggcagtttccccaactaaattgtatattccttaaagcagcactcttaaattttatttctgtgtcaatttcttgactgtgtttcctggcatggaatacatggcataaaatttgttatgtaattaaatgaaatattattatactttctattttttaggcatacaagaattaaattctgaataagtctgcaggtaggatggacagttattttaaagcagctgtcagtgacttggacaaactccttgatgattttgaacagaacccaggtttgttgattttccatttttgccgctaatgggatttaaaaatatctgtaattaagttatctcaggtatacagtaatattagcaaaattttctttcaattttggtcacgttatcttctgcaaaaagttcatttatttcataataagatgttagttgattcttagactgaatgggacccatagccagaaacagaagtaaggaacctagaaagtttttttctagatacaaattagctataagacagacatttcttttcttttcttttctttttatttttgagacaaagtctcattctgtctcccaggctgaagtgcagtggcacaatcagagctcattgcagcctcaacccccgaggctcaagcatttctcccacttcagcctccaagtgggaccataggtgcatgccaccatgctggctaatttttcagttatttgtagagacagaatcttcctatgttgcccaggctggtctcgaattccggggtt

SEQ ID NO: 116255 - DNA, 1114 bp, Homo sapiens
aacaagattatctccaagatgtacaaaatgcatatgattctaaccactgctcagtttcttcagagttggcttcctcacagcgaacttcattgctcccaaaagaccaagagtgcgttaatagttgtgcctcatcagaaacaagctatggaacaaatgagagttccctgaatgaaaaaacactcaagggacttacttctatacaaaatgaaaaaaatgtaacaggacttgatcttctttcttctgtggatggtggtacttcagatgaaatccagccgttatatatgggacgatgtagtaaacctatctgtgatctgataagtgacatgggtaacttagttcatgcaaccaatagtgaagaagatattaaaaaattattgccagatgattttaagtctaatgcagattccttgattggattggatttatcttcagtgtcagatactccctgtgtttcttcaacagaccatgatagtgatactgtcagagaacaacagaatgatatcagttctgaattacaaaatagagaaatcggaggaatcaaagaattgggtataaaagtagatacaacactttcagattcctataattacagtggaacagaaaatttaaaagataaaaagatctttaatcagttagaatcaattgttgattttaacatgtcatctgctttgactcgacaaagttccaaaatgtttcatgccaaagacaagctacaacacaagagccagccatgtggattactaaaagatgttggcttagtaaaagaggaagtagatgtggcagtcataactgccgcagaatgtttaaaagaagagggcaagacaagtgctttgacctgcagccttccgaaaaatgaagatttatgcttaaatgattcaaattcaagagatgaaaatttcaaattacctgacttttcctttcaggaagataagactgttataaaacaatctgcacaagaagactcaaaaagtttagaccttaaggataatgatgtaatccaagattcctcttcagctttacatgtttccagtaaagatgtgccgtcctcattgtcctgtcttcctgcgtctgggtctatgtgtggatcattaattgaaagtaaagcacggggtga

SEQ ID NO: 116256 - DNA, 1305 bp, Homo sapiens
gatagtaaccagttttcctttcttatgtatagcatatcctgctcctctaacaagcatcagaggccgaaaacctctttttggagaaataggacacactattatgaacttacttgttgtgagtaattgaactattttattaggtatttttatactgttactttaaaactgtatttagcaaagtttatacatttatattttcctactttaatttgccatatttggtataatgaccattcatttacaataaatcctaattattttaacattagtgctcagtttttgacgaattgctttttagaacgtactatctcctcatgtacgtgtacctgattctaagtgccttttgattcattctcctgcagttcttggatatttaggtaatgtaagaactctatacagacctcttaaagttgttgaaacttttgtaaatgtattagtaaagtcagtcagtcttgtgattttgagcaaattatggccttagttttctcatttataataggaagtgttggattagatgatatctaaagttcccttccacctatactttttgtaattttgtgtttccctgttaccatagaaaaatgtttcagtggactcacttttatttatccatgcctagtttgaagaccttttctattttggaagttctgtaactagaaagttaccctaaatactacaaagtttttcctgagaatgatattctttattactgctgtggagaaggatttcttaaagaaggatttaatggatagaaaaatactcatggttagtagtttatggtaatgcaattattctatgtaggaccttcgaaattaccagtataccttgcataatatagatcaactgttgattcatatggaaatgggaaaaagctgcataaaaataccacggaaaaagtacagtgatgtaagtataattgttttattcaaatgacaattattgaacattagagttcccttagaattgtgtcacattaaattttttgttttgaattagactatctaatgtattatggcaacaaacattgtttttgaaatgatagaatttgtttactgtaaataatctgtttgatcatatttcttttttttcgtactgttttattgaggtgattactgttcaactgaagtgcttttattttaaaacatttgtttccatcacattcccagggagctgtccagaccgaagcttgataattatgaagctggccagaaacgtggctcttagaataggcatataatattaaaagtgtttctaaataaatgttgttgtttttgtttttttccaggtaatgaaagtactaaattc

SEQ ID NO: 116257 - DNA, 1306 bp, Homo sapiens
acttctgcctcagcattatctaaatgatcttgatagtgctctgatacctgtgatccatggtgggacctccaactctagtttaccattagaaatagaattagtgtttttcattatagaacatcttttttagtgaaagaatgtgccatattacatattgcaacctaatttgttaaaactaactccagcactaaagctgaaatgccacaaacactaaaagtataaatatgtctgatttttgaaacacataagctttgctctttaggcaggaatgatcttttcaaatcattagcacaatatttaaatatctaaaaatttaagagatccatactttctgtagctttacaattaatttaagtactaaaaagacaaggatttcttttaagaaatttatagcatttactgtgttatttaaatgctaagccaaagtatctgcacttaggtatacctctttatgccaataatgattttaatgaaggctcttttcagatgtaaccttatgaaggaaatatctgctttgtgtatatgccagttagaatactggtttctaaagtctgtcaaattgtatttcagtggcacaaaaaccagttttgaggtcttagacttataattctttgaataaaactgataacttatttgtataattggagtggagacctacctccataattagataaactctttttggattataatcagaattttgccttttttcttctcaaattattacatatgtatgtattatatatccacatatatagttttccctgattaaatggatattaaaataattgcgggtgcttcaggactttttgcttctatatttaagtatattgtttttatagcaagaacatattctgaatgttttataaatctttaataatttatatgtaggtaatatttttgtatcacaatgcattatttttttcctcctttccttccaaactataccactgtatttaccacttctaagagtgactgacgacgggccagatgacccttgaagtagtcattatgtagcaataaatgaagcctgaaacaggtttttttacttccactttaatccttagaaatttcttggcaacttcgcatattttcattgacaccagtgtataagtataaatttaaatgaactaattacttttgcatattttaaattctttatatggtagttattttttataacaggatattaacataagttaaatcctatgtatttgaaattgttacagagctttcctctttacttcaaacagcaaaaaagtggggggcatattgtagtcctgtcatttaagttatgtaaaaaatt

SEQ ID NO: 116258 - DNA, 1048 bp, Homo sapiens
aaattctagagtcctggtattttattattactctgtaagttgcctttataaaaattctgaatgcagtatgtttagttgaaaagtgctgtggaaggaaggggaacatcacacaccagggcctgtcgtggggtagggggaggggggagggatagcatgaggagatatacctaatgtaaatgacgagttaatgggtgcagcacaccaacatggcacatgtatacatatgtaacaaacctgcacgttgtgcacatgtaccctagaacttaaataaaaaataaataaataaataaaaagtgctgtggaaatatccaatatgaaccattaaccaacatttaggtttttctggtaatgtaatgcttatcagtcctctaaatcatttggtgtatctcaaaaccttcatttttaacagccacgttagtcacatattctatcatgcatatgtactgtgatttaattattttcctattgttggacatttgttatagccaatcaataatgtgccttctaaaatggctaccttaatattttaaagaatgatggccatgtgttgccatctcagtatgaaaggtctatgactctattatatatgccaaatagggccacgtgttttcagtgagagactgctttggggatagtggatcctccacctaactgtccttttttttttaaattctgcagcccagcgttagaagtgactgctaagtcccatgtatgttagttagaatttgtctttatatgcccctccattctctgatatcttatcagcagtttccgatagccatttttaggtttaaggtttttggttttttggggggcttttaaaaaagatgttagctcatgtcttttattaactcatagacaattacttgtcttctggtttgttgaagcagtaagtcagacaacatttgccacaataatgtctgtcaaagtagcttgccataaacactccagcaccatctgaatggcactctcgacaaaggtgtctaattttgccattctcttccaccttatagtatttcaggacagccagcttcatcttctttctctt

SEQ ID NO: 116259 - DNA, 1021 bp, Homo sapiens
tgtcaatcttatctttcagaaggaaatcagcaatgcattgaagtccctgttgaccaggacccagattctaaccagacaatatttgcttccaccttaagaagtatagttcaaaaaagaaacttgggggcaaatcactacagctctgattcccagctctcagctggccttacccctccaacttcagaagacggcaaagcacttataggaaagaaaaagatcctctcaccatctccttcccaattgtcagagtccaaagaattgttggagaatatccccccaggtcccctgagcaggagaaatcatgcagttttagaaaggcgaggttcaggagctttccctttagatcacagtgttacccaaaccagacaagggtttctcccacccttaaatgtaaattctcaccctcccatctcagatatcaatgtcaacaacaagatttgcagccttctttcttgtggtcaaaaagtgcttatgccaacagttccgattttccctaaagaattcaaaagtaagaaaatgttgttaaggagacaatcattgcaaactgaacaaattaagcaattagtaaacttctaggagatgggtataaaacacatcttcttcaaatgtttatatcagagaaacaaagaactagagaagaaatcttaaatgttcattcttttaaatctcgtgattggttagtccataatggctagatggattaaaatgtaatgtgatttgtactaggcgtcatgagcataaaaaataatacatagtttctgttaagggaattctctcaaacaaaaggaaagcgatttttctcaatgcttctaatatttaacaatctccatgtagtccaaatttgtcattaaaaaaaaatcaaagaaagaaggccacgtatgttggggtaatttttaaaaattttcagattggctaaatattttattaggaaacagttttcaagtcaataatttttttaacatttcatgttaataaatgagattgaaattttttatgatctctaaaccataaaagaaaacac

SEQ ID NO: 116260 - DNA, 1037 bp, Homo sapiens
gagcttgcagtgagccaagattgcaccactgaactctagcctgggctacagagcgagactccgtctcaaaaaaaaaaaaaaaaaaagagaaatgaaacaaaccaataatactagtaggcaccatttatagaacacttgatgtgttaggcacaatgctacattcttttttggttttgggggatgggggcggagtcctgctctgtcactgaagctggagtgcagtggcgccatcttggctcactgcaacctctgcctcccaggttcaagcaattatcctgcctcagcctcctgagtagctgggattacaggcacccgccaccatgcccgggtaatttttgtatttttattagagacaaggtttccccatgttggccaggctggtttcgaactcctgacctcaagtgatccactcaccttggccttccaaagtgctgggattacaggcgtgagccactgcacctggccaacaatgctacattttttacaaggatgaagactttattgacagccaggctcggaggcatgtcacacagcagaaccagagtgaagcacagtctgattcaagcaggcgttcctgaccacctggagcatactggggtgcagcctgcatagtactgaagaagtaaccaaagattggggttcattggaggctggaagggtcagaagattcctcagtggagaagctgggtttggaaggggagctggagagaacacaggcttaagtgagagttagggaacaggaatagcagatcctaataaaggaattacaatctgccacacattgtggaattagggcagtatagtctccatcaatcaaacagaagcagagaacctgtcactgtccagggcacataatttcagttatgttctaaacagcttcagattgtatttttgtcttttgcttacacaagaaatgtgataccaaatgtaagtcttgcaaaaaattcttaagaaatttcctgttagctgggtgatagagtggaaagatacaagggaaactgctgactggtttttgagagaatgaggaatccaaagga

SEQ ID NO: 116261 - DNA, 1048 bp, Homo sapiens
gagagaggaatacggaaattgctccaaagtggagattctaaacaaggctatgggagaaagcaaaaaactcttccattgcaacatttgatggtcatttgtactttcaggcatgtactaacataacatcataacagcctctttaatggaatggagggaattctctaacgggagacctagagtaagtcagtccttcattctatggagaaaaaggaaacctgtgaagataaagtgaatatactttgtccctggaaaacacattgctcagttctggagcggctttctctccagatctctgtgcgctggggaacttagatttgctttctactgtccaaatataaactttggtcattctccacctcccctatccctttccccacagctactcacttagtttaagtcccgttgtctctatcagttaacctcttgtggttatataggtttctgttcaaacataaagtcttttattaacaccattcttcccgatttaaaaaataaacagactaatatagtgaaatacagatgaaagagagaacttgtgagacaagaagagaataaaattagaatgtggaaggagccacaagtgatgggagccagagcagacggtcatattaataaagtaaggtggttttactttgtgtctgccgtcagctctgtacgtcattgtgcagtcgatttttcaacagcactgtgccagcctatcctctagggctctgctctcattcatcttgcctggaagaaatctttctcagactatttcacactagaccccaaccaaaccagcaggcccagatattttatattggcagttttctacttaatgagccccaaacaggcttttacttctagttaacaatcttctgtgtgaccacatagtcaaagagaagacagattaaaagaggcctgtggaggcagtagttggctccagagctgggacagatgccccttatcagtggacaccttgaagtaggttttggatgggctgatgtttcttcttctgaccctaaaacttcctgtcaggatgctggcatactcgtccacatgactcgga

SEQ ID NO: 116262 - DNA, 1954 bp, Homo sapiens
agcctcccaagtagctgggattacaggcatgcgccaccacgcccagctaattttgtattttaagtagagatggagtttctccatgttggtcgggctggtctcaaactcctgacttcaggtgatccacctgcctcggcctcccaaagtgctgggattacagacgtaagccactgcagccgacttataatcaactttaatgcagaacttcaccaccacagtcaatctaataatccagacagctcctaagtgactaaggggcaggtaacatagacagcatgtgcaggacaaagggataattcacgccctaggcaggacagagcagaatggctcaagatttcttcacactacttagaacagcatgtcatttaaatcttatgaattatttctggaattttccagttaatattttcagaccacagttgaccatagataacaaactggaaagtgaaactgcagataaggggggagtctgcattccactttttaaatttttggtacagtaagaattagtagagcatctatttggttgtagcaaagataataaatgatttaatataaaatgatatattgaaaataaaaagtgaaatttgttctgtacccttatttggaattttaaaaataaacacttggatttgttgtgtgtgtgtgtgtgtgtgtgtatttttcttttctataaactatttgagatcaagaattactgctttgttagaattgcaattaagacatactttttatgaatgagaattttaatacactcattctagggcaactttttctgtagaaattatcaaccatattttaggcagtagttagaaaagtcatgtacaatataaagccaaatgttaatacaattgttagcaccaagaagcagaaaaattacctatctactagcattgtaattatcttctgagaattggaagcattacaaaattttatgtatatgtattaagtatgctcttggggttttccatagtcaaggtctcattaaattgtactatcttattcatacaagtttatgtaaatttttctatggagagcaactagataatttggggctcttaactctaaacagccaaagggaaaacaataaaagagaatgcttaaattaaaaagttcttgtaagcaaactggaggccagactatatttaaactcagtctctcataattattgataatggttagtgtcattctcaatataactaaggcatactttgcagcaccccagatgaaagaatagtatattttaataatatgctttggcagcaccaagcatatttttaatacctagtataaacttaactaaacataaatcttagagtttctttgtcttttgacacacattaagaaaactgatgttgttttatttcaaaggaagccatgaatcacccaggccatcttaaactatttgtgacaaggatcatgcaagactttgaaagtgacacgttttttccagaaattgatttggagaaatataaacttctgccagagtaagtataaggttattaattagtctgaagcactttggatttcctgcttaagactatagaaaataacatgtcttttcagactacaaattgggttcactgtgtactgctaggatgatgggtgcaccaaaatctcacagatcactactaaagaacttactcatgtaaccaaatacaacctgttccccaaaaacctatggaaataataaattaaaaaaaaaaaaaaaaagcttggcacagtgactcatgcctgtaatcccagcactttgggaggtcgaggcaggggcagatcacctgaggtcaggagttcaagaccagcctggccaacatggtgaaaccccgtctctactaaaaatacaacaaattagctgggcatggtggtgcatgcctgtaatcccagctacttgggaggctcaggcaggagaactgcttgttcctgggaggcagaggtcgtagtaagccaagatcac

SEQ ID NO: 116263 - DNA, 2623 bp, Homo sapiens
tcaataaagtggcttttaaaagtctttggaaccagccgggcacagtggctcacatctgtaatcccagcactttgggaggccgaggtgggcagatcacgaggtcaggtgttcgagaccagcctggccaacatagcaaaaccccgtctctactgaaaatacaaaaattagccaggcgtggtggcaagcacctgtaatcccagctactcgggaagctgaggcaggagaagctcttgaaccaggaggcagaagttgcagtgagccaagactataccactgcactccagcctgggcaacagagcaagactccgtctcaaaaaaaaaaaaaaaacctcgttggaaccaaaaattaaataaacaagttttactgtaatgctatagtagcctggacaccatctttagaaaatccaaaattgcctccattatgtaagatttaaatagtctcccatccacgaaagttaacttaatttcatgttataattttttacgatctcactatcagaatctccacagtgattaaaacttcttgaaggtgcagttctctctccccctaccactcacacacttggagtagcaaacactgacctggtttctgatgtctactatggcacctaataactttgtgactttaggcaggttacaagtaagccttgttgaacctctttccttacctattaaatgagatgaataatgacaacttttttgggtgattttgaagactcactgaaattttgtatgtaaagtttctggcacacagaagggtatagatatcagttcctacccccacccccataaacttgctactttatatcttatagaacatacacattaatattaatattaatgaaatcacagtgaacagactcatgatctcattttcaccttaacatattactttgttcttgtttccctccatcttgagacaaaaatccactgccacctaaatcaactctctcatctcccctgacttgattctggattcctttttttctatcttcaccttgctctgctgtcccaaccttttagtattatcaaaggcaaaataaaaattttgcgatgaattctctaaatttaacattgtgtttgggaagaaaaaattgcagtttagggcatacatgcagacaagtgaccttccatatgtctgaagaacaaagggaaggttagaggttttatttaaaaggagaaatgttactgctctttgagaaagttcattggcactactaaggtttgggggagctagcaagctccgactggcgagcagtgagtggtgggcaaaatcagttctagagttgcagcaagttatctcagaagctatagataaaactggtttcaggttacaacaagcagttccagcagtcaggcttacagagaattacattcttggagcaatgttttataccctgagtgcttttttcccctggcccctcaactctgatttagttgggtatgacaagaatgacccactgtcacccaggccagagggcagtggtgtgatcgcggctcactgcagcctccacctccctggctcaagcaattctcctgcctcagcctcccaagtagctgggataacaggcatgtgccaccatgcccagctaatttttgtgttttttagtagaaatggggtttctccatgttggccaggctggtctcaaactcctgacctcaggtgatctgcccacctcagcctcccaaagtgctgggattacaggcgtgagccaccgtgttcggcctaccctgttttaaacctcaccatagtttacttttcttctaccctcaactttctcagagctttcttgtattaaataactttagtatgattaaaataaaattctatactacactttggttgtagtctgtcatgcctgtgcctttgcacatgtttttatctcctttgacactcagttaaggagtcatgccctgaggagtattctccctcatcaccccggccctgcgttcctgtatagcgtcctctgcatgtcttcgttgtatgtcctttcatacattatagtcactgctgagatatttctgactgctatcacaatctctttgagttcagggactgcatattttatctctatccccagaatctagcataacccctagcaaagtaggaattcaaaaatcacagaatgaatagtacataggtgatttataaaaatagaaccatcccacatagtaccactttgtaacccacctctttttccctcaatatattagaaaataaagtcctgtaaatatttttagtggctgcatagtattccattatgaggctggatcatacccaatttttaatatgagcatacctcagagacactgcaggttcagttccagaccactgcaataaataaagcatatcacaatataggtagtcacataaattttttctcagtgcatataaaagttatatttacactatactgatagtctaatagatgtgcaatagtatatctttaaaaaatgtatgtaccttagttaaaatatgactggaaaatgctaacaatcatccgagccttcagtgggtcataatcttctcactatggagtgtcttgccttgatattgatggttgctgactgataaaggtgatgattgctgaaggctggggtggctgtggcaatttcttaaaac

SEQ ID NO: 116264 - DNA, 1019 bp, Homo sapiens
taaaggagatccactaaatgtcaggatgtccatcatatctatgcacatagataagtcctcaatgtcatctgtgagttcttggaaactgtgactttaagtgaaacaatgtagagcaaaaccaattttaccataggctactggatgtacacaagagttaagttcctagggcatattgctggtcacaaaaacatcaccaaacttctaaatgaaggccaaaaacacttctaatagaaaacactgaagtaaatatgagctatacatacatttaagaagaataatgtgcatgtctttgggatgtggaaggaaactggaatacctggagaaaccccatgcagacatgggaaaagcatgcagactccacacagacggtggccctggccaggaattgattatttttctcatcaacgttagaagaaaacgatgttattcaaggacatgttgtatataaatacatgaaaatatatgtatattcccaaaatatacttaggctttctttgtgattttataggtaaacagaatctggtgattatgggtaagaagacctggttctccattcctgagaagaatcgacctttaaagggtagaattaatttagttctcagcagagaactcaagtaagtaccttaacataaattcaccacaagaaaatcatgtctcatagtggagatcagtatatgataaaatgaaattgtataaaaggagctattgatgaagctgcttaatatcacaaaggtgattatagaaaattaataagcagttatttatactacatgacaataacttattctactacctgagtaattgatttcatcaccttgaaaagttacattaaacattaaatagctcactgtggtatcagatttgcaagttatcttgaaccatcattcagtaggcccaaatataaattatacagtgtaatcaataacctgtagtttcacataaagtcaaaacaactattttttgggacttgctaaaattaagtgatgatcccctttctggacccaaccctaaatgcaata

SEQ ID NO: 116265 - DNA, 1409 bp, Homo sapiens
cctcgcctgcacaaatggggacgaggggggcggggcggccacaatttcgcgccaaacttgaccgcgcgttctgctgtaacgagcgggctcggaggtcctcccgctgctgtcatggttggttcgctaaactgcatcgtcgctgtgtcccagaacatgggcatcggcaagaacggggacctgccctggccaccgctcaggtatctgccgggccggggcgatgggacccaaacgggcgcaggctgcccacggtcggggtggccgactcccggcgagaggatggggccagacttgcggtctgcgctggcaggaagggtgggcccgactggattccccttttctgctgcgcgggaggcccagttgctgatttctgcccggattctgctgcccggtgaggtctttgccctgcggcgccctcgcccagggcaaagtcccagccctggagaaaacacctcacccctacccacagcgctccgtttgtcaggtgccttagagctcgagcccaagggataatgtttcgagtaacgctgtttctctaacttgtaggaatgaattcagatatttccagagaatgaccacaacctcttcagtagaaggtaatgtgggattaagtagggtcttgcttgatgaagtttaccagtgcaaatgttagttaaatggaaagttttccgtgttaatctgggaccttttctcttattatggatctgtatgatctgtatgcagttcccaaggttcatttaccattattaaaaaatttttgtcttagaaattttatgtatgtcaacgcacgagcaaattatcaggcatggggcagaattggcagctgggtggaggcttcggtggaggtgagcactccgaaaggaaaacagagtaggcctttggaacagctgctggaagagataaggcctgaacaagggcagtggagaagagagggtaaaaattttttaaggttacatgaccctggattttggagatctcgaatttaaaggtgatgcaccagggatgaacgctcagattttcagtttgaaagctggcgtgacatgtaaaggagtggagaataatgtaccattgtaatgatgaggcgcctctaggacatctaggataatttcaggcgtggggatctaggtgaattgaactgttggagggaagggaataaccaaggaaaagaatgtgggggttgagagatgccccgtttaaaacctaagagacctggatatttatggttgtaagaggaggcatggcagaggaaatggaaacagtaagaaaggagcagatgctgcatctctttaatgggacagatacaaggcatttgggtttgacacttaggtcactggtagagatgatgacaagagcccgtagctaaagaattgataaaagccagtctcaaaaatcccaatatagtctggtaatgt

SEQ ID NO: 116266 - DNA, 1069 bp, Homo sapiens
caggaacaaatatgtagttgtcatcccctaggcgaaggagagaaactgtctaggttaaacggtaaattcagacctgaccacggtaaaggctgatgtttttctgcccttctgtgagggactaatagagttcagagaaggggtgaggttggggagcgagagtgttagaattagagttccatggcttcagtgggcaatatctaagccatggtgctttctagaggaaatcagggaatcacatggtgcttcatggttctatatttctatcagtcgtgcatcattaattagttagccagcctggggtttctctttttactttttcaatgatttctctgtccggatgggttcatcatttctgcatactctgtagtgtcttctaaatgtcagtcatttgcacatgccatgtagcaaattcttactcttttacagtctcatgatctctgtattggatagtctttgtgtagggaaagctctaaggatgtagaagacctgtcatatttttctgagtcttttatagatacagatgttgatactgaagttaggtcactggaactgcccaaaatacattaaaccataggcttctatacagggaacatttttttaaactttttattgacatagtacacatttagattaagtgtacaaatcctaaatgtataccttgattaatttttaataaagtgaaccaacatcacatagggaatcttaaaatataaatttattgatattttcttttttcattttttagattgcagcccgagagctcaatatttattgccatttagatcacaactttatgacagcaagtatacctactcacagactgtttgttcatgtacgccgcctggtggcaaaaggatataaggtcagctttggctttaacttgtggggaaaggaaattgggattctcctccagagagtgcaaacgtgttttgtaaggtggtaggtaggcttcaattggtttagaattttgcattttacagaactgaaagtgtttcataattattagtattatgtatttatgagtttttaacatattgttagatatttagggtaaatttttaaactctat

SEQ ID NO: 116267 - DNA, 1363 bp, Homo sapiens
ttgatagcaatatttcttatttttgttgaaggtgggagttgtgaagcaaactgaaactgcagcattaaaggccattggagacaacagaagttcactcttttcccggaaattgactgccctttatacaaaatctacacttattggagaagatatcctttttggacgggagtttttctcttaaatgatacaagggctttgttggcaggttttgtttgtttgtttgtttgttttttagttgctctttgggaactttttagatgagctgagaggcattaaggtgaacccttgattaggtgtgctattcaagagggaagtagtggctggaaacaagcatcttttcacatgtcatagtagaaggcaagttcatcatacttcaagagcaagaaaaaaagcaaccctaataaaagacgatgtcaggttagtatctgatttgaaattatatcttccttagcccatttgtgggaagtagttaggtgcttagggcctacaagctcctcagggtctttccaaagtgagacctaaaaagtaacttattgaagccaggcgctgtggctcatgcctttaatcccagcactttgggagactgaagtgggcagattgcttgagcccaggagtttgagaccagcctggacaacatggcaaaaccccatctccacaaaaatacaaaaaattagctgggcatgttggcacttgcccgtagtcccagctacttgggtggctgaggtgggacaatcacgtcagcctaggaagtagaggctgcagtgagccgtgatcatgccactgcattccagcctgggtgacaggagtgagaccctgtctcaaacaaacaaacaaacaaacaaaccaaaaattcaaaatgtgaaaagagaactggctgaagtcagaattaagacagagttaaatgcctataaaatatagtggtagcccgtcttcattaattgttaactttataaaaattttattacttttgaaaatgggctgtgggtgaagttttctcacttggtaagaattttcaatgtgcataatgattgcccctaaatttacggtcatttataaatgcagtgtgttatttgatgccaaataatttcaaaagcaaaattgtcagtttcaaaagccaaataattatatgtaaaattagaccagggtgcatttaaaaaaaattactatgggggtggaatcagttctctgataatggaagaatggagagataagaaggccttaaatgatactgtgtgaaagtattatttctgttatggtttattacagatctgcttatttctcagctcatctaattctaaggactgttttgttccatgaatactataaatagggaacagctatcactcaaaatgggctccaaact

SEQ ID NO: 116268 - DNA, 1875 bp, Homo sapiens
gtaagatactggttatctgtctttatgctctttatatcttaggaaagataaggcatgcaactatgatccaaataaatcagaagaatgaatactgggcagaagatttttgcaaagggcagaagtactgtgtgaaatgaaccatcattttattatttttttctttatttttatttttttattttgtagagacagcatcttgctttgttgcccagggtggtctctcaaactcctagccttaagtaatcctaccaccttggcctcctaaagtgctgggattacaggtgtgagccactgcgcctggctgtgaaccattattttaaaggagaaaatagttaatattattggaaatttagcatattaggatttagaatttagcatataattatttttctttaattattattaaatgtgaatcccctaatcaagctggatgatgctgtaaatgttgatgagataatgactgatacttctaccagctatcttctgtgcatctctgaaaataaggaaaatgttagggacaaaaaaaagggcaacatttttattggcattgtggtaagtactttgcaggtgaggaacaaatgttagatgttcatggtatctctaaatatgatctatcatgtatggtttataataaggatatctgatgaagtgtaccttcagataattatacaagaaaaacatttttctcacaatattatatgttaaatcgctagttacaattttctcatggctacttggtacttgtagcagtccattctcacgttgctataaagaaccacttgagactgggtaatttataaagaaaagaggtttaattggctcatggttccacaggctgtacaggaagcatggctgaggaggcctcaggaaacttacaatcatggcgaaaggcgaaggggaagcagtgacatcttcacaagcacaaggctagcaggagagagagtgaagggggaagtgctacacacttttaaacaaccagatattgtgagaactgtcatgagaacagcaaggaggaaatctggcctcacaatctaatcacctcccaccaggtctccccctcagcattggggattacaattcaacatgaggtttgggtggggacacagccaaaccatatcaatactctatgctatggagagatccagatggtcttggtccatgtgccctgagattttaaggttgaagatagacacaatggcagacatatgtgtggacaatgtacagatagcagaataaaacactaagccaacacaagcatggtggcaaagtgttctataaatttcctctagggatttgaaattaaacatgaatgactatggtattatatctagatttggaggaggggatagttaaagagaaatgataattggctgatataaaataccatactaaattaatattaggattatttacagtcagttttctagataaatgtaatttgtgaattatagttttatttatttatttctttgagacggagtttcacccttgtcacccaggctggagtgcaatggcgtgatcttggctcactgcaacctctgcctcctaggttcaagcaattctcctgcctcagcctcccgagtagctgggactacagtcacccaccatcataccaggctaatttttgtatttttagtagaaatggggtttcaccacgttggacaggctggtcttgaactcctgacctcaggtgatcagcccacctcggcctcccaaaatgttaggattacaggcgtgagccaccacgcctggccaactcatagttttattgattttctggcagtttatgaataaatttgctcatttacagacttacgtggactctgctaaaggtcttagactttttaaggcccttcagaacaatcagacacccct

SEQ ID NO: 116269 - DNA, 1104 bp, Homo sapiens
atctacagtttattcattcctgttgatggacatgtgcattctttctagtttacagttgtacagagaatgctgctgtaaatatttttgtatgtcttgtatcgtatacaaatgcctgagtttctccagagtatatccttgggggaggaattgctgaattatagggtgtggatacttcaacattcctagataatgccttgctgttgtcagaagtggctttccatcagtagtatatgaacatagggattggtgatttttcctctttttagctaatgcagcctgtaactagcccccatggctttcataagcatccgtagtggctaacagtgtggattggggagtagtcagatttcctgggtttgaatcttgactctactccattgtcactctgggaccttggctagaaacttcctatcacttctccaaaccatgatcttttccagtttatctttgctattattggcttaggatgttagggagcaggttcaagttggcatgattattctactggatagactgtctacttgggcttcattcagagtttgataaagtatacattttatgtgttactttgatgtatgaagtagtaatttactacagtactggtggtctggttactaggaccatgtcacttgttactttgagtgataactactatttgtacagtgctttatagtttacaaataattcctgtttattttataatttgatccttacaataaccttatgagagaagtaggctggtttggttccatttacagaggaagaaactgaggcctggcagtgtttggtaacttgccatagtcactccgttaggtatattaactccaggccttgtattcagggcggctctcggaaatctgatttatagtatcatttagatatctgtgagtctgactcttcgtgtaagagtcctgaaaagcagacaggtttctaacactttagaaatagagtacatacatactcctgagtgtatcatctttactttttccatgtttatgctgtgttatagccataactggggaaatacattttttctgtaacattatatttgtatttgtttttagggagtgcagcctgccacaggcgaggttgtgtttgatagtt

SEQ ID NO: 116270 - DNA, 1116 bp, Homo sapiens
tagttccaaaactgatacttattaaagttgctaaaaatagtttttacttacaaaaattatatttccactgtagtagtggaaatttaaaaaaaaaagtaaaacaacaaagctgggcatggtggcacatgcatgtaatctcagccacttgggaggctgaggaggaaggattgcttgagccccggaatctgagaccagcctgggcaactaaggtgagatctcatatctaaaaaacaaatagaagaaacaccacctacccctactatcaccttaatgtagaactttagaaggcagtctttttgaagaggtttctgatatttaatgatattatttgataattatggggtttatgatatttaattattggtaatcttcagtttctagagataatttagagttcacttcttacaaagtttatgtaactttggagatgctttgtctgtgctgcaagtttcaattcatggctgtgtccagtggttttgtttactggatctaagatcagaccacttacgtatgaagcagtgtgctaggcgctgtgcgtacagaggaagaagatgtggttatgatatatgtctggcagagtttacaacctcacatgagagtcagatgtgtgcatacctaactggacttaaaggcatgatgtattaagtgctaaacgtgaaggtgccttgttggaaagactccgtactgccacctggagtgtggtgggaaagagaccagaaaggtgtgctggggcttcagcgaagtagactgtatattgacgaatttggactttggactaggcagagaagcccatgaggattttcatgtagtaggtagacaaatcatttagaaaatcgaggccaggcacggtggctcacgcctgtaatcctagcactttgggaggctgaggcgggtggatcacctgaggtcagcagttcaagacagcttggccaaaaccccgtttctactaaaaaaaaaaaatacaaaaattagctgggtgtggtggcagacacctgtattcccagctaccccggaggctgaggcaggataatcgcttgaacttgggaagcagaggttgcaatgagccaagatcacaccacttcactccagcctgggcgaaagagcaagactcttatc

SEQ ID NO: 116271 - DNA, 1052 bp, Homo sapiens
ttagaacaaatattagagatgatagtaatctaaaattattactcctaaataatgatacactatcaatttttcttagattatttatttttatttatgtaaagtatgtttgtaagatttcagcctgtgtcttagggaatcagtcttactatcttgttacactttcttttgttgtaaaaatgtagagaaagaaacaaatggaaagcaatagtctcgagccctttatcaattgcagttaaggttgctttagcttagaaatgttgtatgtttatagaaatggttgagaggaaagctttagaaagcgataaacaaataatatttactagttctcaaggaaactgacttttcaggtgaatcaggtgaacatcacaaatgacactcaattttgcgttcaaagaaatgagagcttcctgagcactggcatagccaaggaaggctgtatgaaggaggtggggtaggctggtacatttgcagaatagaaggctttgagttggtaatggggaggggggaagggtatgttgtgtgtgtatggaaatgatatgaggtctgaggcacacaggctggaaatattagagaagtgtgaagacagaagggagatttctctgattagagggaactttcatgttgagaattgagaaagaaagggtgaaggcctatgaaatccagcaaactggtatggattcctgtagaaggcagtaaggtttctgggaaaaggaatggcatgatagaagggaagagatgagtgtactgcctagatgggacagttgaattttaaaaataaatatttccctaaaggaaaaagcggatacagagaaaagaatcagatcaaggagcttagagaatgccaatagttgggaataggagcaagaatacaaacagaaggggaggaattaaagagctaggtggagaaccaggacaaggtagggatgtgtagttataatttgtcacacgtggtataaccaatgatgtgagctaattttttacattattgactctgttatagtttactgaaactgtatgacattcagaaagatacttggttaaaaactagcctt

SEQ ID NO: 116272 - DNA, 1047 bp, Homo sapiens
atctaagcatacaaaaatttataggaaaattttgccagctctccatcagagtgctgtcatgatgattagttcatatttccttcttacgaagcttgccctttcttgtttatcacccacagaaaagcatcaaagttaaaaattaaaagtatttgaaggaacctccataccaagtggattcagagagcccagaggtcagaaatcgtgcagagtcttatgttgacagaggaatggccctgccataagaaaggtgcctgagttatacaaggtgttggcagctggagccaagttacacctggtttacttacctgatataattttaagtgcttcacaaataacgttttttaccttcatagttaaatatttacttaaggtatattaaaaacatataatcagtgaatcaaacctgtgatttcataaatgtgttgcaaagaaagattcttaagttggtatttgagttaaaaatgtgagttaacttaacaagaactatcaggttatagtagtgatgtccttacaaatatgtcagtattattgaaggtaaaggggaatgactgaagttaaggaaacatgttggagcaattgtaaaggcaatgtgtgtcacattttctgccacttgtcatttagattgtgtaagctaaatctagtataagtgggaccattgtttgaatgaaaaaaaatccaaacttgagatgtagagaaatatagatgaatttgaagcccagaaaggacatttaagctctcttaagatgagttactccattttttatagtagctcacctttttaaaggtattttatcctgctgtcaagtttattttattaaattggataccaggaaattctaattgatttttttatatcaaacaaatcgatgttatttatttatttttgagacggggtctcactcttcctcaggctggagtatggtggcaccatcgtggttcactgtagccttgaccccccaggctcaagcaatcctcccacctcaacctcctgagtagctgggactgcaggtgtgctcaaccacacccagctaattttttttgtagaga

SEQ ID NO: 116273 - DNA, 1079 bp, Homo sapiens
gagatctccccactgcactccagtctgggcgacagaacaaatcaattctggtagtagagatggtagtgactaaatggaagaaataaatctcatatgctgtaggaaaatgtttgccactgggaaaccatttaaagaggaagtgttattagtattaaaaaatctgtcattttgaaatttctttttaaaaattacattaatttcttccctggtggtaatgccattgtattttcagtaggttttttttttagtcctgatactttttgtatatctagctagcaattttaatggatgtgcttaactcatgaaaatccagattttaaaacatgataagttaataggtgatagttattttataagaacatttgccatgagtttatttaaagaatgagagcttctttgtgcattttcatcaagtgcattctcctcaggaatatatctccttgaaaagaaaaaatggggtgtatttgcagtaggtttattgatagtcgaataggaagaaacagcatttgagaagtgtggagaaaagatcttcctgattactacagagacctcctaaagtggggccagactgcttgaacagaaagtttggaagcaattgtgtgaggtgtgctgcatttgttttactaattcgacttgatttttgtaaatacacctgttcatttgggtttgaggatttaattgcataaagactctttatttagctaaagcgtcttgtcctcatggcttttcccagaagtttgtgttataaatgttaatatattaaaagtgcttttaaatgatttattattagcatcttaaaaaaatcctacactaaatattaaagtagtctttattatttcaggtgaaggcaaagggaaacagtacgagttgcaaggtagggggtaaatggaaaggaagaaaaaggaaagacaggagatgaagggaaagattgagtcccatcattcttgaagacacattgttcatggcttcaataaccctggcacagccctctgaagaaagtgtagttatcctcttctttctgcaaggaggcagagatgctgtgaacctctcttgaagttacaggatcacttaggtagtaa

SEQ ID NO: 116274 - DNA, 1028 bp, Homo sapiens
atcttttataatgggccaggaagcacgtgtctgtggtttctgcatagggcgtgttctgtggtgcccagccagctgtagtatgtcctgcgagatttggcctgcaggccacaatggtgggcttctgggaggaagaatcttccttagaagtcctgccctttgacactccttctgctgaagtgtcctgatctcagtggggctccctgattttctgttccggggtctatcagcactgggtctatcagtgctacccacgccgccgtgactgtgggtcactgagggtgacctgcgtgggtcccatgggctcagcctggccttcccaggtcctacaaggtcctccttactgtccgtccctgctcagtcaccaaagaatgacttttttgaaagtacaattccagagttaaatactggctaagtgtagaaaacaatactggaattcagtcttcacctccaccagtcctcatggtgagatgaagtgtttatgggtttctttgttgtaacctcaaaagtggaatgcatttcctggttggtgctgcttgccctccaggtgcttagtgagtgaagcttcatcttccagatttctctttgtggcttagggtatctgtatgattttcctgcttttgttttcagaggtgctaggctgtgctgatctctctggagtgattatggtgctttttgcctggtaagcccatccttatgtgtaaaaatcaggatttagatgtgaggcaaataaggtggtggtgattttgttttacagagagattttcactttgcaaacttttagaccttttcaaattctaatttgatttgatgtatttaaataacaagttatgtaaaaacattgaaatgacccattttacagaagtttggtttacaaacccattgtttgtgtaaggtaacatacctgaggccaggagcatgatacctttcctctagtcttgcccttgtccctcgctttgggctccagctacatcagagtaattgccatgctcacaaccccatacagtgagagcacagaataatggtctggg

SEQ ID NO: 116275 - DNA, 1869 bp, Homo sapiens
ttgtcagtcttttaaactttagctattatagttagtgtatggtgtcatgttttatttttaacttgctttttcttgatgactagtgatgttttcatgtgcctattggttattcatttatgtatctcttttgcccattttgagacttggattacttgtattttttagttataagaattctttatacattctgaataaaaatcctttgtcagttataggtattgtgaatatttactcccagtgtatggcctgccttttaattttcctgattatgaccttggaacaacagaaggttttaatttggtgaagtcagatgcattagtgtcttcttttatggttactagtgctttttgtatcttaagaaatctttgcctactccaacatcatgaacattttctcatattttattttagttctatagttttagcttttaattttaatatattaaatagttggatttaactttggggcatcatgatatgaggcagggattgaggttcctttttctttgtacgtttaccagttgtttccacactgtttatagaaaagacttttatatgcattgaattatgttgatgccaaaggcttcattttgtctttgtttttaattaatatttatttatttattttttttagagacagggtctcgctttttcgcccaggctggagtgcattggcacgatcatagctctctgcatccttgaactcctgggcccaagtgatcctctcagccctgcaagtagttggggtacagattttcttgtggagatggagtctcacttatgttgcccaagctggtctcaaactcctggacttgatcaaaggttttgttttgaatttgactttgaaaaatgacctagatttttatgttcttatattagatattttagactttgactttctaggatgtcatttaaaaatgtttttaggtctccctttttcttttttctttttttgagacacagtctctgtcacccaggctggagtgtggtggcaggatcttgattcacttcaacctccgcctcctgggttctagcgattttcctgcctcaccgtctcgaatagctgggattacaggcgcccactaccatgtctggctaatttttgtattttcagtagagacagggtttcaccatgttggccaggctggtctcaaactcctgacttcaactgatctaccctccttggcctcccaaagtgctgggattacaggtgtgagccatggcactggaccctctttttcttttttttcagaagttattgtatttatcacataatagaaataaagggtgggatgggagctctagaaatctaccatttcagcttcttccttagtagacccacattagcgatgaatataaaatagatatgtgtgtgtgtgtgtgtgtgtgtgtgtgtgtgtgtaccctgagctaatggaatttgtggaacatttggtaaagctcataaatattgcacaactggtacaatcttaagtaatcaattctaagtttttagggccgggtgcggtggtggcttacgcctgtaatcccagcactttgggaggccaaggtgggcggatcacgaggtcaggagatcgagaccatcctggctaacatggtgaaactccgtctctactaaaaatacaaaaaattagcctagcgcagtggcgggtgcctgtagtcccagctactccggaggctgaggcaggagaatggtgtgaacccgggaggcggagcttgcagtgagctgagatcacgtgagatcgcgccactgcactccagcctgggcgacagagtgaaactccgtctcaaaaaaagaaaaaaagagtttttaacaacttttgttaatttttcttatgtttaataataattatagataagcttttcttta

SEQ ID NO: 116276 - DNA, 1059 bp, Homo sapiens
gtcccagacctggaattagtcatttctccagtaatccttccctagtttcttttagtaggaaatggtatttttttttttttttctgagacggagtcttactctgtcgccaggctggagtacagtggtgcgatctcggctcagtgcaacccccgcctcccaggttcaagcgattctcctgcctcagccgcctgaatagctgggactacaggcgcgtgccaccacacccagctaatttttatatttttagtagagatggggtttcatcgtgttggccaggaaggtctcaatctcttgacctcgtgatccacccacctcggcctcccaaagtgctgggattacaggcatgagccactgtacccggccaggaaatggtatttctaaaccacattctgtgcaactagggaggctatttattggataggtcaaactatattaagaactcattaaaaaatacttctgattcaaattcagggctaaagagtttttatttaactttttcagtctgacatctatatctccttttccccaccatgtcgacaatcctggttcttatgtaagtactctgattttatcattcaaatatcaggtatttaatttgctttatcccacattactgaatctatgttattaaaattatatattataaaatgccattgcatttaaaggtcttacgtttcttccccatttatttcacagttgtaatatatctgcatcatcagagcatatagccattaggtactataccttctttcttatagcctccattgagagtcttagttctccaaacaaatatgtattacatgctcaccaccaattcttatatccatgtctttctagtcattttggttgtctgaaatttattctgtagtatggttgttcttacaccttagtgtgcatcagaattacctggcaggcttgttaaagcgccgagtactgggcctcactggcaggttctctggctcagtacatgtgggatggggcctgagaatctgtgtttctaacaagtccccaggtggtggtgatgctactggtctggtgaccatactttgggtatagctc

SEQ ID NO: 116277 - DNA, 1014 bp, Homo sapiens
ttactttctttcaatctttcaaatctcctctttcatttctttttgactttgaaaaaaatttccccctttcatttcctgcttcttatctttattatctgtagtattgattcagttgtgtgccttctagactatcgttcattctgagaagttttccttttgtctctaattcctgagttctgcccgttgatttctgagtttttctaaatccaatttgttttcttaataatttttttaacttgttagggttttcatgttttatggagatatctaacatgattctgttgtctgtagagatgttattatgttttttctttttttttcttatcataactttggacaggatttgagttgggtccttttctattactcatttttatgcaaattcattttcccaaacttttagaagaggcatgggttcaaaatagcttttctgacttcacagttctggtagtgttttttaactccaagtattatttataaacagttcatttttaagtgtacagtttacacaactgtaagtgtaagtggtagttttacacaattttgtaaccactatcacagtcgagatgtggaagaatacttttaccctaaaactttccatgtgcttttgcagttggtcccctcccttcacatctggccctaggcaattattaattttccaccagtatattttaccttttacagaatttcaaatacaggatatcttacaatatatattaaaattttttggcttgatttctttcacaaaatatgattttttgaggttcattttgctgcatattgtcaaagtatttgaaaatgtgacagctcattttctcctggctctgttctgtagtacttttgtctttttaacaattaccctgttatccttttctccccattttagattctgttcataggagtttttcctcagggtaagatttgtcctaaaaaagtgctttgcatcactggttttgtgaattcatagggcctagagttctcaagccccttcaggctttactgtggactccttgt

SEQ ID NO: 116278 - DNA, 1059 bp, Homo sapiens
gcccttgactggagtctgggaccttgaatttcgggagagttttcaccatttcgtgatgagagtggctcactgtgccttaactgtttgtgcacacagtgtggtttatgctgatcacctaccttcttggagctggaattttggtacatggtagggagatggtgcctatgggaccagtccggcatagaaaccatgggtgctgagtctctaatgagttccctggtggacagcatttcacacgtgttgttacaattcattgctggggaaatttaagtgcatcctgtgtgactccgcctggagaggattcttggatgcccggttccccctggactttgcctcaggcaccttttcctttgcctgattttgctttgcattctttcactgtagtaagtcatagctgttagtattactctatgtcgagtcctgtgtatataccatgagtcattgaacctggcagtggtcttgtagactcaacatacacctttcccattatttgcctttctaatgggcttattggcaggatttagaaatgcaaagttagtcatgttgtttaattacagatcaattataagtgaatctacaaccctgaagttttgtaatatagtacaatttatattttataaatcaaattaactgccaaaaagttagacaagtgatgaatttatgaactctgaaagctgtacacacagaaatgttttcagcaatagatttcatgtgttatatggtagtttttgtcattgtttccattttaaaatgatatttaaataagttctgtacccttgttgcctttgtctgtcttttttttaagcagggttagagtaatatggagttgatttctctgtccagcttttgacaaagatgtttccctcccactattgagggaaaaaaagcatctattgtatttttggtgtctgaaatattgataaaactattttcccatgttatatataagatttctatgcaggttcacaaagcatgaattctagccagatgttgttggtgagtttcatttcaaagcacatagaatttgtcttcttctacaatggtaaataatttagaatt

SEQ ID NO: 116279 - DNA, 2212 bp, Homo sapiens
agtcatgtaaactcttctctagctctatgaaattacaattctgtctttttggtattccgacagtaccttgtttcagtggttcacttgaggcatgtgcaacattataatagggacagttcacttttagttggagtcagggaacaaaccctgagataattggtagaacaggggatgctttcagaatccgaagcctaaaacaccatcccttagggtatggactgttggatttataggattattataccctgttcatatgagggaggaggcaactgggcagtatttctggacagcccacaaactgccataccaccgtgaaaaattatgtcttacacatctgttgttgacagaagataaaggcagtgagctgagatgcttttaggaaaggctgctagattgtggtttcttgattagtctcatgccaactgttatggcctggatgtttgtgcccttcaaaattcacatgttgaaacctaatgactactgtggatatattaagaaggggccttttactaagtgattaggttatgagggcagatcgtttgtaaatgggattaatgcccttatattaatagaaaagacttaaaggaactgtttgtccctcctccatgtgaagacacacagaaggtgccatctatggggactgagccctcactagacaccaaatctgctggcaccttgattttggacttgacagcctccagaactctgagcaataaacttctgtttacaaactgcccattctgaggtattctgttataacccaaataaacaaagatgccagctaagcaccgttctagagtcgacgtctgattagggcactaacatgttaactagtcacccctaggatggacttagttaaacctaattgtcagaacagcggaagtaaggactcatatctaaacacataggtaactggttagataccaactcagagcccaggctatcagccaaacttccaacttagatctttgaccatgaattcatgtgaactcttgtcagctacatagccaatcactgcctaattgtttcttcctgtaaataatgttttacattttataactgtctggctatttcacagacatttctggagctttgtgattcaaagggaaaaatataaacccaacctggttttccctaggaagatggcagatatttgtagaccctctactgtctgctaagctgtacaggtggtacaaaatgattgccttcagggagcttagatctattaaggagggtagaggcacaacataaattgctgtaattcaagacaaattaagttaactgctaccagagggagagaaagggctgaacacttgctatcctttcagttttggagttgcttcccgctgaaaatcattaacagattatcgttctttggaagctagatcaaacctgtcacagatacattacactaccaaaggacagcattgagttactaggcaacgttcctaatttgaggtaaagtatttctcttttccagggctttggggccttagtcaaaggagtcatctagaagtgaaggaatctctttttgggtactggtttttcgggctctgatattaggttctctaaagttctgggtgagggcttgttttcttaactcgggaaactggatgttacctaaatttcattatagctatgagaagggtggttaggtttatagcacaaacacttatgcctttcttttgttaaataatttagtgacctgctgttattttccttgcctttaaaaataagctctcaagcctgtaagggctgttgacagaaacatctaaggactggctgataaaggatattgaattactgcattagtactgcattgattagtacttcttaacacgaattggaattgtacatacatttattagtcatgctgtagctcattctcaaatctttttgaaatttattgaacttctaattttgttttggatagatactgagacaataaggagagtgtgaatgctttaactcagtttaaggaaataacagtgttttatacccactaaatttggccatggtaatgtgtgttttttttcttttctcttttttttttttttggagacggagtcacactctgtcacccgggctggagtgcagtggcacaatcttggctcactgcaacctccgcctcccgggttcaagcgattctcctgcctcagcctcctgagttgctgggactacaggcgtgcgccactacacccatctaattttt

SEQ ID NO: 116280 - DNA, 1237 bp, Homo sapiens
tccacccaccttggcctcccaaagtggtgggattacaggcgtgagccactgtgcctggccgcatgtgtgttgttaattacagagtaaataacacttgttgcatatgttagaatcttttttttttttttttgccgaggcgtagtctcactctgttgcccaggttggagtgcagtggcgtgatctcagctcactgcaatctccgcctccctggttcaagtgattcttgtgcttcagcctcccgagtacctgggactacaggttcgtgccaccatgcctggctaatttttatgttttttagtagagacgaggttttgccgtgttggccaggctggtttcgaactcctcacctcaggtgatccgcctgcctcagcctcccaaagtgctgggattacaggtgtgagccactgcacctggcctagaatcttgattaaaagtatttatcaagatgatctcatgctaaagaataaggaggacagttttaagtatcttgacatatttttctagctgattacacagcttttcatgaagatgtggctactgtgcttggctaatgataaaagaccatgtttggttctattcctagagcaaaaccaaaacaaaatgttgttaccattacttccctttcctgttcttgttttttttttgttagagtaactatctttgtcttgcatcaatctacttaacagcaccagcgttaatggactacaacagcctgatgaattttcattttgctccttttgtttgattttctatcagaatgctaatttttgccataatgtagctggcatgtttctagttcctgaattagttttttatttctttatgcacttacatctaggctaattatatttgattcttttacaggaattttaaacagctatcaagtaaaatggaatttatgacaattaatggaacaacattaaggaatctggaaatcctacagaatcaggtcaggcaaatacaagggctagttgattataaatcgttttgggaaaaacttctgagtaaggcagcagtctgtttttagaggtacaggtgaaaatatagtgtctttagctgactgcagtattaattgataactgtagctctttttggagaatgaactgtacataatatttctctgggttttttggggggaatgatggagctgccctttttaatgactgaggggcatgcttatcctgacaatttctgtaacatcatttctatatcatgtagttttttggaaaggcatcat

SEQ ID NO: 116281 - DNA, 1030 bp, Homo sapiens
aaggtgtgttactctgggaacatgtctttgtataggacaagcagaggacttaaagctctgagggatcaagggagtagaaagaaaatgtcagtctagtgaactaatctctaactgtgctttattttttatctgtatttttttcagctatctttagagatagttattctgttttagagataagaataactaagtctcagtttttccaaggtcatccagccaagcacataggggaccttttgaaagcatagttttggagttaatgatacttcagcttgagttctgattcccttttgtcactttggagaagttatgaatttgtatatacctcagtttcttcacctgtaaaatgggaattaactacctacctcattgtggtgttgtgaggaccaaatgagacagtatatgtaaaaggattagtgtggttcctcatagcaattttttggtcaagaaggtagccatggtctttagaataccaaaaaattggaagcagtgtaattattagtagggaaagggaaaataaattgtctggttatatattggaatattatacagcagttaaaatgaatgacttaagtctatgtgtatcaacatggataaatctcagaaaagcaatgttataaaagaacacataaatgatatcactaatttaaattttgtcacacacaatatcctgtttaggggttcaaacagaagtggtgttttcttgtcacataggcagtcaagacaataataacttctgggaaatgagaaaagggttagagatacaggtaggctggtgttttacatgtatttgcaatatttaatttttaaaaaattatacagaaaatacacacacatgaattttttataatgtactgctatttgaccttcactaccatcataatcaggtgaaaatgagacccatgcacatctgtctagaaagcccatgttgaacttgagagcatctgttttccagcacatcttgcattagaaagacagaagacagccatcagatgaccaaggcttccagggatggcagggggaaggctgg

SEQ ID NO: 116282 - DNA, 1069 bp, Homo sapiens
atatttctaatttgcttgtctttaattatatatgaagataatcgtatacatacttgctgttctctttctatgagctgcatattcagtttgtttagccattgttctttggattattcatctttttcttgtcaatttgtaagagcctattatgtttgggagaattttgccttgtgtctgttatgccttacagatattatccttcacattttttaacttgtttaacctatttttgctatatggtttatgttattttaaaaatgaaaaaatactaaacaagtattggctttgttttccttgcctaaaattatttcctttatacctttaaaatattacatagtatttaacctcatttagaaaatatcagtgatattttatttcaactaactagttaatagaaaatttaaactttcctcaattctgattctaacttttaaaagtcactaattaaacttcattttcatgtatcttatgctatttcataaaaaatatttctattttcagtgttctacccaagagttcttcttgattgtcaaaactttatatcacctaaagtcagaatttcaagcaataatacctgctgttaattcccacattcagtcagacttgctccggaccgttattttagaaattcctgaactcctcagtccagtggagcattacttaaagatactcaatgaacaagctgccaagtaagtaccagaccctgaattcttccttttcaccagtcagtataattcagtgcatttgccatttatttgtggattcttaatctttactagaataataatagaagttgcatgagtacatatataattagaaatgtgattggaccctaaaagtgttacattacagctggaatacttgctacctaaaatttaggcagtttaccatctaggacagatatagtactcccccacatatcagatgatggaaaggtaaaacacaggcaaagccaagcattagtagtttattaaccccaaaatgagtgtcagatatcttgtactcatttcctatatttccagagatgtctttatatttagaatctgtaaaagcaaagttatcctttaaa

SEQ ID NO: 116283 - DNA, 1030 bp, Homo sapiens
atggaactttttttttttttggaggggatgtagtcttgctctgtcacccaggctggagtgtagtggtatgatctcagctcactgcaacctccgcctccctgattcaagggattcttgtgcctcagcctcccgagtagctgggaccacaggagtacactacaacccccggctaatttttgtatttttagtagagacggggtttcaccctgttggccaggctggtctcaaactcctgacctcaggtgattcacccacttcagcctcccaaagtgctgggattacaggcatgagccactgtgccctgccctttcttatggaacttttaaccaaggagatcattacttttaactctttatcattgattttaaaacatttttcaaaaaggtatcttatttttacacatttattttcttgttttgtaaattattgctttatttttatagcacagggtacacatggaagaaaagttgaggaaccttcaattgtaagattaatttagttgcttttacttcatggtgaatgctatgcctgacatttcttttaagaagctgcaatttcattttctacctcactgagctccacatttctttattcttaatgccttccttggcacataattattataattctttacatctttttttttgtaacccagatcatgaattgatgaaaataaattaatcaaaaacaaatttagagaaccacattgggactctgccttttctccttggttagatactaatctccaggagaggactcatttaaagacaaggtattagggaagtatatacagctgtgaatagtatcttttgtggaatatttattagtactgttatcaataagttgcacaaacatgagatgaaaatggtacatttgcctcagatggtagaagagggaccgtagctggtaatagtgtacagacattctgttttaaggatgaagggaaattttgacataatgtgtgaatgattgttactttattacatatataatatatataatacatatatacaaaaaatataatacaaat

SEQ ID NO: 116284 - DNA, 1058 bp, Homo sapiens
acaacctgctttcaagaagcttccagtttagtgtgagagaaaggtgttgaaactgttattccggatttggaggatgctgtgaaggagaagcacaagggaagctgatccacatgaatatttcatgatgttattgaagcaaaatgaaaatgactgctatatttatgttatatcttaagttcaaatgtcagggtcagatgaaatctgtgatatattcttaatggttgatatctttacatagaagttgttttaaatttatatacaaaacagaagcctcaataatttagttattatattaaaaagtaaagctgtttggtgtaatctccatctctcttaactgttaggaatgcctgctgatcatctgtatgcttacactagctgataaagtgattgcttgttgtagagctattataggtttaagatatcagtttgctcacctttttgttgttgctgctgcttccgtaggaaattcagtgaacattatcactccttgtgtaaagcagtgcatcacctagcaactgttgactgcattttctccctggccaaggtcgctaagcaaggagattactgcaggtaagatatttttcattttcctctttatcagtgctttagataagatgacattattcaattaattatagtgtctttattataaaatattacagttactcaaatgtgttagactcttgggaaagctgaatgtcatacatatgtagcttgatttgaaaattaaattcatttcttgcttcctctgtcactgagtacaatgaaagcagatgttaaagtttatgtgggtgacatttttataaagtttcagcactcttttcatttgttagcttttacttgaacacttttataattataaaagtttgattaggcaagaaaagactgagaagatagggactgaggggcattttagtgatctgttccttttgttaagagcccatattcatcccactattctttattgacctctaaacatcccaacatggaatatttattctctttttcataaaggatgttagcacaaacaaatctaactttaaaattcagatggctgg

SEQ ID NO: 116285 - DNA, 1031 bp, Homo sapiens
cctctgcctcccaggttcaagggattctcctgcctcagccccctgagtagctgagattacaggcgtgtgccaccacgcctggctaattttcatatttttggtagagatggggttttaccatgttggccaggctggtcttgaactcctggcttcaagcaatccacctgccttggccttccaaagtgctggaattatagacgtgagccatagcgcctgtcctgtagtcactttctttgcaaaatgtgagagcatctgggattttattagccagatatatttaagaagaataatttaggaaagtagtatttattggtgttatgagtaagttcagaaatgtggttacacatgaaagttctgagtcaaagaactataggaggtcattggtaggatattatgcttttgaaaaaagaccaatgaatcaccaagaaactgatgaaaagatgttcaatcttagtaatcagtgagtgcaaattaaaacaatgggataacgctgtttacctgttatgttgacaaacattagaaagtttaataataccaactttaagtgagggtatgagaaaacaagttaactttcatatcctgcttgtaggaaagtagattggtatatctactcttgtctattaaaataaaaaataagcatactctgtgacttaggaatcccactttaaaaatttactctagctttgggaaacacttggacttgtacacgtggagatgtgtataggattgttcattgcatcatcgtttataagtaagaatttggatgcaatctaaatgtttaacagtggaaaatgtgtagcagctttgaaaatctgacaagaagtgatcttcagtatactctactgtaagggcctattgaacctaatttcagtttcttaaaggccatctaaagaacaaagacgaagtttactttttttcctttaaaaaggagagtaaaacttactctgtcttacacttaccatgtgggtttattggattgttttataaatgtaagatgcattttgggatctttagtgatcttattttttctg

SEQ ID NO: 116286 - DNA, 1040 bp, Homo sapiens
gactcttgttgtcctcctttactttcccccaaacaaacggagcctgtctctgctgagccacctagagctgagggaggggtgactcaagcacctctgtgaccaccaccactgggactgcactgggtctgacctgaagccagcagaatactgggtcttacccaaggcccgtggtaaccactgtctgactaccatctatgttcactcaaggtcctagggtctacagtcagcaggtggcaaatccagcctgaagggctatcattgtttataccaccatgcctggcaatagtgaatgatactctgggagggaagtaattaatttgaccttaatgatatgtatatgattaggcagccttgttctttgttagccttcaacaatagggatctttttggtcactgtcacaggagtgaagacagaatgacttaccttgtaatgtttgttttctgatacattgggccaaaagacccacaggaatccacccgtcatctccagaaagtgaagtttttatttgaagtttgttctagtgtaacaactttcatcacatttcatgtttcaatagatgccaaagcaaagcactgagtgtgttggtatttctgttgcctgcttcagcagtgtctggctctcaaagttgtagccttgctacctaacctgagaccaaaatagccaagagcgttaaaactggtatgtgggttgggaaacaaacatagtgatcaggcaagccattttagaaggggtggtggaaaaaacttctccatacacttaagtcttcttaatattattttttacttttcaagcatctaaatttcccctaatgcacacaattaaatactgaaatatacattagaatttattcattagaaaatttgagatactctacactttaaattgaacttgtaccgtagaacttttaaatgattaggaatgtatgttttatagttaaaagagattacttagagtaattttttgtcttcactttcaatatgatgccccccccccctacctttttttttttttttttttgagatggagtcttactctattg

SEQ ID NO: 116287 - DNA, 1034 bp, Homo sapiens
atcatttgaacctgggagacggaggttgcagtgagccgagatcacgccactgcactccagcctggtgacagcgagattctgtctcaaaaaacaaaaaagtatttagggtaaaaaacaaggatatactttttgctatgaaatatatcttatggccaggcgtggtggctcatgcctgtaatcccagcactttgggaggccgaggcgggtggatcacctgaggtcaggagttcgagaccagcctggccaacatggtgaaaccccgtctccactaaaagtacaaaaattagccaggtggtggtacacacctgtaatcccagctacttgggaggctgaggcaggagaatcacttgaacccaggaggcaaagttttcagtgagctgagattgggccactgcactccagcctgggtgatggagtaagactccgtctcaaaaaaaaaaaaaaaaaaaaaaaaaaaaatctatctatctatctatctatctatctatctatcttatggtttgaatcataatttgaatggaaatgtctgacccaaattcattcaattatgtgaactttaaaagaaatattaattttttaaaattttgagtacataattatatacaaatacaaattttgagtgacagtttttatagccactgtccatttcctatagaaaatgccatttttctactgcagacattccagttaataaaatgaatagtccatatttgctcaattcatttaagcaattgccgtctacaaagccacatatataacattgttcctgagatttatggatttattgattgaggttttcaaaagcaatgaaaccctctgatggaaaggatatctcgttgtttaggaacgtatgaaagcttttttctacaaatattgagatttcagaaaaatagcttaataagatgagaaatgttttaaatatgtttttgataacaagaattaataaagtcactggtatagttttgcagcgtgccaacctacgttttgttttcctaggtgtgtttccattgtagaaaacctggtcatggaattgc

SEQ ID NO: 116288 - DNA, 1082 bp, Homo sapiens
gtctagatcttgtcctgataatcccaaaggactctatgctgatggtaagtactgttaccctcatatagcagaaatggtgagtcatcgtgcagttgtgatttaatttacactcaatcacagttcttgaataaattcttgaataaattgcaaaaccttgagaattacattatttttatcaagtgctatcatatgtactaggctttttgtgcaatttgacttcagatgttaataaaacaaatcagaaaaaactaaggtgtatatttccaactgtgcttgcttcatcatttgtgagactatgtcatacatttctacttttagacataacagaagcagagagattatatctcaagctaatatgaggtttttaaaatcgtattatatattcagcctcagccagcatatcattttggtggaggggtgggtacagatgattcaatattgtagtaatgtttgcttctgaattttttttcttagttatttgtctggtatgggatcatgtagcttttttctctttaactcgggtaattaaggttcacacagtaaagtctatgcggtctaaagctttaaggcggaggttgttatctgttaatgtgatggctggtgccatcaggctctagacgtttcttgtgtcatgtcctgggtttccctcctggagaagtccagtgaaaaagcatagcttttggagttggtcagacttgggttacagcgccagcactgccactcactagctggggggctttggccaactaccaaactctgatctccgtttcctcacctatagagtggagatgataaaactatattttattgattctaagatgcacagtttttcaattttaatctcttggaaatcagaatgtatcttaccgttggtgggtcccatataattgacagctgtttttctttctgagaggtatgtgcaataatgatacatcttataatcagtggtgtcttagagttgatgaattatggtatttgcctaaagaatttttataaggattaaaatgtattattcaagtgcttctctttcactatggcatataaagaggccagggcctggaaaatgctcaggtgcatttcag

SEQ ID NO: 116289 - DNA, 1176 bp, Homo sapiens
aacacttattttagaaaccacatgtgttgtaattcacaatcctggaatgttgtttaaagtaggcaggtgggcatttttatagggttagggtgcctggccagtggaaggcactgaaacaaaaattaactttatttctttcataaatgcttacccccatctgatctgtacagtagaacagtagtttctaatctgtttttgggccattgactgtttgagaatctgacatgctattcaggaaagtgcatctgcttacatcttttgtttacaggtccaagggttcacagactcttgattgtctaagcattgttaagatccaggcttctgtgcaatagctcttgaacaagtgccttccatcatatctcatttctttttcctacttctcaaggccaggtgcaagaagcagtgggtgggtacaatttagtgctctgtgaggttaaaaggaatggagaatgaattaataggaatagtggcacctccctatgatcctggtctagctacctttacaactgacagggttgtgaggatccagtaagatgtgaaagtgctttgagatgttaaaaaccccttgcaagtatgagatggtattcagtggctttgctctttcaataggtggcggttgcaaactttgtggctctgtggaacatttaaagaaagattgccctgaaagtcagaattcaggtgagatctctgggcctctacttagaaggggtgagattagtattcctctgcgttttattctgcacttgttattaataactcaattgggatactaatgattttaagacaacctgttttcctactgtagcaatgacttaatctctgtcagcaatagacacacatagtattgagtaactgaatagttgggggaaaaaagtgaccagtaagccttaggggaccctgactttataagacacctgattcataagcatttatatttgctaactaatgaatttaatataatagagccaattctgttacttacagaaaaatatgaattcactgagaaaataaaaaatatgaaataactttcaatagccttaatattgagtgtccttatgtatgctttgctttgtatgtacctaaaagattcagagttgattgcagaaactaccaaaaatattaaaaatgtgttatctacacagtatctggcgattttcttcctgatgaaataccagc

SEQ ID NO: 116290 - DNA, 1023 bp, Homo sapiens
catcagttcgtgcattgcaaagtagttgctgcatttccctaattgggatgagaaattgcctgtggtactctgaaatcaagggttataatcaattacagaattgctcactttcctttagtgatggagtcttccctccttgtgattattcatatcaaaatgagttcctttcccaaaccaataacaatctgagtggatgcatttgattactgtttttctaacattctgatttttctattcctttacagagcgaatggtcacagttggtcgctgggcaaagggaatgagtgcagactatgaagaaattttggatgtacctaaaccgcaaaaacccaaaacaaaaatacctaaagttgttaatttttgataacagctagcactatcatgagttactacctcattgttactttctaaaccaggcccgcttcacgagttagagttgagctcccctgtagccaggactatgctgtagatatcagtatgatctgggtgtggccaaaaacaattttctttattctgtctatcaaatagtacttctaccactgtttggagaaaattgaagaaaagaataagatgattaaatgaattctctaaaagaacatattttaagagacagaacttagacataaccaagtagttgtatacctgattgtaacaatcatcttttataaaagcaaaattatgcataaatgtaaaacacccctaaacaaagggaacaaatgaatttttggttatattgttttcttggctcaaagtatcaatttattattataatagaaatttataagttgctagaaagtctatatttttaaagtacggaataaaaatatgttttctattaagcaatagaaatatttttgtgtataatttttctgaatacttgattctcgattgaaatatccattgttcgttaatatccatgtaacaatcccattggaaacaagattttttttgaatcctagatgagaataaacagggatttggtttttgttttagttttgacataaaggattccaagttactgaa

SEQ ID NO: 116291 - DNA, 1312 bp, Homo sapiens
gagggaggcagagggactgggtaatgatgagcctctgggtgcagggagaggataggacttgatgctttccaggggaaatatttaaaatttcagtactaagttaagtctgtatcattttactttttttatagtttcttattttatgttgtatgagatgaaaagcttgcacataaaagatgataagaaattagaattcatcgtttctgttgtaccaagaagaaccttagtgatctctaaaagaattgttgttaaaatatggattcttctttccttctagtactcccctagcatgacaatgagcgtgtgatccattaccaagtctcctcatgaaaaccacagtgagtcagcccttcacagaactactacggaagaaaattattcatcacagtgtacagttaaacaaaggaatctcagtcacaccaaaccaacctttttatttcctgctctctcccctcttttgtgaagaaagcgggtccaaatgtgattcaaacaactgtacggagtggcatattagaattgccctaaactgaactgcaaataattatgtgtgtatgtatatgtgtgggaaagagaatgtactgtatatgtgtatgttatacagacatatacacatacatacattgacccacaggacattgtaaaatattatcacatgacatcttaagtagaaataagtagggacttttattccatcctttttttcacgtttacattttaattattacaagttgctcctgccccctccctgaactattttgtgctgtgtatatcactgctttatataagttattttttaaggtgaactcagatgttatggttttgtaaatgtctgcaatcatggataggaataaaatcgcttatttgagagctttcattaaattgcgtctgatgcaagttatcctgtgaatcacaaagtgtactgtctcaaaaaatagaagaaaatgtgtcttcgtctttatgttgaatcaaacaatttctcagttaccttcagtgaaaagtatttttttaatttttatttgagaaaaacacttcaaatcagtaaaagcttaactggggcctcacacagtatatttctgcaataactgctttaaacggagttcttgatttgtttgtcttagatgatacagaaatcattaaatagcccaaatcatttagaccatagcaataaagtgaccggggttgtcatatatttagcaacatcttttctctttaacatgatgaagcccaaaagtgataacaaaagcatttgcttgaatttgtcacttctcaccaggagtactagaggtaaatttttaataacatactaatgtga

SEQ ID NO: 116292 - DNA, 1178 bp, Homo sapiens
atcttgctaaccacttattttctttttatttattcttgcctctaaacttttaaataccaaagtatagttctgtttagccgcaggctctggatagttgaagcatgctgtcattgtttataatgtgagacgtggaatcacattatgtgcatggaatcaattgagtaaacatattaaatggtatcatgtttgtgatgatgaaatggtgggttgaaatgtgatgtgatgaaatggtactctgttcccctctgacacagggtcagggatcagttccatgtcatcagcatttgtctatgactggaggttttgctttgctttgcttttctgctgctatgatcaaggggagaggttgtctaaactgaatctcctttcttgtttctggcagtttccctctatttttttttctcctatgacctgtctaaaagtctccccttcttatcaccatatactcactataatcctacatacaggatcagttcaagtatgtaatttcactttcctgtactgaaactctgtaggctgtgaagtgattaacaagtattaatagattttccttgatgtaatgcatgtttataggattaaacaatcctcttcctatggtccagtgacccttttccaggcctaatcacccacctttcctcaggaacagtgcatgtttttggtttgagccctaatgacatctggcccagacatgtgccagctgagccattgcccctctgtgctcttccctggggagtcctgctttcacactataatccatccatacatcagtacacacctatatgtctttctgatttctgcagccggtctcagcttgtctataattcacttcattttattctctttctgccaactttctgaaaagttcgtgctcgcctacccaggattatcacagcttctggttaggttcctggaacctgggaccaatccctttgactttatctgcctttttctaggaggcacaattgttattagcatgttgaaaggaattgccttttaccctggtcctcataggtttccaataaaacgtttaaaaaatttcagggtccacatttacattttaatttagaaactgtcttcatccaaagagtaaattaccatgtgggattagatgcttctccccacagctcagatagtctagagctgtgctgttcaaaatggtaaccactagctacatgtgg

SEQ ID NO: 116293 - DNA, 1074 bp, Homo sapiens
ctaacttggtgttcgattagattgctaataacagtcattttatcttccaaggaaagttccaaagtaaatctactcttaaactaatgataggaaaatattctaaagcagttttcttttgagcctccttttcctctaagagtacataataaattctcaagtcctaaggtgtctcttgttcttaagtacagttgttagctatctttcttttttccttaaagttcatgtaaaaatggttgaaatagtgttatctgtatactgcatgtagaattaaaaggaaatgtttattaaaacagtgacctttcaaagtttggttagtgaaatgactaagggagttattgttccatcttgccttatcagtgggtaggatctcttcatcatgcccctgctgggaatgttttaaactctccagtgttttaggaactctataagctgagggtgggaaattgaataaatattgattctgaagctaagaaaatagttgtggtaggttattgggggtttttttatttttttttaaattttcatttgggaaggcattagtacttgtcaaagtgcaaagaatgaaatagaatacatggtagaagtctaagattaaaattagaagtatgctttgtccttagggatgctgtttcaatattcgaaacagtacagtgcaagagggaaattaaaattttcaacaatgccttgttttctaaatcttgtttacagaattctcccaataatatgagcctgagtaatcaaccgggcactccaagggatgatggcgaaatggggggaaatttcttaaatccttttcagagtgagagtgtaagtattcccttgactatattatactcaaattttatttctgaagctcttctgctagaataaatgcataaagccacttttactgctgtttatctagagttcaacaggtttatcttttagataagagaaactttaagtggaatatctttgaaaataatttttaaaacaaactttttcttttttattctgtgtacatagttagaaaaaccataataatagttttctcattgagaacctccactgtaaaggaacaaactggaaacaggt

SEQ ID NO: 116294 - DNA, 1060 bp, Homo sapiens
tttggttttcaatagaaaatttgtcagtatcatagaggaaaatgcttatcttctaatttgcactggaatgtatatactttctgagtatatctgaagaagaaaaatttggagataaatgatgattaagctaaacatctatatgtggaacatagagaaaacaatatgagagaggtgaacagtccagttagagaatccacaaggctgaaaaacatcaagtaaaagatctccatagcttgaaagtaaaaataagttgtggcagtgtcttgtaatgttaaatatattgtaaaattgagataagccattgttttcagtatgattacagtgattttcttcatttttaaaatagtttccaatgggtcctgggtcagatggtcccatgggtggattaggaggaatggagtcacatcacatgaatggctctttaggtaaggcttttcaatttgatgtttagaataaattcataacaaaaccttaattctacctagtgcatattacagtttccaaagttcttccatagccagctactcatttttaaatacttcaacttttacctcatacagatagtttaattgacattttattggttataactgtagatcacttgaagatcagaagtgtgagaattgttctagttcatattcacagttatttactttaacctatagaaatctcatgtcttaccataaaaggagacattgctgctgtgggcacgtgtcatgcttgcccaacccagaaggctgcagtattcttgcagctgtttgttgttgttgttattgttgttgttgttgttttgtctctagagttctgtggacacagtctcagaagaatctcagttctctccaagaatttcttaattttgtttttggatttttatgtttgcctcctttttaacataaaattgttaatcatattctggataatttgaatgattctcttttaagagaacactgcctacattgtcttcgtgataaagaccatttcaagtgactgatggttgaaaacatactttataggccaggcgccatggctcacatttgtaatcccagcactttgggaggcc

SEQ ID NO: 116295 - DNA, 1044 bp, Homo sapiens
tctgttttttcttatgcaatgccttatttttactgaaattttgtataattatttagggtcctccaggaggtggagggccaccaggaacacccatcatgcctagtccagcaggtattgtaatcaaactagccacatgggcatttgattattagaataaaatcacagaatatagaaattgttcatgaaataaagttagtagtattcatgttctcacgatagttaaaggagtagaggcagcatggtaggaagaaatatagtgttcttaaataagtattatccagttaagcatttagaaaattcctatggtgtgggtgtcagatttaattaggatgaacactgttgatctatatgaattgcccaaaaatgtgtctaacttaaagatttattgagactgataaaactaaccaaatcttctacaatttagaaaatttctgaataaataaaacattaaatacatggattcattaggtttaaaatgccaaatcagactcaccacatctattatcttactaagatgaatgaaggatgaagaagtacttacagtattatttaccctacatgtctataagtatttattagtcagcttataaattcactatgtaataataaaagttttttatcttctaaactaaaacatacttcaatgttttcataatccttttatataattactttaaatagttttatcatttatttttgagactttcacacagactattaaatgtgtcttggggttgttaacagtggaagactaaattggcgcacccttcttagaaaatgctatgataaaatgtgtcaagagccatgaaaaggttcataccatgtgactctatacttctaatactagaaatgacagagatacaacccaagatttatgtagaaggatgctcatttgttatactcaagagtaaaacagtagacacaaactcatgcctaattcaattttagtggaattagtaaattaatgtttaaggtgtaggttagaatataatagagccattataattattatcaaagaatttgtaatgacatggaaaaataaaa

SEQ ID NO: 116296 - DNA, 1577 bp, Homo sapiens
agaaaagagcttggtgaagagcttgatttgaagagaaaaagggagtttgttacccatatctgatcctcacaaattaatagtctttggagactcgtattaacaaactttttttgcatagcttagaaattgtatgtgtaaatactactaatttgaaaaattctggtttcccatttttagatacacaaatatatatatttctacttacagaataagtaattagtatcatgcaatatgcacaacttacctgaaaccaatatatcttaaagcagttattctgtctaaaatcctcttgactaaaatctgccttcttttgtgtaaatccaagttattattattcagttttccagtacttaaacagatacaaatttttttatcctttactatactttgtgatacattttaaaacttgacaaaaaatcatgaaataaattcattttaggtcagtgtccatattgctacatgaatcaaaaatttttttgtcctattcgtgttccagataccatactcctcagcatctcctgggaattatgtagtaagtacatttgggtttgtttgcttataagaattgatgttacattttatttgggcaatgaaacagttgtccagatgttaagaagagcccctgtgtattggccaagaagtgaacatcttgagttgtttcatctgccaacctcagtacatatgttgatgttcattagtgaaacagttatcaatctggccagaattgccctgagtactgtgttttacttcagcatatgtttctgaaaaccagtacaatacactctgtccaatcatgaagagagtaatccccagttacacagtaatatgcttgaatttgcggttctccaggagaataatctacaccccagtccaaccctatgcaccacacatagcgtctaagaagacattaaactttctcccaatcacaaatgaattagatggcagaataatgactaataatttagaggaatcatttcattttttggttgttctttgaaattgagaacacttatttttatcattattactatttagtacacattagaattttccaaaaattcatgtcaatgtgaagtcaaattaataagttttatatgacctcctgagcttacaagtgaccttttaatcatcatcatcacattatgatcctagctacatctcaaagtcaacacagaggaaaatacgttacaccatttagagggaaacacctaacagagaaacaaggataaaatggtaacaagggaaatctttcccacagaaatgttcagaggtggtggctagctggaggggaaaaaaagaacgcataagaagaaaatcagtgagcatttcactctccatggaaatagtattttattaacatagtgaaaagcacacactgctttggacctgtgaacttagtgttcagtgttcatgtaagctataaaactaagcaagtctttctttgcattttctatgaaataaaaatgaaagtaagaaaatttatataaaacctattttttcttaaagccactaatgaataaggctgatatatcattttatgaaattatagacatttatttaaaataaattttaagttg

SEQ ID NO: 116297 - DNA, 1126 bp, Homo sapiens
gcaagttccaaatatctaaaggctaattagattgtatcttaaagttgcttaagaatgatgataggcaatatagagtgacagaagaacatgagccaagtgctaaagacagagagagatgaaattggtcctaggagccgatagataaattggtggtttggaaagggcagactcacatttaaataaagagaagtaggcccagcacagcagctcacgcctataatcctgacactttgggaggtcaagacagatggatcgcttggctcaggagtttgagaccagcgtgggcaacatagaaaaactccatctctacaaaaaattaaaaattagccagtggagcacaccttagtcccagctacttgtggggccaaggtaggaggattgcttgagcccaggaggtcgagactgcagtgagccttgtttgtcccattgcactccagcctgggtgacaaaaaaagaccttgtcccctccaagaaaatgagaagcggaggatggatggtaggtagatcatgaactgaaagggacccaagagagcaaagttgtattcattcactaaatgaagtaaatgtttgctgccataaaaaaatctcagtactcagcagaattaattctaatccctagtgatgctgggcactctagcagtggccatctgcagtgctgaattactcataggcagaccaagcagagccttgggacatgtgttgtgtgcgtaaggcaaagcaagaacaccaaataaggagaaaagcttttcaaataacttaatattaaatatttccaaaaaaacaaatatttatcaagaggaaatcataacttggttgtacttccttatacttactttatggtttcatattatttttgtgtttaattatatagcaggtattgggatagatggtttagaatagtacaagcacttatcttttcactactgtaaaggtcctattctggccctggctgtctgacttcgagtagagagtaatctattggtgttcttcagaataagacaaaaatatctcttatggatgtacagcatcttaatacaagttagctagtaagcttgtgtgaaaaaagaaaatatttggatttaactttccctattaatatacatactcgagggcttacttttaaaca

SEQ ID NO: 116298 - DNA, 1050 bp, Homo sapiens
ggcttgcagatggccataatgctcacatggcagaaggaaagagatcatctctcttgtgcctctttttataggcgtactaatcccattcatgaaggctccaccctcatgacttaattacttctcaaaggtcccacctccaaataccatcacattggagattaggatttcaatatatgaattttatgcagacataaacattcagtccgtagcatacacagatcactagaacatgtagaaatgagaatttatacctataaatgtagtttccgtatgtcagagtactaactatgctacccagtttctcttataaagtaaataagcttaccttatgagtttttcctaattttgaaacttttttaaaagcatagccttgatcttcagtattcatagcactacatgttctatcaaatagggatgatgtaatatgacttttgaggaaagacaacagattgaaatattattttccctgggttttcattgatactcgccatttggtgaagagaacattctatttgtctcagattagtggactgatgtagaaaagaatttttatagaaattgtttctcctattaattacaagactgtgaaccttgaaaaatcctaatcagcgggtagtcatttttatcttccttgttcactgatatatctagccacttagaacagtgcctttgtgggtgtttaataaatatttgatgagcaggacatgatggttcatacctgtaattccagcactttgggaagtcaaggcaggataatcacttgagcccaggagtttgagaccagcctgggcagcagagcgagcacccatctctacaattttattttatttttttttttgagatggagtctcaccctgccacccaggctggaatgcaatggcatggtcttggctcactgcaaccccggcctcccaggttcaagcaattctcctgcctcagcctcccaagtagctgggactacaggcacatgccaccacatctggctaattttttgtattttttactagagatagggtttcactatgttggccaggatggccttgaactgct

SEQ ID NO: 116299 - DNA, 1254 bp, Homo sapiens
aggttacagtgagccaagacagcaccactgcactccagcctgggcaacagagtgagactccatctcaaaaaaaaaaaaagaggggggaaaatagctactaatttaattaagatgtttgaaaataaataaaacctttaaaaggctggagaatgcaaataatttgttaaaaagaagtaaacatgttaatgaaacagaaaaaaagtaaattaatagaccaattcctggcaaagatgatgagaatgctaattcagtttaagagggagaaaataaatcatcatctctgggggcctacaattcagaaagacagtccagggcaggcgggcagactctgctccacgaagtcatccagagattgaaactagcaggtgctctgccattgtataaggcatcctttttttttggtctgcatggcagaaattaaatctctgaaacatttgtgttccagacaataggaggagaaagaaaggagggagcattacaaacaagatcttaagaccaatgttctggaagtgacatgtgtctcttctgctcatattccatcagtaagaacctgatttttggtgagaacacaggggactgagaaatgtaatatagctgggatgccatgtgcctggctggtagaagaaaggaaaaacatatttttgtggtctacttagcagtgtctctcacacctgctacagtggacctttataaattatgtaaaagtagtgtatatatggataaaactaaatatttcagtgacatgaagtgttctgagaaaatgtaaatgaaccaaattgaagaaaagagaagtagaaaatatgaaaagataataattctttccaacattgcctttgtctaaggcagttttactgctttactgctgtgtcttttaactttcaataagtagataaataccatattatagaaacttcttcagagcattataaaaaacaatttgccatcaattccttttgaaaaggtagaataatcctgatgctcaagcttgaaaaatataatacatcaaaggacattctagacccatctcattgagaatagagatgtaaaactcctacataaaatattaccaaatataattcagtagcctattaaatgcatcatgcatgatgatcaagcatgacttatctcagaaatacaatgaagatttaagaaaactatcaatatgtgattacttatatcatgcttcccaaaagaaacactaaataatactactccaaaaatgaaaaggcaaaaagcatattttcttattcctga

SEQ ID NO: 116300 - DNA, 1047 bp, Homo sapiens
tgtcctcaaaattcttttttgaatacctactttttgcaagtttttggcaccataaaattatgattctgtatgtttatacagctttcagtgaatgcatttataacagctactgtgcacctaggtgcaagagattccagtagtaataaggcacagctctttcacttgagaacttcattgactcaaaggagagaaaaacactcaaaagattataatatgtacactatactattctgaatagtttgtgttttctcctataggaaatgaggtatcttcatttgttttaaagttttcacttgaagaagtgatttgaatacatttatgcttatgaaaagataactgttggcagcctaaaagatggatctgagggagaagaaacagaaaaaaaaaacaaatggggttgtgtaacaatcatcaacaagatgatgaaaaaacttgattttgacagtggcagtgggcaaggatggcaaaaataccaaagatatttatccagccttgtcttttcatctgtgtttcagttgtatgtttctcactggtctctaaaatacctctaattgtgtatcaactcaaattcaactaagtaatgaaaataatagccaatatttattgataccttactttgtggtagacattgttctaattgcttcatctatattaactcgtttaatcccccagcaactctataaggcaggtgctattaatatacacattatctgaaggaggaaccattgtagagtttcagtaactgaccagtgtcacacaggatccttattcttcctctgtttttttgaaaaccataatgttacattgtctgaaacccggcttgatcatttctcttaccttctgttctatttgccttcatttctctgtatcgctatctctgtctacttttcttcctaacctggcagtctgcatcattttaaatgctggtttctctgccttcaattttcccttattcctcttctttttactgccagagaaatatcactatcatcatgttattgagttgattaatgtcttggaaagatgtaataattctctatcactcat

SEQ ID NO: 116301 - DNA, 1100 bp, Homo sapiens
gtgacaacatagaagcccaagctaattagaatgtgaagacaatgtggcagggtcaggcaaagatgaggcatcctggaagatgtataaggaaaatgctcaagttgccaaagaagttggagaaatatttttgataatgccactaaggacacatttggtgtctttaatttcttatatttaaccacaatttacatgggctaatatatgagtagtccctgaaaatgactttccataaaaaacaaccaaaatgagttatataaattataaatcacatttaggaacatttgtaaatgttccttatttcctaagatacagatttttattagtttatacagatgttcttagttttgtgacttactgataatgttttatattagtgatttatttttaattagaaaaattaaatttattttgctataaataaagtctgtactttattatagaagtggaggaccttgttttgtaagaaatcacaattatttctttaaacaaggcaaagaaattttatttggtcaaaaataatcagaaattacagaaagcaatattgagtgaagtactgttattaaccagatgaaacttaaagtagttttactgtggtattctactgcaacatctgcacggtggcactacccagatgctcactataaagttcaatggctcctgacaagcattaagttcctttcagtggctgtactatgttaggagtcattgaaacagaagagaaatcagattttaccaaagtttatctcttaagtcaacacatttttatttaaattatcatcatgaatggtatttattatctctataatgaccaaatcagttgttgagagctatcttagtataaaagcttaggatacaaattactggcttgcccataaactgtcatgcaaaacaaacaaaccaaagcaaataacaattctaaacctctttttctatttgtcctttaaatataagtcaaaaaggctagtggtttattagctataactaaaatataatttgtaggaggaatttttatgtaaccattgttaaaaacaaattaattcaatagagaatgagcctcagagcaagaatatatgtggatatacatagtgtttttatgtgaa

SEQ ID NO: 116302 - DNA, 1043 bp, Homo sapiens
aagaataggaaaatttaccttcaggactttctgccagataatattgttgaatattttagtttatttactcttagaatctttattctgggaattaaaaaggtaagcgaatctttcatgtacctcatcaattttatgtatctgaatgttataatctactttagccagttacataaataaaatcaattctatatttaagctaaaaaataaaacatacaaatctggagacctgcctaaacagtggcactttagggaaaatataacggggagttttaggtcattataagttgaacatattgtactacacagtactgtaagaaggaatagttccatggtaatatgtttctgtttgttttgatttcctcttgaacattaccttttaaggagaatgttgactagcttagatgctattagaaggctgcaaaatgcatttttgcccactgcactctcacctcccaatgtcttgctaaagccttcaaaaaataaagaaaagaaagagaaaatgaaaagaaaaaactaaaagagaaaatcagcaaagcacatattcaaaacctacaagctattgtgtcagagtttgatttatggatttatggcagaatctaagtaaatgttgtaatttgaataattggacaactattagggagacaaaaatagtgtcatctaaaagctaagtagaaactgtatgtttgctccacaaaagaaaccaagataattcctctaacctgtcatatataggaattctgaagtatctactgtctagaaatatgtcatgtgataatgaacttatttgccatggagaagaggacaaaaaacagatgtgatagttgtcttcaaaaatcttttagagctataatgtggaagagcagtaggagtaaaagacagaagtttcaggcaggaataattggacttgctacaaagaactgcctatattagaaggactcaaatacagattggaaggttgtattatggacttcactaggggcatgtggaggggtaatgacctaagattaattctgatcttgagaccgagatttccctctggtaat

SEQ ID NO: 116303 - DNA, 1916 bp, Homo sapiens
ggcttgtcctggagatatatgaaacagtgtaaacttgtaagctcttggtgagggaaatggaaggagttggaagaacattttctgggtcttttcaaaatgctaaaggtcccctatgtttccttttatttaatatgaagccagagccgaaaggaatacattaggaagcaactgttttctggatgattacaaggaaatggtgttccacagcaaagtaaaatgccaactaagaatgaatgtaggatatatagtaaactgcaaatagaataaggaaagcagaagcacaaaattagaacgaaagcaaggtcatttgtcctgaaaatcaataaaactcatttctattttcccatataaaaattataatttccacataacttggtaagcaaaaaaaaaagtatagtaaccctatattacataaattattacatctttttttctacatcttttgccctatgtcaagattaaccttcacaatgtgatacaagaacttattgaaaatagtggaagcattcgttattaatagcaatagtagacatagcggctaacattattaagtgcttatgatataccagattgtactaaacacattacatgaatcatcatatttaattctactaaaacctctattggatacacattattactagccacattttatagaataaaaaagctttagaggaattaagtgacttgcccaagatcaggagcttataaatggttcagctgggatttaaaccgaggtagatagagcaaaagcacactcacaaactttaaaaaaaatcataggagcacattataattccataattattcacatagattcatattttcctttaatcagcaattacacatgtggattaactatcaagtcaacaatatcatgttagtgactatttccaaataagaatcagagtatacttaaattacagagccactgaagtcccacactgacagcacttctataaagtaccctcttctccttgttccttcttgccattccaaaatcccagagaacgtcagtgcttggaaaggatagaatggcattacaaaaaccagactgacctattacgttaattaggaaaaatttttacttataaaaagtcatcatataattgaatttaaattgtttctggatttcaaaaaatgtatataatttaacaagaacagggaaaagggccaaagatttttaaaaagtatcaaaggaacaaaaagcagtaaaagggaaagaaaaatgagtaagagggaatgcagaaaaggaaaaaagaagaaaattgataaaaaagatagtgattaagagtgagaaagattaacagaagtaaattataaaagtaagttataaatttataaaagtaatttacaccagtaaaggtaaatcacaaaaagtagactgacagcaaaaatgagaaaaaaagcaattatcaactttctatagatctcttcattttttttttctagacttctgttctttagtagctattcagacatagtgcttgctattttgtacgatgggaaaatactaacaaaatgccacactccctaagtaacaatctatccttctctgttaacaattttttttctttttggagtacatagactaaaattaaagaacctaaattgtatacgaaatatgccaggtaaagaaatctggatttcttcctgaaagtactaggaaatcattaggcatttttgagtagagcttgataaaagcagagtttagggaatattattctggcaacagggaaggtagcaagaggcaaaagatagtttggaagatgctggcagatgaagagggggttgagtcaaacatcaaagtttcaagtcatagaagaataaaaggaaaatgatatcaggaatagaattatgaaacccacatggagaaaacaagtttcttattgttttttttcataaagtttttcttt

SEQ ID NO: 116304 - DNA, 1916 bp, Homo sapiens; identical to SEQ ID NO: 116303

SEQ ID NO: 116305 - DNA, 1017 bp, Homo sapiens
aaaaactgaggatttctcttaattattagtctacctcactttcacacgagacgtcaaactgaaaacgaactattatcaccaagaagacacattatttctagactttggagataagtgtatgtgattttcagaactattcttcactatctaggctgccaaactctgaatggtgctgtaaaaatgcattatcaatacctaaataaccaatgtaggggaatggctaaattaattgagctgtaagtttttaataatgtaaaataataagttagattaatttggacttatgtagatagacttccaaaacattgtctagtaagagaagaaagccaaagtatgccatgtatctggaaaccctagtacataaagtaatactatatatttttgtgggtacatatttatgaatataaagtatagtatgaatataaagtatagtaaaagttctgaaagaacttacatgccagactagttgttttgggagtggggacattaaagggttcaaagggattttatccttagtcacagaattcttttaaacaaggaatacatatattatttgtacagttatttaaaaacaaaactaaagaagagaaaatatattctcgtaaattatctgaacttaaaagatggaagcctggagatagatttgtgataagccattgctgagtacatcctagagttcttgataatttcagttggttaaattacaatagtttgctatttcctccctcacattttatgttctacagtatctagctgcttgggttttcctgtataccatggggcttctgtcatctgggctttactcagtggcatattccctctgcctaaaactctcctcccctctccaccttagaagtagcttttcctagaacggttttcccagggtttcacctaaggtgatagtacaatctacagggacctgcacatgaagacctttgcatacatgccaggaagttggactttatctttggaaaaagggagcctttgaaggttttaaagtaaaaaaaaaaaaaaaaa

SEQ ID NO: 116306 - DNA, 1770 bp, Homo sapiens
ccaattttatgaaatagggactcttattttcctccctttacaggtgaggaaaccgaggcacagaaagattatgtagttttccatagtcaacatggctaaactaggaagtggaggagtaagaatataaatctctgtagtctggctccagaacccacactgttaaccattatgctaatctacctccatatactgttgggattattttggatgagataaaggttttatttttttttttatcatgtagagtgatcaattttgtctactacaatttattatctctttaggctttatttatcataaatagtatgcagacttactgttggtgatatatctgaagataagttgttaccttagacttttctggcatgtcctaaaaggctcaacttctttccctcttatacaatggatatatttctgataattctctcctattgaactgtcattgattcacatttttctaagattgcctcctgcttttttatgcttttatttaagcatatggtaaatttctggcaaagcgatgagctgtaggaaaatgtttcttttttagataaaatcaaatactaattattttgaaggtgaattgttatattttggtatatttggaatagatatttcattgataacttattgagcagaatcaactagctgagtttagtctttaaaaacataaaagcctattgtttcttttgttttagttctaagaaagatgctcttaaagacaagcacctaattatttaattcccttcctgcatcaagatatgaataaactactaatattatagaattaaacttgccctactttaggcttttataccctcttaactatttaagtttatgcctgaaagggaagaatcagatttgttatttttattgttattaaatgaactttaagagcattagatacggtagttatattccaatctagacacaaacatacagttccttgcctggctcttcaggatttatttatggtgatatgttaaaggtgctaaaaataattacgtatttatattaacaaatcttggaaaaagatttactttttaaacttgatttgcagatttctttttattcgtgctcccatgactgtaatgttctttccttcctgccaatttttgcctattccttatattaaaacatattatctcacttctttttagaattcatctgtgccttattccagttcactcttgtaagggtgatgcttgtgatcccctcagccctcatgtattcattcgtattatattggaggtaatgttttgtttctatggaaatgtgctttttagtttcctatttgtaggtttgtgcttgtcagttaagaataagttgttttcagttgaagtcccctctagttatttctacctatcagcccctcatattatactttggcttctaaaagaccagtatatattggacacagtaattccatagaaaaatgtgactaaatgttgtaactgtataggtccttatcatgacatttaaaaattcatcatcttcccatttctaaccaagaggaacactagcaaagctactctttatcacaagattctttctttgggattcatttggaaggtaaaactgatacaagatacaaaagcatatttatattaggatagaacatcagaaaacactgcctttgcgaggaagccacatttttcttccaaggtatctaattagacaatcctcgtctgtctactaccattacttaatttaccctttacacccattataattggaccatggttaccattgtgtcctataagcttgcca

SEQ ID NO: 116307 - DNA, 1105 bp, Homo sapiens
ctgtgatctcataatctgttagagagttctgttgttttagagaatttagttcaggttttgaatttgctacaggatagtaaggttttgattgccaatttttgaaaaggcttcatggctgcctagtttttgtttttgtttttgtttttgttttcagtttccatgttgattagttagtcactggatactgaactgctaaagaattagatttctgttacagattttggcattataaaactctttggtttgtgtataggacttggttggaacgtaaccttagtcggtttttggttctttgtattttgcttagtgtgtgaactggttcatgagctttttcatttgggtgcttcactgggacatcagtctgaagtagctacctgtaagatttttgtttgtttttgtttttgcttgttgtctgtgttggaagagttgtatagaagttaggaaagatattcggggacatttttaggtcgtgtgattctcaagcctgatctagaaggattaactagatgccttagtatgaagcatacagattggattgccatattcagatgctgtaactaaacatctcatcaagcagtagtaggtttatattttttatggtatccatccagacttgattaacagttgacagattttaggtttcctactattgtggctctttataaaaatccctgaaaatctgtatatctttggctttatttccatttagttttgtttttaaaccagtcttctacctaatattttgtttcatgttgattgtattacctagcaagcatgtctgtgattataaaaacaatatagtaaaaagaaaaccccaggttattgatgtgctatatatgtgtgtatactttaaacagacctagttttacttttatgtggaataatcaggaaaatgtgtgtaacagttcaacagtaaaatgaatcttaccagttagaaaatcaatacagagattcaagcttttcctctgcttaaatatctactgttccgtatgatgtcaaaccaaactgtgattcctaaaaatgcataactgatgacatttttaaagtagagcaaaaattttgttcagaagcttagaggcagagaggggggaagtgccttgatatt

SEQ ID NO: 116308 - DNA, 1049 bp, Homo sapiens
atcatatagtatttgtctttctgtggctggctacttttgatagcttaatccctatagcaacttcgtaaagtagatataatccccattttacatatggggaaactgagtctcagaggttttatattttgtccagggccacagagtaaattgtatagtctggattcaaactcaggtttctgactgcactgcccattttaactattttgactcagtgtgtttcatcgcttaacatggcggaaaaattgtaatggaagttgtgggaggtggcatgaggatgggaggggaatgtgcatattcatcatttttagttggggtgggaggcaatagaggttaagaagttaagggaagagtagaagcattttatagctgctaaaaaggtggatagtattataggtaccaaaagtgccccacagatagctacaaattctttagctggtatctgagatttaacaacatggatgtaggtgctcaccagagaggaagatgccaattaagaactcaggttataatttcagatagagctgtttctcattctgtaaccagaggcagagtaatccggcataagttactttaaactttggagtcaggaatatgtgatatttaggaaaaaaggatcctgtaattatgagtctcttttgttgtctcttccaagcagcgtatggcctattgggctttttttggacaagggcacctgagaagctccgtgtgatacaggagcagtagtacaatcatattggttctattacctagtcatttctgtaatactggctattagaaaaaatagaaataatttctttgttttatttttttcacatcattatgtgctatttgtcatttataattggattgaaattatttgatgattatacattatcagtatatttaagcgctagctatcctgggaagctattaaggtgttttggtacattcttttttttttttttaccctggattaaacttagtgactgatactgtattccttcacttagaaatattgtaatggaaaaacttgagtgagctttcttgctatcagatatattacacataca

SEQ ID NO: 116309 - DNA, 1046 bp, Homo sapiens
aagcattcccccatcattaaggtaccccctgcaaagaaaaatgacaaacctttctttctttctgaaggaataaggcaagaaaagtaatagagatctcttcagaaacttacttgacagcaattcgcacaattcaggatttccaaaactaatgaaggagtatcttatggaagtgaaattttgtgtaaaatattaaattgcccctccccctttcagtctccaggatgttcccccaaaatacaagttgtttaacttgtatccgaaatgtcatgttagcttttgattgatctttttctgttatttcagaagtatcaaaaaaacccctatttttaaggaacatatctaaagaaagaatctgtgtaagatgttcagagttaagttttggtattgtttatccagagattaattgtgactcttagaagtagtagtaatattgtaattttttttcagagctgtgagagaaaaaagttgaaagttttcagtttcacgctttcaaagccagtttgccacataaaaccaatttaggatgcagacaaaatcactacattttagttgttctgcagtaatagaccaaatatgcctttcatctttaatcacttctagaattattttgttttaagattagagcatactctgtggggcaggggctggaatacccaggttgcagtttattaatgtttattaatacttcacctcagtagttgagagttagaagtaaaatttgggggaaaaaacaattcaaatttagaatcttctttcttccatagaaatcacaaccattgcattaatcctgggacataggacaaaagtactgagtttgaaagacatggaactactaggaatatataatttaaaaataggatttcaaaattattttggaacacatgaggttattctctattattgtgtgtatgttattgctttgccattggtgtgggaattacagattatatatttgcatgctagtgacatgtgagcctctgtaagcgtatgctaaaatattaattttattaagaacttactgtttctgaaagggtggacttaaaata

SEQ ID NO: 116310 - DNA, 1049 bp, Homo sapiens
attgctattcttgatgcctgcttcatcagtacgtttctcttcctggctcacagaatgagtgctgccccccttattcaaggctcacccctgttcctttgtacacatttcacattcattggtgccttccagattttatctcataattcatatctctcttctatcttcaactgttccctttctactggtcctttacttttagtctaaaatgtgctcattttcctttttacccaaactactcagcattagcttacatcattctcttcacttccttaccttctattcttctctgtgtttactgctttcaccttcccccgcttgtgggtcaccagtgatttcatactggcagatgtgatggcatttttagactggagctaatgggacctctcttttacattggacaatgtcagtcactttacttcttagagctctctatcttgttcctaggttccaagacactgctctctcctagccccctgaaaaccttcctagtctctctctctgtctcccttaaaggtttccctgctgtccactgctcttctcatgctacatattctctttgggcgatctaactactccacagttttattttttcccttatactgatgacagtcagatctatatgtatccactcccatgctctacttggaatttcaaatattttctgtatgtttacaccttgatgttccaaaggtatctcaaattcaacataataaaaacatgacttattatcttaataaaaacataactcccaagtctgctttctctgctatattctctatctcagtttacagtatcacaatttcagccatgcaagccaagttcctaagtgtcatttttgtcttctgatcttcactctcaaagcattgttgaccttccaaaatatttagtgagttgatttctcttcttgtagcagatgctgatggccatctacccaactaacattctccttgccttctcgctctaatatccgcatgactagtaaagctatgtgcttgagggaaagctggcattagtctcagtcccagctccaaagaacgagtcttgatttg

SEQ ID NO: 116311 - DNA, 1028 bp, Homo sapiens
acggagtgtcgctctgtcgcccaggctgtagtgcagtggcgcgatctcggctcactgcaagctccgcctcccgggttcccgccattctcctgcctcagcctctcgagtagctgggactacaggcgcccgccaccacgcctggctaattttttgtattttttagtagcgacggggtttcactgtgttagccaggttggtctccatctcctgaccttgtgatccgcctgcctcggcctccccaaagtgctgggattacaggcgtgagccaccgcgcctggccacgcctgcctaattttttgtatttttagtagagatggggtttcaccgtgttagccaggatggtctggatctcctgacctcgtaatccgcccgcctcagcctcccaaagtgctgggtgagccaccgcgcccagccctcttttttactttgatgtttggtttgtttaacgtttaattacagtatatatttatgataggagaataaggtttgtgaacacacagttaactgatgggagcagaggcgcttcgtgatcagcatgctgtagacatgagtcagtgtcgattaatctggcaagttggttagatggaggttggataagagagtttctactgtaattatttgtgttttttatctccctttgttagaatatgagctcttacaaggcaaggactatatattttttcatttttgtatacctaacctttacttatgcacagtgcctgctacttaatagatattcactatgtatttgttggatgaatgaacaaactcttacatagattatactgaatttgaataatcagaaatgacactggtttaggaattatctagtatagacagatcattggccttgaagccaaacaggggtttaaaatccttgcagtttatatgattttaattcaattgaacaaaggcatctagagtgtttactatgctaagcaccaaagatatagaaacgggaataaaaaaacaaaaacaagctgggcactgtggctcatgcctgtaatctcagcactctgggaagctga

SEQ ID NO: 116312 - DNA, 1079 bp, Homo sapiens
caagcgtgagccactgtgccaagcctgtttcaatttttattcatcttattttttctatgattattgctgagttgaaacaactgtaattttgtatattaattttgtaaccattcagtcaccttattgaatttccgtatttgttttcatggcttttcagtggtttctcttgggtcttctaggaatgaggtcatctgcaaactaagaggtttattttttattgttttttaaattgacttctttgtgatagttctctctattattttatgcattgactagaaaaatgttaggtgatgatgataaatcttgccttgaacctgatttaatattaatgcttttgttataaaatgattaaataaaatattggttgtttattcattgaatgagtataggtttctgaccccttttgacctgtaataatttgtgtgattattccttggggactttgccttttcaccagttttttttctttaagaaatttttctttatcttaagctggaggcaagatgataaaaattcctgttaaccattccattacctggcagaatgtgggaggggaaggctagggaaggagctgggactgtgtatgcatttgtgtttgaagggtgaggaggctggtgctgagaaggatctttagtagggaaattctgtctgtcagaagcttctccactgaagttgtaaactaatgccccagaaccagttttcaggatttgtttctattattgacctttctctaaaaagggatgtgtaagtctagccttctgttggctgccactggttgcttaggtaggaaagttccttaccctttggagtgggagttacacccactgcaatgatgagcactgagatggtattgaaacattacaataaatgggtcaggcttccagggacagatcaataggaagactgagtctggaaatctgtggctgaccagagtgcatggcctattgctaggctggaaacaggagtccaagtgttaccagatcttttgatattttgagaaaggttaagcattcagatttgggtggagagatctctggatttttagatgttggcaactaattaaaaaagattatttttcc

SEQ ID NO: 116313 - DNA, 1022 bp, Homo sapiens
cttctcacctgaaccatttcaatggcctgacaactcttctccaattcattcaacacatttctgtcatggttaatcctttaagaagtatctttgtagaagtcccattttctatatgattttttttctttgtttcagtttgggctctctcttgtcacagaataatatagaaactccatcacagagtattccaggccccgcattgtggcttcctgctacctttctagcttcattgtctactctaattcatttcctttcacgctgtctccagagtcctaaaaatgaaggaaaagctattttgaagaataagtaagtaaacttttatcagcactagaaaacaaaaaaatgtatcatcaagggattataaagcttgatgaatttctgaaaggtagaaagaaggaaaaattggactgaagaaagaaaccagatcccaaagcagggtttagagaggactgtggtgaaaaagtggagggtaggggagcagaagggagggctccaagtgcagagattgtggatccaaatgcaattctgagttccttactctctgcttatataagttgtttagaagtaagcatattaagctaataagctttaattaaagcctcttttttacttaattttgggtaatcagttttacccttgatatctttatagtcactgcagtttttaagattctgtcttactctagccttcttagtttgcagaggtggttctttttatattaggaaaaatgtcaggagcaaatatgtgaattattaatgttctcctagagtcacactataatcacatggtcagtgcatgtttgtcatggtgaatcataaaaatacatctagaagccaaggtgttagagttgttttagttcatcaagactgacattgcataaatgagtccctaacattctttggacagaaagaatcccaggtggttctcctgcttttgtgccttcatggattcctagatctgctttctgttctagagagctgaaaaacattgtataatctcgaatttcaccttgtttttgagat

SEQ ID NO: 116314 - DNA, 1081 bp, Homo sapiens
attactgattaattgctcttttggttgccattgagttccagttaaatcttgcaggctagggaaccattttttttctcgttaaggtaatttgcctatatcctctgatctatgatgagttaatttcatctttaactcagaaagagttttcttatatatatatattttttgttatttagtttttatttcataatcataaacttaactctgcaatccagctaggcatgggagggaacaaggaaaacatggaacccaaagggaactgcagcgagagcacaaagattctaggatactgcgagcaaatgggatggaggggtgctctcctgagctacagaaggaatggtctggtggttaagataaaacacaagtcaaacttattcgagttgtccacagtcagcaatggtgatcttcttgctggtcttgccattcctggacccaaagcactccatgacctccacaatattcatgccttctttcactttgccacagatcacatgcatgccatccaaccactcagtcttggcagtgcagatgaaaaactgggagccatttgtgttgggtccagcatttgccatggacaagatgccaggacctgtatgctttaggatgaagttctcatcttcaaatttctccccatagatggacttgccactagtgccattatggcgtgtgaagtcaccaccctgacacataaaccctggaataattctgtgaaagcaggaacccttataaccaaatcctttctctccagtgctcagagcatgaaaattttctgctgtctttgggaccttgtcagctaacagctcaaaggagacgcggcccaagggctcgccatcgacggcaatgtcgaagaacacggtggggttgaccatggctaatagtacacagttttcctcggcggcgtcatctgcaaagccgctttcttatatttcttgtcctcaaggtcttggagaatgtttccaagtacagacaaaattctgattatgaatatctgtaaaaatggaggggaaaaataaccaattatttcacttccttaatacaattgtgattattttggctaattcccctcatatgtggggaattt

SEQ ID NO: 116315 - DNA, 1036 bp, Homo sapiens
attttatgtagttgaaaaagcctatagtccccattagttccttacacttaaaaaatacttatttttttacagatattgttcttacttttcaatcttattgaataacttttcattaaagctacaaagccagcatattcacaaaacaaacacagtatcaaaaaagttagtcactagttaggtaatgaaatgacaatcgtctcaaatttggatgtatgtgctcagtagctctttttttttcctcagcctaaatgccttactggcaaggaaaagttacgagttgaagacaaggtgccaagcaaactgcactggcacctcactacaaaaactcagcaggaaaagatttgaacattttaaggttctgcaaagcaacaagaaaaaccaaagctctttttgagattggttccaacaatgttagattaagctaaataaaccagttacaaggtcacaccattaaaagctaaagccaaactgtctcaaacaaggatagaagccctcattttaccacctagtgtgaaaattgtttgaggccaataaagaaaaggaagaagtggtactctcaatactagtgaatgtattgacgttatattggatgggataaagatagcattaatccagattattatcaaatgagtcaggttttatttcagattgatgaatctatacacattagaaaatgctgaattgctgtatgagttatgattcctaaagagaaattcttggaaaaatatcagttctttgtaaagaagtaccaaaacaaattactggggatgaaatattgaaggtggtaaattcatactttgaaacaaataaagtatggaaccaggcttgagtttgtacactgatgggtgactgcaaaaaaaggcataatggcttcacatcaagggtattgtgaagacattgaataggattcaaataattcaatgttttattgacagagaaactcttgtgtaatatacttttcctgtgtaagagttccacactctgatgtgtctaaatggagaatctactgcaactgaggctgcttcacttatgtctg

SEQ ID NO: 116316 - DNA, 1250 bp, Homo sapiens
ttacacataaaagggttaagttgagtctgcataaagcacactcttgcatttgtgtcctgctgatgatacctgttgtttctccagcagaatgtagtcagtcagaagtcatgctacttgtacctccaaattgtgctaactattctacctgttggcaacactgtatggaaagaatctgagctgtattttggcttagatttggagcaactatagcagcctgctgcttggaatgctctctttgcctacgctggcagggctgggcctgcccagacaaggtagtgggaccagagtatgtagccaaaagtctgtcttggtgaagaaagagaagacttaattctatgttgcttcagatgagacaagtaggaccaatgagagactctggttagtataaggtgtaactgacaaatatatgctgtttgcccctggaaacgtgtaaggagatgatggttgactgcctgtctcaggtgtgatagatatggtttttgatttgcctgaatggttagactcagagtttatatatctgtgctcagtttcattcttccctttctttcattttattcaggctcttttctgtcttttctatttttattgttatatatctgtgtgtttttcttgaaattgctagaaaatgttatattgcctgcttcacaatattccaattctttgattgatctttttggtgtcagttgaactataggtcattgactaaaaattgccatgaatagccattcaaatccataaacttttactgttctttttcctctctcaattaaaaaaaggttaaaaatttcataaggaaagcacatatgcttttacaaaaatttgcattcatatattattaaaaattcaagcaatatagaaatatatatgataaactgtttaagtatctttctgtcacctttcaccctgtctgctaactcccaatctcaaactcctcctcagagattaccagtgttaacagtttgggatttgacttcaaaacttcttcctatgcctttatatatattgttattatatattataatatatactattaagacattattaatggctaatacttatttagtgattgctatgtgccagacattgttcacacctttttaatatattaattcatctaatccctttgagggattttgagaaaggaaggccaagaggagtttagaaacttgtccaaagtggcacgcgaaatttatatgccaggaaatctgtttgggatggagctcatgcattttctaaccatactatcctgc

SEQ ID NO: 116317 - DNA, 1049 bp, Homo sapiens
taagattggaatctactctggcaatgtggtggcctggaggcatatgtgcaaagggcaattaattatttgtttaaaatgaagtgccatgtatttataggcacaaaagaggttttacattaaaaagttaagtctcctttctaacccttctactttccttactcaaacctttagaggttgccagtgataccatggtcttgggtatctttccggatatattcagtgtacacatagcctgtacagttacatttaaacatatggtagcatgcatatattcatactgttctgcgctttaaaaaataacttaatggtcagccttggtcattactcaatatttacagaactcattcattatttttgtggttacatactatcccattatttggacataaaataatttatttagccaatcttcactgatggaaatttaggttgtttccaaccttatactattaaaataatatgttaataatcatttgtatgaattttatttactacatatgtgactatatccataaggtaaattattagaagtaacatttctggatccaaggtgtgtgcattttaaattttgatagtttttgccaacctgctcttcagggatcttatgctaattttaactcccctgccccagcaatgtatgagagtgcctgcttgttttatccatgtctttgtctatacattccctttcatactttttgatctttgccaatctgataggtaaaaaatgttatcacagtttttaatttgcatttttcttatggctaacattgaacatatttttatctacatgtatttcctctttagtaaactatctgtgtatcctttgctcattttcttattgggctattggaccccttcctgttgatttggtggaactatttatattttgaggaaattaaagctattttatattgaaaaaattagttcttttctatgatatgagctacaaatgctttttcacattttgatatgtcttttgactttatggtgttaagaattcgttgcatgccgtagaatttaccagtcttttatgacttctgggtttttat

SEQ ID NO: 116318 - DNA, 1063 bp, Homo sapiens
gtgttaccttaaaaaaatggaactggccacaattagatgaacatcattcattagtgtatttaagagcaagtacaagaaacaggagacaaatactggtaaagggctcagaaaccatattttgtaaggagtatttgcaaatggtggtcatttcttcagcgcttggaagaacagctgtgtggaaaagggattagacttcagagggcagaactaagtaagttaaaggatgtgaaatacaggacaaaactttcttaatgtacaatgcactaaaatggaaatgaccgctgtgtaagggagtaacaagggccagttcctggaggtactcaggcagttgctgagatgcataagtacctttctgggacattttcatagagatcttgccttgagaaagaaattgaaatggaagctttcttgcagcttcaagatctatttcaagtcctaaaattgttctctatgtgtatgccatgaaaatcaatattaattatgtgacaagctatttctataagcttaagttttgttctgtgatcttggtgctatggactagtcaggaaaaaagggaaaggtttaatctaggagggtggaaacatcattaataaataagagaggtaggagaataaaacttgcatttattgagtacttactacgtacagggtgttggactagtctctttatccatatagtctcatttagtacatttagtttttcactgatcagtttggaacttatgggaagtggttcttaaaatgatgaattcttaaaataattggcattttcttatatattttttggtgatgaaacacaggactgttctgatggctacatgtgcaaaatacactttcaaattaagaatgggtctgtgatgtcacatctaggagcatctacccatggacagacatgtcttcccatggaggtgagtagtttaatgcatcatgttcttttcagtctccgtaaagtatacatttaaaaatgtatactttaatgactccatcgcattccatcctatggaagcaccacaattatatggcactcatattgaaataaaatactttaattctgttaagtaaat

SEQ ID NO: 116319 - DNA, 1514 bp, Homo sapiens
agatgcagtttttgaacaagatattttctttaccagtgaccaacagaagtatgttgcatcaatttaaaatcctctaaatatagggccgggcgcagtgactcacgcctgtaatcccagcactttgggaggccgagtcggggcggatcacttgaggctgtgagtttgagaccagcctggccaacatggtgaaacaccatctctactaaaaaaatacaaaaattagctgggcgtggtggcaggtgcctgtaatcctagggaggctgaggcaggagaattgcttgaacccaggaggcggaggttgtagtgagccgagattgcaccactgcactccagcctgggcgagagagcaagacattgtctcaaaaaaaaaaaaaatcctaaaaatataaatgaataatttcaacagaagcaaacataatcgatgctggcttgggatatcttattttatgtgacacttattttcataaatgggtattgatactaccatatcactttatcaatttatgattttttttgtatttaattgaagacttttcttagagaaattgagatatcatttaatagtagtgaaaaacgtgatttaacaattgatctactttaataaacaggagcatattgtccttattgaagccttatttctatacatgaaacgataatttacaaatagaagtgggaaccaagccctatacttcaattagacaatttttgacgaaaattaaccattattaactcttaaaatttttgtggatatattattgcaaaatagctgctaaacttaagttttttttttaaggttctaaattaacttactggctaatgaagactagagagactagagttgagaaataaggtgtaagttttttttaaaaaaatcgtgtccagcactcatccactcagtaaaaggaaacagtatctagttaacttagatactgatttttaataataagtagtaaaaattattaatgaatgctcagaaaggggaaatatctgaaagtatttcctatgtaactcgtgttctagccaacattgctttgtatttttttgtctctaatgtcttcatttatgaagttttgagtcattttccatagaatagagataacctagattttgtcttttgattcacacaattcagctacctatacacactgactttaagttggtcagtaatttttatattattgaagtttgtgttctgcttgaagttcgattactgtagttcctcatccttttgcagaggtatcagaggtgggtaccaagcatattttatttatccatttactatccttattacttcagagcctcaggttgcaccttcagattacatttttaaaaactatgaaaatgatagagtcataaaaatggcaataatatactagtggaagaaaagatttttgtcttagggccttgtagttcactaactgggattttccttagaccagggcaggtagaatattatagaaagtgaggccctcgacaaaaaacaacctatcataaatttcctgaagcataaaact

SEQ ID NO: 116320 - DNA, 1081 bp, Homo sapiens
gatatgctgtctcactaaaaatacaaaaattagccaggtgtggtggtgtgcaccagtaatttcagctactcgggaggctgaggcaggagaatcacttgaacctgggaagcagacattgcagtgagctgagatcacaccactggactccagcctggacgacagagcaagactccatgtccaacaataacaacaacaacaacaacaaaacaacagcaacaacaaaaagtctttatagattgtctattcatatatgctaggctctctgattatacttaagtagtttgtaaagttagtatttccacatactgaatgatactccattaaccctaggagttagtgccgatacttatattttgcttaatttcatttttttccttactgattccttcaacaaacatgtttttggctatcttttgagcatcgggtaccgtgctgaaggatacaggcataaaacactaggaaatagtgacacacttctcaggagagtttggaaaatacaagtatttttactggtattttctgatttgtaataagtttcttaggtcttcttcattatgggtattgaatgttattatttgtactgaatcttatttaaaattttaatggcaattttaattgtaaaatcttttcaacagtattattatttttgtggacatatacttaaagagaagactagaatttcttgactcctcctaaaaccttggaatgtcataggagaatacagaaatcctccttggtaacttttcttcaatttaccttaggtttcatggccatgtagttcttgtgttgtgagtgtagcaggaggatctcagacaaaaagcaaatgtggtaatacttttgagggcctctgattatagtaatattctcaggaaagctagtttaacatggaattatttaagtgtagccagagagcttagtaaatgtaatgatggtcatcagtgatatactagaagtcagataatattatcaagtaaaaaaattcatagaatagtagactaaattggactccctcaattgtatagtagtaggataatatgttaaatatgtgaagagtactcagtggtcctttttccttataaat

SEQ ID NO: 116321 - DNA, 1030 bp, Homo sapiens
cttgtttagtcacgggatcatagcagcttgctcatctctagtggtatgaagccgtatttgagaggttgggcaatagagccctacagtgttatgtgatttgctcagtaacagaggtagctccagcatgcacacctctgaactgcatgaatccactgccttttccacttgcctgtggtttaccattgttctttgtttcatttaccagggtgagatctcatttaacatgttttagattacagaggttttatagtagagctaaaagcatataaaacaagaatttattagaaaggacaccaatctttaacagcctctgctggtctcaggttaatcttactatggtatcattttcttaacaatggactatcataagctatatcatagctcttatacacatttatgcaaaacaattaaactatagtgtatgaataaacattccctgacccccacctgattttcctacccccttctatgagcaagcagatggccattttaaagtaagataagtggagaaaaatagagaagtaataaggggcaatttgagcagtcagtgtactgtggtatccgtgggacccttctccaacttcatgtgatagcatgcagtatagaaaaggttctttcagcaagtgtttaggaaaatatgttccaaaagatctgcataacattagtgtaaccaagtgttcctctctctggcttcctgttttggaattaaatgccttcagggtactcagaataactctgtttaggaacacaagaagaatttaacctcttatgttcctaatcaattttaaaaatatatatatagattaaatagaaagcaaaaagatcttattctactttgcttctcaacagtttcagctaaaaattaaaactgtttatacataaagtcggtggtttagttagaaaacaaaggtataaacaagaattctgacaggattattatcagcaaaattttaagatcagttttgtccctgtaaacaaatttcatagacaaacctttttacatgtaggattatttccaaaagaactcagt

SEQ ID NO: 116322 - DNA, 1162 bp, Homo sapiens
gaaatccgtgctaagtgcttttgagtttattctgttgtcagaggagagcaaactgcacaccatttcgaggaaacaaataatgttttgattaaataatacttgtttcagtgtgaaagcttgcctggagaactgagagattaaagattagacatttttatactaggtaaggtcagacattatatcatcgtggataataataagagtaatggttgtagtaatacctttcatttgtatttgcgagtatacatatatatacacatgcatacatatttgtgtatctacagagaaccctagacacctatatatatgtgcatatatatacacacagtatatgcaataatactgctcttatataatatttatgtacatatcatatatgtatatatgtgtatatatgtatgtataacatgtgtatatatctcatgtatatgtgtgtgtatatatccctcaagataatcctatgatttgaagatatatattgaaaatgtcaagtaatatgtatatgaggtctcatagcatagtcagagctgaggtggtactcaaattctaggttgtttgagtctaagcctgatattctttttatcatgttatgctgtttttgcattatatgatgtcagtgttgataggaaggatggaatgtgcatcagagacattacaaaggtataaaatatttaaacacaaggcagaaaaaggagttgaagatagctctcaaattttcagtctatgtgactatgtgaccaggaagcaggaatggtgttgccattgcctccatagatgtaagggaaggaacagctaggggagtgggatgggaaacaggcataggggggaagataattccattttggcatgtcagatttgagatcctgaaggcaatcttatagaaatatgtagcacatactttaaattttggatttggagccgaagaaaagtcagagctacaacttgagaatcgatgatatatttcagagaaagtgtatagactaagaagagaaatgaaatgagagcctaaccttggtggaagactacatataggaggctaaggtaagaaataagagacagaaggagcctgcacaaactctgacagagatgagagtggtcaggggaatgccttgttcctcaatcagcaaatatttgcattcttgctgtgtgcaaggcctttgcc

SEQ ID NO: 116323 - DNA, 1032 bp, Homo sapiens
agcagctagtgaaggcaaaccggtttatggcataattctgggtcttggtgaatgagtttcctgactttataattccatagactacaaaagtaaagaatcacaaagtagaccctccatgtgtatgtgaggcaagacctgcatagcatcaccaggaacactgcttataaggtgaagtcttaaaacccatcccagaactcctggattagaattttgggggtggaggccaggaatacgtctgtttaacatttctcaccaccaagaatctgatggtctttgcaggctagaaagaaccctggacttggagcctgaaggcttagttttgtgccctggctcagtttcttacttgctggagaccttgggccttcctcctagagcagaggaacaaattacatgatgtacatcaataggcttagaaaaactgtaaactgttagagttgatgctggcctttcttatgtcacatgtaaagggtaacactgaagagaaacacacttgaccgacttctgaagcttgataatttttcaagaggtcaaaattttcccctcttcctctagtttgtcatgttttacataaagaatttctgattttcaaatccattattctgctaattcttttacttttagatgtatagaaataagtgataagtgcgattaagcattattactatttcctcctgccaaagaacctgtgttttgtagcatggactctaagagatagcctcttccacagttccaccttttacttggcgtgtttgctggcttcccagctccaggcactagctgtcttgctgtttcctatgcagtcttaaaagaaacagggtctaggaagcacagtggagccagctgtaaacatccagaaaactgccagatgtgctgtggcgggtttctgcatcccctccctcctgcctcgcccttgagcatgcctgcctggagaagaggttttaatcctgcacaggaaacagattcttcctctcagtgggaacccacgttggccatgctgttgctaattcactttggttgatgtagcagggagag

SEQ ID NO: 116324 - DNA, 1032 bp, Homo sapiens
tgcctacaaagtgagaagctttatttatggctttgtgtgtatacatgtataagatatatgtatgtatatatatggcttattcagctgtggcacagcatcaagtatttgttaagtgaaacgataaagaagaatttctagtcatttaaaaaatacagcccaagaatggaaacattgtgatggtgcctacttcaactgctatgccaggttttgaaagaggaagtaattctgttgtctccaggagacctaagacccaaaccatctatgtatctttactctttagtctgatacttttcagagactataggagtagtggacttagaaaaatagaacatcctgaggactcaaaagtgggtatccaaactagctgaagcagctgttccacttctataaacacgtatttttatttaattcttgaaggcagacagccaagttgagacagcattctgcttctgcctctcatttctactactttggtgtacaggagctcagttaccaagtgggcaacgtggatttaagagaagaaataagcccttccatcccaatgttctgtttttctctaactacttttgtcattgtaggtttgggagaggtggtgggacacagttaataccctttgtcactcaggagagggtgagacataattgcacgtctgttgagtaataataaatagcctacattggaatagtgccttatagtttagtaaatccactcccacaaagcattgacatcttcaagtgcatgctgttttttttttctttttttcccactgtttttgaagcataccatattaaagaattttttgtatcatgccaaagccttctatccattccctaccattcttattccctgacctttttatgtctcattttcccttttgagggctcagctttgatcaaaagctagtggcaaatgttacaaaggtggtaaaacccttaggcacatacataatggccttttgccttaccagaggcctaggcttaaatattttctccttacatttagctagagatttctatatttatttcatcttga

SEQ ID NO: 116325 - DNA, 1047 bp, Homo sapiens
ttcatggaggtcacgactgtctaagccatctcaaccagttgcatcattgtggatgtataacagacttgcactgttatattaccaatttttccattggtttcctcatttgaagagtctacttttcaaacaaagctctggttacaacaatcaaaagcaagcaagttggtttagaaagttggggtgagaagaaaatagtgcttattctgaagaaaaagaaataaagctttgccaggcctcattgggattgcagctaaaggactccactgaggtaaatactttcctggcctcttgtctctgcccttccctatatagccacatttttgtaaagatggagtctcactttgttgcccaggctggtctcaaactcctggcttcaaataatcctcccacctgggtctcccaaagtgctgagattacaggcgtgagccactgtgcccagctgttgttgttgtttaaggtgatgaaaatgttctaaaattgattgaggtgatgattgcacaactctacgaatataactgaattgtacacttcacatgggtgaattgtatgtacgtgaattatatcttgataaagttatgtgtgtttttttttagtcattggctttaagtgacgaatgttagtgatatgcatgtagtgctagtgatcccctacccagccctggtggtctttccactggttggcacctctccctggaacgctgtgcctcccagtgtttgcacacaagttactttctcactaaagtctaaaattgcaaacccacctctggctggcacttcttagcctgctttacttttcgttttcaccatagtatgtatcacctcctaagataatatacagtttacttgtttattgtgtttattgtttattttcacacacacacacgcacacacacacacacacacaccccaaggcataatgtaacctccatgaaaacaaggatgattgttttgctcactgatgtatcacaaaggcttggaacagatgcctggcatatagtaggtgcccaattatataaaacatctacttctaaaattaacttctatccaa

SEQ ID NO: 116326 - DNA, 1044 bp, Homo sapiens
tggatttgggtcttattacttctttaagttgaagtttatttcactacataataaaaacaagaggctggttaatgttctttgttatgtgtacatctggttgagcagaatattgcttagctttttaccatcaaagttacacttttgactcagcacatgctttgaatgtatacaaaggccttcttttaaagaatctcccagcatttcattgatccctggaattactatttcttgaaaaggaacagcttatcaatacaaaaataaaataccatttaaaatattgaataattaattttaatattattcatcttagcacgtttcattttgataattacctaccatcaattattattttttaataaacatcttagtccccaaacttcaagtctgaggaatatttatattcttatttccagtttttgagaaagaggttaatggcgggtacacaataaagcaacagcttggagcaggtggagaagcctgggggctgggggtgaggaccagaggcaggcagaggacctggaggggaaatggaacacaggctctgctgctacacttacccgtgtatgttttgagtccttagtaaggagtatatgctacctcagaaagatgctatttgttttatcttttttttttgtacaatagttgctgtatacacataattccaccatgcagttattgcacattattttcttcccactttctactcccttcaacttctcttctcacttgtcattttctctggttctctcccatgtcagctgcaaaattctccatattacatttgcagcctgtattttttagttaaaaagttggtcaataaatagagataataccaaagtatataaagtagttgtgccagttacatttttttgtaagctgatgttatttttttcagtatattaatgcagtgttacttcccttagtccaatctgaattccaaaactatttcaagtggtttgtatacatacattctcatatgctaataatacatacatatactataaccatcaaagcaagtgaataataactaaatggtggatggga

SEQ ID NO: 116327 - DNA, 1035 bp, Homo sapiens
ttcacactgatacattatatagctaattttctcctagtttttcctgaaaatgttccagttaaaagcaggcagcttcttctgatcatttatctcagccacagggaatcttcaatgcaaaatgctcatatttatttctttttaaagagaaacctggtgaaaattttgaaattttagtaagagtaatgaaggatttctgctgttattaaaagaaaacaaggtaaggaatcttcaaattaaaacagtatcaccagtattaattgagtaaacattttcctggatacatatttactgatttttggtcgatttttctcaaaacatgaaaactacatttatttcttggtagaatttgtgtgcttgtgagagattgtctcaaattttctttttaataaatttcccaagtcttgacagctaactagacttgcgagtctttagagattgtctcaaattttctttttaataaatttcccaagtcttgacagctaactagacttgcgagtctttaagatgtattgaaaggagcatagactttacagcaagaaagaggcaggattcaaagctggttctccccttgctatgtcttggggtaaattacctaaaaactattttacctgatatcaatataagcatattagctttcttttggcatttgtctggtaaatctttctctaccttttaactattaaacttgctccggtttattcatttccttgcatacagaacattattttaaaaaatttacatacagtaaagtttaccttttttggcagacagttccataagttttagaaaaatgcagagatgtgtaactgaccaaaatcaagatacagagcatttccatccttcctccacccaaattcccttgtgcagccccttgtagccaaccttttctcccaccccaaacccttgttctctgtccctattgttttacgtttttcggaatgtcatatatggatttctaggcttttgagtctggcttctttcacttagcacatatatttgaggttcatttatgtttcagtatatatcaatagttta

SEQ ID NO: 116328 - DNA, 2513 bp, Homo sapiens
gttttcaaaggagagaccccagcctcgggtcaggcgcggcgcagacagcggcgcggggtccttggctgggcggggcttgctcgcggtggcttgtggctccttcctgcggtgcttctctctttcgctcaggcccgtggcgccgacaggatgggtgagctgttgtggccggtttaagggcgctgcaagcgggacttggggtcttggggacgggcgggcggatgcgaatagagtagggcgggggatgccatggagaggctccatgggggagggccggggaagcgccgctccaggaggcacgtggtccggcgcggaaggggcccatgaggcgtggaggccgccgaggtcggggtaccgagggacgcagggaggccagcgcttcctcccgggcattcgagcggggcctcgtccttcgggagaacacattctccggagccctcttcgaacgtttattagtcggttcagggcaacttgaaggccaaatgtttggcccacaggccaataaatagtacgagagccaatcggcttaagggtttattccaggtgaggcgagtgtcttagaagatgggaaacacgtagatggcgtgtttttacggaagaactaaaatatttaatttttaggcaagtgtcgtggacttcgtactgctaggaagctccgtagtcaccgacgagaccagaagtggcatgataaacagtataagaaagctcatttgggcacagccctaaaggccaacccttttggaggtgcttctcatgcaaaaggaatcgtgctggaaaaagtgtaagtccattgctcccgtcaagttttagtttattataggaattcgagacatgaacttacgaattcttgttttgaaagtaattgcaggtttttgtgtagtagtattcatttgggcattgtggggtaaaattgcaaagcgtttgttctatttaaaagttggtaaaattagtttttgggaattaggtagttaaggttttaatttaacgttggcctggaaggaattggagaagatactagcaatgatgaagtaaaggacacaaacacctttactgtgggagttgttataagtaaatggcacgtgtcagctattgaactttatcgacttgataaaactaaggtgaagagaagtgacttgcatcagaattaattgaggtcatacacctaagattgagacatgaaactgccagtatttgactggttttgactttttaaaataataatttcatatagttctatcatatttgatggtagagccattttaacccagactttttttttttttttttttttttttgagacagtctagctctgtcacccaggctggtgtgcagtagcgcaagactccctgcaaccttagcctcccaggttcaagcatttctcctgcctcagcctcccaggtagctgggattacaggcgcccactaccacaccagctaatattttgtattttcagtagtgatggggtttcaccatgttgaccaggctagtctcaaactcctgacctcaggtgataatgcctgcttcggcctccgaaagtgctggaattacaggcgtgagccactgtgtccggcccagactttctaattcttacctcagataccttttttcttttttctttttttttttttgagatagggtcccttgtcacacaggctggccatcttgacgttctaggcatagatcctcccacgtcagcctcgcaagtagttgggactacaggcccacgctgccactccagtctacttttataactgtaaaaggtctagaaatttcccccattgtgctaatgaaattaagactggcagaaaactaggttgacatcacaggacttcagctcagccatttgaggttagattgaaaagatagaaacagtttctcattagttctctagttaatatgaaaagataatctttttcagaaagccagctcacagtgctgtgccttttgtatttcagaggagttgaagccaaacagccaaattctgccattaggaagtgtgtaagggtccagctgatcaagaatggcaagaaaatcacagcctttgtacccaatgacggttgcttgaactttattgaggtgagtatttcaactctatcgtaccttctgttcttggggtggcctccctcacatttttatctgatgcaagggagtttcctcacatgaaagtatttttgtgatcgccaccaacaccagaaataaacttcttattttattccaggaaaatgatgaagttctggttgctggatttggtcgcaaaggtcatgctgttggtgatattcctggagtccgctttaaggttgtcaaagtagccaatgtttctcttttggccctatacaaaggcaagaaggaaagaccaagatcataaatattaatggtgaaaacactgtagtaataaattttcatatgccaaaaaatgtttgtatcttactgtcccctgttctcaccacgaagatcatgttcattaccaccaccacccccccttattttttttatcctaaaccagcaaacgcaggacc

SEQ ID NO: 116329 - DNA, 1052 bp, Homo sapiens
taaataagtcaatgaaaaataagtcaatgggagcaaagagaatgccattaaagtatagaaggaatgaaggtattagaaaatcatcagcagagagtaaaagtggtaggttaaagttttacaaccaacaggctgttgatgtagtctcaaagtatcccactgttcataattcttagatataaagggaataatagtaactttacagtgaagaaagctggctaacactaccttaaccaagtgatcaaagataacaggtgagacatgagagaagtaccaacagagatttggaaggcatggagactccttggagcagatggcttttgagatgtgcttggagagttgaatggtatttcaccaggcaaaggaggcacaagaggcttccaggccgaaggtgtaccaaatgcaaagaagtgggaagtataaggataccctgcgtttaaagacatgcaagcagttagttgtgaatgatagggtaggtgtgaagggaaaagagatgaagtatgaacctagaagaaggccagtgtcaaattgtgagaattcacagtgccatttgttaaaggtttttcactatatcttgaatgtgatgtatttgaagatagtcaagtagagatgttttctcaaggcagaagagtctgtggctcaggaggaagttctgggcttgaaattagatgtttggaagtcgttaaagtacagttgttagtgaagccagtggggtagatgggctccacaggaaagagggaggcagagcaagaatagaaaaaaatacacatgcccctaacatcagcatttataggacactagaagggaggaagcaaactcagaaaataaggccaaggagttggaggaaaaccaggagagaataggatgtcagaaaccaaccaaagttaacaattttatcccccagattaaaattctatatataatgtataaactaaatatccattttttgtcatctgcacattccttgcatgtaatttgctgagctatatagataagtagaccagttaccatgcctctttgtcagtggatctttagcaggaaaaatgaggaactat

SEQ ID NO: 116330 - DNA, 1047 bp, Homo sapiens
tagtgtatctggatttcattaaggtattttataaaaataactcataatgtcccattggaaaattggggaattttgggaaatatgatttaaaatcatggagaatttgatggattcataactgaacaaatgtactaagaaggggttgattgatgaatatatattattgctagaggaatgcttcattctgagagttagcattatgtatcaaatattattctgattagcatttttgttaatgacttggtacatgatagaccatggaagagaaccacttgtacaataccaggagcaaaatgctaaatatcattgaaaaaagatctcaatatgttggctaataattctttagatgcacctagtgaaagaagcaaaatgaaatgaaaggcaaaaattatttcctgtgattaaagttttgcagcttatcatgtatttatatgttccaaataactataaacagttaaacttcagaaaaacaggatctcacattatttagttctgtatttcccagtgtgatcccaaatttcaatcctgaattgagtaatcgaagcccctggaagttacatatatatggagcaacactgttagttttggccaggcacaggcccccatggactggagctgtgcacgggccatgactaaattgggctttatttccagacagaaatcacttcctaagcaagaagagggtaagagagtcttggggagttaacatcctaaaagaacctatcaagtcaaccttctcctcatccagccagtttgaagcaaaattgatggttccatgcatatgttttctttcccctggattgcaggctggctgctctgtgatatttattaaaagtaaaacagccaaggacagcatgttttggaaagtaaatacctggtgttctgacacactttctggatgagccttgagttggtggcttcctcaaaaatactggtctgtttattcaaagttttttggaaactatgttttctctcgctttctctctctttctgattttttgttgttagaatatattttttgtttggagctttgaatgaagttagaag

SEQ ID NO: 116331 - DNA, 1073 bp, Homo sapiens
acctggtgattttggggattcaagttcctatgagaagttgaattcagacacggcccccacccctccaaccagggcaaggtccatctagattgttgctggagacagttctagggtcattcactggaaaaccctgcaaggcttagagatgggccagttattttattaatactgttacggcgaaagggactcataagagggctcaaatttgtaaataagaagctgttcctattgctattgatgaacatttgttatactcacttctccagataagaaacaggttccaggggactctttcaagagagcatctaccattaacttcacccagtccctaaggaacatctaatacagcttccatattcctagcagttcaatgtaaatgaactattaaatacagaggccatgaaacatctgctatggcctggccatcaaaatgcaggtgtaagcgccgtactgagtttttctttagtaaataaaaacattttagtctgattaaattcaacaacaacaatggcaaaaaaatggacatcttccttttgtagaagttaagtctctgccctcatctctggcactttcatggagatcacatgtacttcagtgatgtgtagttggcacatgttttctgtactggaccctcttgaggcaccaatccagcttcatcttcctgcttctctgagaactgccgcacatggggccaattcttctaggtgtgggtgacacctagcccacctaggcactcagattctttctgccaggtatttgaaacctggcttggagtaagtggatttaaggtgtgttaatggcaacactctgatcagataatcatgaaaaccctcaaaggttttaacttttctattgcttttcatttatttatttattttgcttgaattagctgattttctgcccgttgtttgaaactaaaaacactataccaaacacactccctttggggagtagacacgagttcaaggacatgagggcactccagaaactctcacaattacacagtattatacccaccagagattctaggaagggctcattgtcaagtgcccctcctaataacatcctctaga

SEQ ID NO: 116332 - DNA, 2276 bp, Homo sapiens
tgtggtccacactaaccagaagtttacaaggaaggcagtcctaggaaatgagcagcctaaccaagttgacacattacaaagtcatcatgctctctaagacccttcaacctggatttcctgccagcaactcaatatatcccaaacagaattcttcaaaacctgcttctccttctgggtcaccctattttgttttttaacagtgccactttccttctatgcttaaaattttctaatcttgttaactcccccttttcctttctcatatacctctcatgctaccaccaatctataacagttctatcatttttacctctgcagtgcccaccccaggtggatgagttcaaactcaacaggtgattatacaatcccacacattgatttcatatttagtttgatataagccccccttctggaaccccaaaagaaggaaaaggccattttcctctccaaaagcacatacaggggagtgagttataacgaggagctagtatgctgctatcattatttaaaccaagaaaacccactgtagacaagatgaaggatctaataaaaatgtgttcttattcctgattctaaaactttaacagctgggctttcccatgtggaataatgttacataaataactcagccaggaaacagaggggctgtgaagaagtccaacaaaatgatagatgatcttggacagtcttagtatcacacccaatggagttagaaggaaataagtgcattgaaggtacgggtgagctatgttgttatgtgtgagcagcaaactttacagaacctgacagttatctgagtcatgtatcactaattctacagaagttttctttctacttaagtatattaacactccctaatctattccatagggaccttttctgctccatccaaatttgtcatcttttaattagtcatggaagtctagataaagcgggtttcagaaaataaacatgttgagttttaaaactaagctctcaattgttatgttttattttaaaggggacaaatatcactgagtccatgctatttcgtattcttgtccacatagtctagtcaaagctcatgttgcaattcctactaccacatcttcatttcactgaagtcgctatagtcgcagttatagcacaaatgccaaaaggcattatgagaaaataggagtgagggataaaacttcagcctaagcaactgtgcagttctccttttccatttacatgatgggaaagtagtgggagggagctgcaatccttacgggagatacagaacttaggggcaagtgtcatctccctcaggtttgggttagaagaccttcaaaagccttcccagctgtgaacaccaatgactgtcctgtattggcagtacaagttgttcttcactggtcctcagcagttgcttaaacatagacaaagaactcttaaagaatgaagacacatttggttttttccagccatgatcttggaaatcccattgtagctggaagttctacatttgtgaaatgtatccaggaatttaccttcctagaaattacgccagggctcattttgggctttttgaagagttacaggagacattctgtgattataacagtggttacttcgctaggaaacattcatggaacatgtacttgttactcttttctttatgtaattcttagatcaaccttgtttcctatgaataccggcaaaaccaactcgtccattgtctacactatgccaagggaaatatccacatcaacttgaaataagataaggagaaaaaaatagaaagaaaattacttctaggcctttcattgcttattatttgcccctattctgccctccgtgtttttacttgctgtgatccaaggcaacacactcatgtagcagctcctaactgtgatcatcctagcacagtatgagtcactaagcaggagaagcttcttattttcctttgaattacaagccctgtgcttgagagatggttcaataagccccctacagaatcacatggaagacaaacttccatgacaccattagtctcatacctgaaagtaatttaaattttttcccttacaaaactaaattgtagaaaattcagaaaatgcaaatacacaaagaaaaaaaaaaggcttccagtaatcttaccagtccaaaataaccactataatggatcatataaagatgtccatgtacagataaaaatattttttatgggatagaatagttcatgctattttgtagccttcttttctcccccttttgtgaatgtcttttcacaagttacagatttttgctattat

SEQ ID NO: 116333 - DNA, 5741 bp, Homo sapiens
agaaaataaacaatatttctttggcctcaattgagttgagatcgtttctcttggatctctgtcctacattctgcattgtattttttagtgtctgagtttacacagtgacaaagaaatgatgctttcgaggttttctaaatatatgaaaagaagatcctcttagaaataaattgatatattaatagtttagcccattctgtattgtacttgttttttatgttgcatctagtttttgtcactgccccacccccaatgtgcgggcctcctagggaagaatgttatcttgattcttatggtagtataaccttgtcatagccaggttagccactcagttaatcaagatgaacatctcctttttttcaacaggtgaacggaagagtccttatgttgcagtatgctgtatagtaatggccttcagcatcctcttcatacagtagctggggaaaatgccagaatgtagttgccatcagatttgattgtgaacaaggactgactgcagaaaataatggaaaggatgtttaactcttttatctccgaacattgaatgagataaatttccagatgctgttctctattttaatgttattggaccaatgttctgtataaacaattaagatgtaaccatttaatagtctgtaacaatcaacctcagtactgtcactacaatattacattctgcaaatgttattctgttgtatcagatacaaaattttagtgaggtatctctaaggcacatagtagaaaacaaaattggttaattactcaagttcctttcactgtgatttggaaatgatttaatctttatagaatgagaaccttttttggactagcttttttattaaaatggctcaatttgtgttgataaggattgcattaatatttaatagtgcttgcttttcctctgggcacaccattttgatcattaaccagagtacctctactcttagcaaactctagtttatgacaagtatttaaaatatttaaaacaagcttatgcagttcttaaggacgaaggtaaatgagatgtaacttaaaaatagtattgggaaaatgttgatagttaacattagtggatttagactagccaaatgacatagtaggctctgaaacatcttgtcaagtatatgtattttgtgcatgaatttttgctggaaagctgtctttctctgaaaaacacaacgttcttagaatgaaaagaacaattataaaataattatcctatatgtgtttttcattctttttagtgtcatggcttcaaaaatgaaacatttattttaattgccgtaaaggaactgtatttttgttttgttttttaacacagcactttaaatccagtttgtgttttgtcaacttgaactggaatctcttttgttactttggaggtgataaatagttttcaaatctgctgatttgtatactgtggcacaagtatctttgaactttgatagtgaaaggagaccttcaacaatttttagtctaggcgagaggaatattaggaatgtgacttctaaattttacaatagagcagttattttaaggtcatggttaacatttcttaaggttcaactaaaattcagttaaaatttcagagctacgaggaacttaaatcttagctaaaaattacctgttgtagatagtattaattagattgtttgcagctattaattcatcataaagataaaatgaagaaactctccctttttttaaacaaaaaaaattatttctagattaataggctagtagttatttctgcagaaacaacgtatggaactgaaagccacctatttttattttagactaatttaaaccacttggaatggattctaggaaacatcttaagcttgtgtgttgcctgtggtggttttttgtttgggggtgttttttggttttggtttgattttctgtattttgttatctggggattttttgtttgtttgttttggtttggttttggttttatatttttggcatgtctatggcagttaaaagtggtatattttgctttagatagggaatcaggttataatcattgttcttcctctaaactgcctcttgggctttacatcaggtcaaggatttttagggtttctcaaaaataggattcttgtcagtgtatgcatgctgagtaagtcacctttctggctctaatttctgggtggccatctgttgtccagctctgctgccaactggactttccgaaagccatgtcaactaattttttatatgctaagacaaatcgaatatgaaaagaggaagaatattctagatattctaagacatttcttaatttggcatctcagaggaggtaggtggaaagtaaaggaagagataattttgggggaaaatttgtggaaacatacaaaacgttttgctttgtatagatgctaaacagagtgggaggcagcatatttgtaacaacaaccattctgaccttttgaaacacaagcttttggagaagtcagggagagacacagtatgaataaaagcaattaacattttctttaatgtatatttttcaaagaggaccacggaatcctgttctctaacccaaggggcagtgtaggtggttttaagcccacagaatattgagatatttctcttgtggttttggtggggtggtgggatgcagaaggttattaaagatcaatttaagcatcagatagactatcccttttatttttttaacttttaggttcaggggtacatgtgcaggttgttatataggtaaactcatgtcaagtggttttgttgtacagattattttgtcacccaggtgctaagcctagtacccagtagttattttccctgctcttctccctcctcccaccctccaccctcaagtaggccccagtgtctgttgttcctttctttgtgtccttgagttctcatcatttagctcctacttctaaatgagaacatgtatttggttttctgttctgtgttagtttgctaaggataatggcctccagctcagatggaatatctctatcatatagacctgttgttacagggcaggatcggatgatggacactgaagtcctcagcttgctaagttcagttgctctccctagcctccttttggcttcagagtcttttgattccatctatcctggtattttttgtgtgctgatgtttagttctggattggcttcagctgtgctaataggaagggcgttgtcttttcaagcaatcttaaaaggtggtcaatcaaaaggccagagtctgaatcccttctgtggcttaaataatttgaggatcaagtccagtgtcttgttaatccctgttctactgtgccagacactatcttgaatgcttttatatgttcaggttcaaaatcgctctttcataccaggggatgatagtaacgtgtaacttgcaatagattccttcatcttagtaataagatgatcagtctagttaggacaaaatagagattgaataaattaacttttccaagtttacagagtaaaaatgagcagatctctgcctggttttgtgaaaaagagttagcactggtaaatagaatatttctactcctacaccattctttcagtatatcatcactgaagacaggaagataggcacacagattcttcctcgtagtaattcatagtgcactaggtgaaagagatgaagtatgtattaaaagtacaatgtgatggcatttattattcagataatcccaggattctagaagaaaataaagaagagtgacagttcagttagggtgtgaacttccagaggagcactgcttaagctgaacttgagagcattgtgcaaaagcacagtagtctgttaagaactagaaataacctagcttgtgccacttcgggagtattaagacataagcctagaaaggtaggcaaaggttagatcttagactgtcttgtatttttctcattcctgttgattacctacctcaaaattgaatatgtttttcctcctgcctaacacaaaactactcaagggcagaaatttaaattcttccttggtgtatgtgcaaagaaggttgaatatattcatgcctaccttattttggactaggaatacagtagtatactttccgaagacttgcctgaatagtatataaggtggaggcaactgactagttaggtcagtatttttagaaactcttaatagctcatactcttgataccaaaagcagccctgattgttaaagcacacacctgcacaagaagcagtgatggttgcatttacatttcctgggtgcacaaaaaaaaattctcaaaaagcaaggacttacgctttttgcaaagcctttgagaagttactggatcataggaagcttataacaagaatggaagattcttaaataactcactttctttggtatccagtaacagtagatgttcaaaatatgtagctgattaataccagcattgtgaacgctgtacaaccttgtggttattactaagcaagttactactagcttctgaaaagtagcttcataattaatgttatttatacactgccttccatgacttttactttgccctaagctaatctccaaaatctgaaatgctactccaatatcagaaaaaaagggggaggtggaattatatttcctgtgattttaagagtacagagaatcatgcacatctctgattagttcatatatgtctagtgtgtaataaaagtcaagatgaactctcaagagcctcctacttttgtcttattgtcagatatgtgaaagcagtttttagaggttagaaaatggaaatttccacctttctagtaggatgagaatagagaaatgttctattttttttttcctacctgcatttgcattcatggatggccaggattcgttttggggtattatttttattgttgttttgcatcctactagctattggatctactatattgctgttatcattgagtatgctttgaagagccttaaatgactccagcagtttgctttgggtgtgaagtctttaattttcccagagatggtggaaatccgattctgagtgaaagtgacagttatcaattactgagttattttcaaccttgtcctcaactgggagccttcagatgcccaaacattctggcaagtaactattattttctgtctaaaatctgtttgtgagcattgtccatcagtcagattattcagccaatttatactattattagtatttactgagaaatatgaaaaggcttttgtcttgctttgaggaatgtggtcttcctgctgttagcttcccaaaactgaataaacacagaccaacctttgtcagacctgtaactagaaggaatttacctaaccaaatgaattgtagcaattgtatttttagttagatttagatctaagaaaatacttcagatataaattgaaaggcagtatcttagttgtttctttcagtaaatattgtaaacgtaccccactgccccattaaaccaccagttgataaaagacattataggaaaatcactaaatttccaatttatattaataagtcaaaagaattcaaaatggctgtgcttaagaccaccaaatttaatataaccaggaaagcaagatctgtttttaattcagagggtttacattaatgtccttactgataacagattcatctaggggtggaagggagggcaagggcaagggagaaaacataaatattggaaacaagggtaagttacttcacacacactttgtggaggatgagaacactcattcagaaactgcgtgatacccagacactactgtttgagct

SEQ ID NO: 116334 - DNA, 2220 bp, Homo sapiens
aggaaacttccttaaaaaggtgatgctagagctgaattttgaatagaataagtccacctccatttactttaactggaaacctatgattttgtttgactgtggaaacttatgaaacttatggtttcttatgactcttgtgttaaattttaactttggaataagactcaaactattaaatacaagctaagtatcttttttccaaaatgcttggagccaggagtgttttggatttcaaatttttggtgggattttggaataattgcattatacttactcgttgagcatctctaatcagaaatccaaaatgctccaatgaacattttttttttagcatcattttggcactcaaaaaattttgattttggaacattttggattttggattagagatgttcaacctgtaatgaataacttttaaaaatccaacagtgaaagtacaggtgcttgctttctttctccaaaatctattagcctagtatttgtcaactcatggaaaattatagcttaaatttaaaggatgtttatccttaaaaaaattcagaattaaaagaaacttagctagcatttaagtctgtctgcccattctccgcccagccaaagacttagaaaagctagtaattctgctaaggccataaaaccagctattggcagagcttgaagactgtagaagacctcaagattctggttttaagtgttgccagacttgtcattctgcttgccttcttgaagaaataaaaacatgactctaaatgtggaattgtcaaacattttttacctatgcagtttttcttgatattaatttttcttttttttttttctttttagtctgccattttcaattttcagagtctattgactgtaatcttgctgcttatatgtacctgtgcttatattcgatccttggcacccagcctcctggacagaaataaaactgggtatgttactaatgatgtctaatcacccaaattagttcttacaaatgttcaatgtaagttaacatataaattattagataatttaattcctacatgtaatttggttttataataacttttttcattttcttcctgttaaaaattcaaaaactttatattcacaatatcttactaaattaaaaggtaaatttcagaagtgacctaaaatgtgttaagagtaaaaaatcgcatgagggatttaacctactgaaggtgaaaatagatgttagttgtccatcagtttttatgataatactccatctccttgtagacactgtcttctcttcattccacctttttcagtaaagtcctgttgaatttattcttcagtattcacccatttgttgaaattacgttatttgttgcttggctgtgcatgaagtctttctatccaagtagacagtttcattgtatctttcccttctgtacccgccaactgtaaacttagaattaaagcatatggtagactctagtaaacacttattcctattgatgactttattggaattctaatataatgcataatgtccatctaagatatttaagtgtttatctcattaaagaataattacatagtagtagaatactttccctatgctatcacgaaaattcttcttcaaaagcaagtaggttgcatgtggaaatgtctgcttctcattccttgggagcaggaatatgttcataacatgctacattaacaaaggagttctcagggctgccaaccttctagtaaaggttgagtggtagtatatttctccaacataaaagaccaaaaagagcatgcctatttttacattttaaaatatgtactaatacagtcaactgtttgaaagctttttttaaaacctttatttctacttatatacgtgttaagcaccattttatgttgatttataactaagaattattttgtatagaaaattttataggcctagtctctttctgttaaaattacatgtttttatgagactcgtaatcttttattatactgagaatatataccatgcttaggtggagatatctagacagattggataaagcaagttcttgatgacttcactgtttaaaataacttcagtttttgctacttcaaataatatagaactaagcagcagaaaaaaagattactacatggtctttatcctggtttcatagacctgatagcattatcagcaaatatacttattggtatttagccataataactaagcaacgtaattacattttttaaatcaactaacagggt

SEQ ID NO: 116335 - DNA, 1772 bp, Homo sapiens
aattaactcagttcaataacactagttgtttcaagcatatcaaaagatcttattgattatgagttgtcagataagtctacaatgcagagggttagtaaaagagcccttgatgacaaatcgtttggaggcctccattgccatgttttagaagaatgacatagctctcagagtaatggtcaagataacctgcgtactcagtcttacagaacctgcgtactcagtcgtacagatcttttgaaagtgtatatctcttaagaattaaaagaagtcagaagaacacacactttccagtgtgcaagcaccttcaaagcttgctgcttgatagaatagaaaatctgaattccaggaggtgatagaagatgtggatactgaatggaaattacctcaggtctttattttaccctacagcctaggtccttaacataaatataaggaaatttgcatctttctacttgattttccaaaatattcttgagaagtaagcatatatgcaaagccatacatggaggtttctcttgaagagttaacaaaatactgtattcagcaatctgatctacactggtttttgaatgtgtattttttctttggaatccaagtatgctcttggatttgttaaaatgttcattattgccagttgcgttcaagttcctgttcatttgacacttttcagtgacttctctgtgtactatattttaatagtcacaggggattgatgaaaacctcaatagaatagacaatcacagtacagtatgatgtgttctataacatacacattgttatgtgtatgtattatgcacatacaaaaatcctgactctgcttggtatagtgagtgggaacaggaaagacatcagaggaggtgaatcttgagttgagattggacgcatgagtcagttcaccaagcaggcaagaacagatagcatgtgcaaaactcaatagagtaccttggaaaaggtttcatgacttaaaggccctgaaaaaaattaaacaaggtaaatgaatttgacttaccaccttttaatcatcttttcctctgttttgtgattaaatatgcttaccttttcttagattcctcctttcccttttaataacatttttctgttgaaaattgcaattattttttcactgaagaggaacatctgtttcctttaaccctgagactaaaattttatgtcaccagacaacagatgctaagcattaaggggaatgctataggtggcaggctaatgtccgtaagttagaaacacacttttgaccagagtctgagtacatctaaaagacttaccacctaagattatttgttttaaactttagaggctttaaacccccagaacaaagttgtatatatcatatatttcatacttgtaaatggttttcttttgtaaatggcttcacacacaaacgtatatacacactctactttcctaataggcatgtttttaagtgcctttttatcttctattatgaaaacattcaaacataaagaggtagaagcctataatgaaccctcatattctcagcattttatcatcaaccctacccctctcccaccacacatgcactggattatttagaaaccaatcctgaacattatatcatttaagcatgttttctttaaaaacacatttggagaaggaaagagaacacattacaaagtcatgaatttagatactgcattaggaaaatgataaacctactttgaagatttgttttccaaccattttactgtaggaatcttttgcttaaaatacagtaagattctcattattccctg

SEQ ID NO: 116336 - DNA, 1014 bp, Homo sapiens
aattcgcctatggtaaattttttttgttatatatcttttggcttaaagttgcattttccaaggacctgtggatgacgttaagtgagggcttactgttttcgttaagcacctactctgacaggtgttttattttacatacaaggttttattaaagtcgtattattggccacatttttcatatgaagaaacagatgcggagagccaagtgtcttgcccaacatcacactgcttataaatagcagagctaagatttaaacggaaccaatttgtcacgaaatgctgtgccctttcaactatgcaacaataccattaattgcacaaaaatattaagaaaagcaaattttttatgtcaggagtgggtgaggaggtagcagttcagataattctgttgctaatattgcttttgcatcatccatgaaaatggcatcacagttaaaaggcaagtatcttagtattataaaaatagttctgatcttatgaacccatgaaagggttccatgaaccacacctttgataaccacttcattaggctaataggaatctgatgtgggtgctgatcttctctagcaaagcttttgaatactgattgcaaagaaaaacttccaggaggctgaggcaggcattcgagactagcctgaccaacatggtgaaaccccatttctactaaaaatacaaaaaaaactagccgggcttggtggcgtgcacctgtagtcccagctgctcgggaggctgaggcaggataattgcttgaacccaaggggtggaggttgcaatgagccgagatcatgccactgcactccagtctgggcaacagagtgagactccatctcaaaaaaaagctttcagggaattttaagaaactgtaggtgcccagaccagttaaatccaaatttctgggcaatgatggctttttaagctccaagtggttctaataagcagttagatttcataccatatgataggacattttatcagtttttgtttttttcttgattgcaaggtcagaggacttta

SEQ ID NO: 116337 - DNA, 1292 bp, Homo sapiens
ggatcctacctctccgtgactctacttccggtatcttccaaaacgcccgctttcacagatcaaggttttgcaaccaatgagagtatcagctacttccgccggcctgcgggacgtgatctaaatcccgccttttccggtggagaggagcctatcctagtgtcttaaccgcccgtcttggtaggcggtgccgtgacaagcccaaccggacggctggagagggcgagaagggcagacgggacatgcagcctcttccgcctgagccccggaagggtgatgtggctgcggcatcgccggcctcgctatggtaagaagtggggctcccaggtcgcggttgatcttcgagaaggggttgtggatctagactagggctggagtttgtgcggcagcccggggtgtgtgggcccggagctgagaggccttggagccatgtggtccctccacggccaaccagagagaatcaggacggactgtccgaggaagactgctgggtcggcagcccgcccctcatgcaaagtccgctttcctactttgtttaggaaaaaaaaatgcgttggtgtgttttaacacgttggctacgtagattatgtgtggtcattgaccctttgaagcattagcgcttctcgagtttccgcttgttttgttgcaactccttatctcgccctaggggctttactctggtgttattgtttgatttttggggggagtttcttttggcaccaaactccataccttcattttcatctgtttagtcagtagcctctcaagacccttccaccttcttctcttaactttgaaaatgctgctttacaagctataggttttaatagttaagagttctctgcaaaggtggattgcccttctaggagcttaatgtacttattggagtggtgtctagcctcaggccttcctcctcttttacctccaggtccatgtgccaaatgttatgtatatttctggacaaaggatgcatgcctgcaaatagacccaaaaacaactatgactccaaaaagcttgagtctccatggtgaaaaattatgagcctatgttcacagaagttgctgcagaatcccatatagcaataattcattttcttctctggacgaatttaccacctggtgggaagatggcagttgagactaggaagactgccactcttaattcttatacatctttctagaaactgaagttgaattcttctactcgtagtgcaagtcaaagataactctttttattatctcactgtcagactagctaaaaataagatgcatatactgtgcttaagatcaacagta

SEQ ID NO: 116338 - DNA, 1035 bp, Homo sapiens
ctacctctgcatcttcattggtatatttaaaagatatcttgaactcagatgtcccagaccgaactcctttcctcccaaacctttcccattctttctcatctgaattgatggcaactttatacagccagttgctcagttaaatctttggagtcatccttgactccttcctttctcttgtattccaacaaatctgttggctttttctatgaaatatatctagaattcaacagttttctactatttctgctattagtatactgatcatctcttgctcagatttttgttattacccactatcatttcttgcctggattatagtaattgtgttctgttctctctgcttttttcagtccttgcctccctacagtctattctcatatgtcagccagagtgatacttttaaaatataaataaaaaattgtgtatttacatgtaagattctaaatgcaatatgttatgctagattggatcctgaaacagaaagaggttattaatggaaaaactggtgaaatccaaataaagtctatggtttagttgatagaaatgtatcagtgttggtttcctggttttgataaatgcaccgtggtagtataagatgttaatattagaagaaattgggtgaggggtatatgagaactttctattatctttgtaacccttctgtaaattcagaattatttcaaaataatatacagaagaataaaacattacttttttgcttaaaaacctttcgtgaatcatttgattcatagtagaagctaacagccttacgttggcctacaatagtctacatcagtcttgtccaacttacagctcacaggctgcctgtggcctatgatggctttgaatgcggcccaccacaaatttgtaaactttcttaaaacattatgagatttttttttttttgagccctttaggtatcattagtgttagtgtattttatgtgtggcccaagacaattcttcctccagtgtggcctaaggaagtcaaaagattggacacctctgctctacatgatctggtctcccattacct

SEQ ID NO: 116339 - DNA, 1943 bp, Homo sapiens
agtagagacggggtttcaccatgttggccagactggtcttgaactcctgacctcaggcaatctgcccgtcttggcctcccaaagtgctgggattaccggtgtgagacaccgcgcccagctgagatgataatttttatcttcattacttggacaaatcattttccatttatgggcctctgcttttctcatctgtaaaaattgtgaattaatattgaagaaaactgtgaatttactgaatgtattatttactgaatttaatggttgaatctaatggttgaacctattatacagtttttttgttttgcttattttcttatttccttggtgtttgtgtagctgagaggccagtacagaaaacattatttgagttacagtttcttttaaaaatattaattgtattctcccattacaggtattaagaaatggagagaaaaataagcagaatccaccttgtttctgaacccagtataactcattttctacaagtatcttgggagaaaacactggaatctggttttgttattacacttactgatggtcattcagcatggactgggacaggtaatactaaaaacaaagtttttataagtaaaatttaagtgtgctattcttcagtcctcagggatacttttccattagatattgggtaaaactgatattaattttacttgctattgctgtcaaatttatacacaggtttgtaatatttaatgccactttctatatttaatagtaatagaaaaacaaacgtgtcctagaaaattccggttaccatttgaatcttagtaacttggatttgttcagaggtttaaaatgacctctttatagaaaatataaatagtactttctaaatacatcttttctcaggaccccagggaagaagtctggggcagaggaaggagattggttaggtaaatgggtatgtgtgttgccttggggcaatggggtagtggtgggttatttatttatttattttccccagtgaacatatattacatttgtaacaaaacaggaccagagtctaaaaatttgtaatgcaaggttcacacccacatttaggatcttggctgtgattttaggaaatagatttttttaactctttggtaataatattttaaaaatgctaatgaccctcaaatcatgtatggaacatggtggatataaagtaaaaatatgtagccttatattttccttatatacgaagttttaatactcttctaaagtatcttattgaaagatttaaagaactatttttataattatgcaaaagtcttttctagagttatgttgtgaataatgttttctgtaagataatttttacatgttaatttacatactatttatatcttctattaactttagaaatatttctctagaatttgttaccatgattattatatcgtctttaaaattacaatacattgtaaaattttgtttctttcttgagcgttatgaattatgttatacaacacagtcaaattgaatttatacttacagagtttcaaaaaaattgtcttttttgacacagaacaggtaatgttgatgtagggattcctgtaaaataaagaattttcaggggtaatatttgcagtacttattatgatatctatttaagctacacatttatctgtaagagaaagcagaaatcagattggttgttgcagttcaagagtagaagatttgtcagcttggttttatgtatgccagagagattatatccagaagacaatatttcttgttttagggtgaagagtgtataaggctaaagacaagggcaatagattaatgctggtcatctgggtaagaagagcagttctaacaacacagcttggaagcaagtcctaggggaagtggttgcttgtatgtaaggaatactgtatttataactttaggtatttctaattggcaaatggcgtattctgtatacttagttgttgtcagac

SEQ ID NO: 116340 - DNA, 1045 bp, Homo sapiens
ccatattttctgttgttggcacatgatatgagaatagtgagctccacttttgcttttgttttactctgcccatatgagtgagaaacacagtataggctattgaatctttgatgcaaggaagaaagatgttataaaatactgaacttattattcattgtaggaaattatctggctttgacctaagagcagttacacaaagtgggagtttctgtaataatttacaatgcgtttcatctgaagacagagaaagaatgtcaagggtttaatgtattttacgagatgtgagtctaaattaatgcatttctcaaaaattgctagttcagtaaaaaggaataatttgatttaaaaatgtgtagtatagggattgattttacttgtttgaatttctgttacatgtgataaattagtactaacagataaactaatattttctcatgtgtagtcatttacttttcattttaaaacttttgttaatatttcccatagtttctgaatcagagatttcccaagaagctgatgacatggcaatggaaaaagggaaatatgttggtgaactgagaaaagcattgttgtcaggagcaggaccagctgatgtatacacgtttaatttttctaaagagtcttgttatttcttctttgagaaaaacctgaaagatgtctcagtaagtaaaactttccaaaatgttacatagtaaaatgtcagagcatttattgaggaattatatttaaatttaagtgactactatattattcccagaacacctcagaagcaaaagcttgaaaagtacttggtttccaaattagaagaatacttcaaagctaaagtcattaaatatattaatgaatcatgaaaaataaatattggaaaatgtgtttagtttttaatgcttgaaaaattttaaagtattacagagttaattatacaaaagaataatcttgaaaaaggtgagatcagaagttttaggccatcgtgacaggtcttattgaaaaaagttttgtgaaatattgattttaagaaataaaatcaatcaaaatatatctttga

SEQ ID NO: 116341 - DNA, 1033 bp, Homo sapiens
ctggagtgcaatggtgcaatctcagctcactgcaacctctgcctcccaggttcaagtgattctcctgcctcagtctcctgagtagctgggattacaggtgcatgtcaccatgcccagctgatttttgtatttttagtagagacggggttgtgccatatgggccaggctggtctcgaactcctgacctcaagtgatctgcctgcctcggcctcccaaagtgctgggattataggcatgagtcactgtgcccagccagaattaccaatttctaatgtagtgaaatatttaaaatttttagcttgtttgtcaatatttatactcatgttttgggagcagtgggtcagcaattttcatgagattgcttttgagcttatcctcccaaaacttcccttaggctttaattggcttttctttatagataacatagatccttttattttaacttcattctcatttgaataaatgttgggcgaacagctacacactaatttcttttctccatagagtgcgaacccatgtgacccttcctgccttagtgctcttcatttaacagtagattgttctggttgaaagcatactatagtgccagcatttggaactcctcatctcttcagcacaaggactgtcactcacacaagagatcatttgtgtgctttgggccactgttttccctctacctttaacaatttatcctgattttgccatacagactttgtcatgctaacaatgcatcttaatgaataatgtattcatcttccttttttgctttcatatctcactctgtttctttagaaaaatattcatttatgagtcaaagaaaaacaattatttttgataagaataaccttgggctagtcatttaaccctaatttcctcatgattctgttttttcatctgtgcaatttttaagtgatttcttagattaattccagcttagctaacatattgtagagctacatatatatgtgtgtgtgtgtgtgtgtgtgtgtgtgtgtgtgtgtgtgtgtatgtatgtatatgtatgtatatataa

SEQ ID NO: 116342 - DNA, 1069 bp, Homo sapiens
ctgaatgacattgaagtgtgttgcattatcttctggtctacaatatttaggttttttttttgagatacaggatatatatgtaatggatatttcattatgtgttatacttttgtaatatgctatactttaataggataataattaaaggcagctttaaagcaaaatgaataactcattcaatacaacaaaaactccaaattttctagtgttgttaattataattattgcttttctttttgtcttttgaagcagtgatcaaagaagttgcatttctgtgtgattcaatattttgaaatatttagttcaactcaatgtagtatttcatcaaaataagatggtggtgttaacactgatttataaatgtaccaatatgctaacctgctaagctgctatctggcaggttgtaaatattctatatgatagcaattttttagggttttgggtagtgatagcagaacatgttgtttctccctattaagataacaatttggttggtatactctgttacaacccagctgcaaaaccaaagtggaccacccacagagagtccagttagagattactgaggtttggctggctaaactactaccacctaaacaaatatcatcaccagttctgtgactcagtgcttgatctaagtaagtgattacttagaagagaatttttccaagtgcccaagcttctgagattctgtatttaaaaaataatagaataataaaagcaggaagaacatcctttgaaacaaattttaaaacctgataattaaatttaatcttctattcgtggctaaattataatactttcctaacttttggtatagcaagcctcttattattttaaatgtgactaaatagcttcatgtgtaataccagcactcttcataaaatattttttgtattgtctgtgttttgccattacaatgagatttttgagaatataagaaatgcacttgttactctgatatcattttattggatatccttgaattgcacacattcgtagcagtgtctcataatgaagtcagtgtattccttttttgggggaagcttcttaatgttaaaagcttcct

SEQ ID NO: 116343 - DNA, 1043 bp, Homo sapiens
tattcatccacatataatatgaggctttgttttgtacttgtcattacaataaactttgaagtgtttaacacattgtgtctttgtggagaaatggtcatcaagtaagacaattttagggaatactgaaaatgctcttagcttgagatgtagcaaattgtatcagaaacatgtcccttgagagcagtgtggctttgaaaatgctaggagttgggagaaagatttgtttttattaatgtggagaattgcaaaagttttagaaaatccacccaccatgtcaaagatcttgtgtgtagaatttttaaagaactgctatagtagagggcattaagatttttaagtaaaataaaacaaaaacctattggatgttaacttgaaagataattttaaaaacttaccctaagttcttagaaagtcttctctaccctcatgacctctgctatctatataagaaattagtgaactgaataaatctttagcctctcactatcttaaattaccatagaattaaaaactctagaatataatgaatttattctatcagtacagcccatgagtgaatttcaaacgtttaagttgtgcctcagaggaatttttgttatgcatcttttaaataataatattttcaataaatcattccttataaaagtccccaaattgttgctctttagacattactaaaatcaaaaacaacaaatttaaacatttacagtttgggacctaatttaagcatgtatcacagtttattaaagttatcttctgttagaaatagctcccttagttctggagatctgttgtgcagcatggtgactataataatagtgtattgtgtacatgacatttcctaagagagatcttaaatgttctcactacacacaaatgagaatgtgaggtaattgatatgttagtagcttgattgtggtaattatttcacaatgtgtatatgtatctcaaacatgttgtacaacttaaatgtatacaatttttatttcccaattataccttaataaatctagaagaaaataaaaatggtaagttaaccaaat

SEQ ID NO: 116344 - DNA, 1082 bp, Homo sapiens
agtaagataattttattatcgtaccaataatacacttgaaggaaataagtgctaagaataggggagaccaaatgagtagaaatacaaaataatctggagaatgtgtattcaccttacaatgtaacctcaaaatacataaagcaacaatggactcaattacaaattgaaattcagaaatacaaaatcacgttgaaagttttaaaaacgcctctctcaaaaaccaatatattaagcatatgagaaaatagatttgtacagtgtattttaacaaggttactactataatggaaggaaggatggatggacagagatctcttctagcaattagagaatgtacatttttttcatgcatactaaaacatgacaaaatttaagtatgtactaggccataaaggaattctcaaccagagaccaacatatggtccaaatttctgtagtaacttaattacaaaaaaattgtcttcctcacaaatatcaagcacacaaaaacacaaacacaagaaaattaatgggccaaagaagacattaaaagaaagattatgaaacttttagaattgaacatcagccaaaatactgcttgtcagaacttgccgctaatgaattagcataactttaaatgcatattttagcaaagattgaagattgatgaaccaggttttcaactcatgacatatgatctaagaaagagggtgtataacaaagagaatccccggaatgatgctgatgggagctcctagatgaccaaaatacaattgactcttgcagcaggggttggtcagagggcctggagggatgaattcaagggagctgtgggtggggttaagtgggtgattatctgatgtgctcaatcattttcaattagagttaaaatttgccaaatctgaattgtttgtaatattttccccattcttattttccatctattttgtgcttccatttttaaagaaatatactttgtatttattttctaatttcttagaaaatagtcatttttccaaagtttaaatattatatttccttttgaaattatagattcttttatttcttactaaatttaaaggaagtactcttgttctatttaa

SEQ ID NO: 116345 - DNA, 1128 bp, Homo sapiens
ctcagtctttctgtgattttctttttcttgtgtgtttatccaatttagcaatacctgggtgtcaaatttatttatccaaaacctggacttctaaaaacttaccatgaacttgtacatgtttactcggtttaaaaattaaatgaacctgtgggagctaccgtgctaagaaggggctttgactgtgacaggcacaccaggcatcatggtgtcatcttcaacttatagccaaacactgatttataaaattatactaatttttaagaatgcatattctgtagttttgtgaactggtttattaaggggaatgccttttcctagttaatttatttttaaccatggctataagtgccaaagcatttctcataattgaacataaatctttgatctggccttttgagtgatacaatcaaagaaaaatctttaaaaattttttttgaagagtcgttttgtatctgatactgtttctctatggatatcacttctcatataactatgtatcttaatatagactatattgtcagagtaatcctttcccttccactgcttctttagttttaggaatttatactttagcactccattgaatgaaatgtggttactaaattgtcaaaatacagtaactgctgtactatttgaacattttttggccatggataagtgttctcatttgagattgctttttgaaaaacaattcgctgaagtggaactggagtaatgcacaacagttgatttcttttggacttaactgaaactatgtttctggttttaaaatttgctaacaccaaggcactgttctatgtaacatgacttatttacatagttaccacacaacagttggtatttcatacagtaacataatttcattgcaaacagtaattttagtactgcaatagttcaacagttttgtctggctacatatgtagttagagcttttaaaagttaaaaattcatggtgtggtattataatcatagtttgtattaatttttatgaaaatcaatatattagcattgtaggccttatactactactctcttttcatttatataaagcagatagtctgattaatcgttctataatgtagactgccttgttcacatacatggtaggaactaaagaaagaatgttca

SEQ ID NO: 116346 - DNA, 1059 bp, Homo sapiens
atctgcccgcctcagccttccaaagtgctaggattacagacatcagccaccacacccagctgggaaatgattcttggtaccagttaatgaagttgcatcataatctatttttagataaaattattaaaatatttgtttcttaatattataaataaagcagtaatattagcatatatgatagacatgagacacgttttaaatcagcaaattacccccttatcaattttctatttgtaattgcctttaaatattatttctgtaaaaggacttaaatgctaaatatgctgttttttctacattacctataaattgatttttgttcctttattttgaaacagcctttaaggtaggtttcagtaaaagcagaccaaatgtgtgcaaatgcattgactttaaaacaagaatggggacaagaaataaggaagaggaaaccttctgactcagaaaagctttagttttagcataagccttaatttttagtacttaacggaaggagaattgattacgttgctcccaagctctgttaggtagtaaagcagtaacactatcagtttgttcatcagaatagctttaatacctttttttttttttttttggttttgattctttaaaaacatatcgagcttgggtcttattatatgaagggcattgagaaacgtgatgaacaatattttatacagcaattatgaagccatttctgcatgtagcttttctttatattgagactcaattcattgaaattccaggataaaagtaattctaatagggtcagagtgatgtgatttaattatgtagcaaatagatttgttcagtggtgtacagaaacaagaaaagagaacgtgaagattcaggttggaatggagggctacaaatgtttcagaaaagtggatcatgggctttgaaatgggtagttgtgagagataaagcttgagaggtaaggttctgaccaagaagccttgtgggccaggaaggctttagaatcttaagccaggattgacataatcagatttacatcttaaaatatcactctgataaatgtagagaaagaaacaagtcact

SEQ ID NO: 116347 - DNA, 1065 bp, Homo sapiens
aactgataaataaagaacagctgtgacagtaaccttatatgtcaaactagaaactggagtaaaaatttaaaaattgacacaacagtacgatatagcttttgtgctaattttctggcgttaaaatgatacttaaattgctgcttttgttgtgagacagaataaagatggactgggtgtagaggtagaacacagaaatattttatacttctcaactcattaagcctgatgaggccctttttgaagtccagtgcatctaggcacgtggccccttgcatctgtagtaatgtgcacagcctagaacagcagcagtgaaggtgaaagagtgcctcctgctcctggctatgcaccgtgtgtatacgggccaaatacttttgagaattaaaaaaaaaaattaatctgagtatttcaagtaaaatccttttctttgattaaatttatagatacttttagtttatttttattctgtagaataacagatgtccttatctattgaaggactagaaactggtgacaataattagaaaatagatataaaaaaagttgtatacttttaagaagaaatgacatttcatgtttattttacactgattagctgcaaaaagatctaagagggttttggaatttttcatcagtgtgtttgagtgatattttgaaagaagttgttattagtgatttaaaattagtcctttctttgtcatctgagatagaagtgtagagggctggacttgtttatctcttcatttgtattttactgattattttatttcaggatcaaagtgtgggatgaattctttatccttttggcattttgaaacttttcaaatgttaaaaaaaactttttatttctaaaaatgtccacttctctcaaagctacctgacaattgttaaaataaaagaatacaaaaccactttgtgggtttatgttttgctattgtaacctattgtctaaaataaagtaagcttatttttttctcctgctttgtatcaactcaaaacaataatattctgtaggtgactttttttttcctttttttgtttttgttgttgttgttgttttcgagactg

SEQ ID NO: 116348 - DNA, 1529 bp, Homo sapiens
tctcttagctataacaaaattttgagctttcttcaacaaaaggtcagttattccattttagcatttacatgaacagaaattagagttaaaattatcatatataattccttttcttattctgagcagagagacttaaaattaggctttagcaaacagatggtagtaagcttatacagtatttatgttgctttcttttctgctaggagatggaagagtgacttaccacttacaaaaattattcttgggctatatgttgatttatatgatcaagtaagaaactttaggtagaagcccagtttttttgctcactgtttgtatatcttgtaaatgcattgtatttaaatccttcttacacttttttattctcagaagaaattgtgtatgcttaaaaccaggcttctcaatcttgatattttccccaaattaaccatgtttttctttcattttagttcagacttggttccttcaacctagagaaagttgaaaacccagctgaagtcattagagaacttatttgttattgcttggacaccattgcagaaaatcaagccaaaaatgagcacctgcagaaagaaaatgaaaggcttctgagagattggaatgatgttcaaggacggtgtgtacacagtttgcttgtggtataaaaatacggagccctctttatgttgttatagctttaagttaatgattggtaaatttccaatatatgtggattagcacatatatatttaccttaactgaatatgattaaacgaaattattcatcactattgtatattataggaatacattaatacattatgtcattagtatgtggtggcaccagcaaatttataaacaataaggattaattgggcattgaagatcaaaacccattaatactaataaaagatttaggtagtaaatatttattaagattaattcagctcaaattataggattaataatgaatgaaaaagagacatgaaataaaataagcataattgatttctcatttgggctcagtgagtggcatctatttcaaattacagtgttttggctcctaatagacttatttctctggatttattgaaaattcatactataccatttttaaaggatgagctaattgtggctactggataagacatttggaagccttttatttttatggctttgcctctttttaaatgaggaagaaaaaaataatttttttttaaattatgaactttctcaactaaatcctaatctaggctggcccaatgtgtaacctttattattctattagtataagatatttgaaggaaataaaatgcatgttgtgaacacttgtatcctcacttataatatatatatgtgtgtgtgtatgcacacacatatatatacagtgagaaagaaaatgatgtctgaaaaattatgtggaatatatatataataatgataataattattagtacatccagtagattttttaaatcttttgcttaaataactctaaagcatgggaacagtttatccaacatatttagggtctttttagcgcaaccatt

SEQ ID NO: 116349 - DNA, 1110 bp, Homo sapiens
taaaaacaagaaaaagagaatctgatggggattaatacatttattcagactttcagaaagctgtctttaagtggctgaatatataatttggtagttattttgttatagtaaatggatttttatcattaattattaaaatgcccaaatttcatctggagttgttcacattattacccaatttcttgatgataaaatagaggtttagtgagatcaggatcatttagtaatacgaagatgaatatgttaatctgaatctgagtatggtaaatttgaattggattacacaataggcatacaatcatacttttgtaaatgggaatgaaatttcttttcatttggtagttatgcttgtttttaccttactgtcccatttaaatgaaattattctttaataatcaaatgtagaaatattcacaaagatggtatggtaattcattcacaaatatgaaatggcaaattcatatttaccgtattcactctagggaaaagtctggttacttttatgcatatatccagaagtagagtaggggtattacaatttgaaggaaattgttaagttacatttttatgaatacgcaatcaatttatggctttttttcctctaaattttcatattttcccactgccattaggattactgaggaaataactaatgataatgtagatcagtctaataaaccacatcatgctcatatgtactgtatgatgtagcatgaaaaacctcaaaaaatactcattttcttggctaaaaggaaatccccaaagtattctgaaacttgaatatcacagtcaatatcaccgcatactacattttatatttttccatagcaagatttacttttactatgtcttggattttagaatttccagatagatagtgattgtattactgactttatttcttaagctatggctgcatactaaggccctggattttataggtatttcactttgttttatattaagattatgataaatataatagttgctgtagtctctatttgtagctcaagctttggactagaaaagtagggatcactttcacccctatctagttggtattaagtacttgtggccttaaagatttcctgcttagtctggactcctcct

SEQ ID NO: 116350 - DNA, 2091 bp, Homo sapiens
aaagtacataactgagtgacttgaacaacagaaatatatttactcacattctggaggctaggatcctgaaattgagatgttggcagggttaatttcttctgagggctttgagggaatgatttattaaccaggcctctctccttggcttataggcaaccagcttctccctgttacatcaaattttcttccttctatacctatctctgttcaaattaccctttttataagggtaccagtcatattggattagggctcaccctaatgacctcattttaactttattacctctgtaaataccctacatccaaataaggttgcattcttaggtcctgggagttcagactgcaaaatatctttttttgggtgtgttggggggtgagggggatttccacccataacaatgccaataggtctatatctttctgaagcaaggatccaaatcaagatgttggctgggttgctgttttcaaaagggaccatattccaaaaatgattccaaaccattgatctaagagactgatatttaaactagaaagaatggagtaagacttgttaaaagggaactgaagtctacaatagacgagatgatgagataagaagagaaagtaacagcattcaaacagatagctaaatcactgtctgtctgtgcattagattggaggtttgtttagagctgcagtgttcagtaaggttgccactagctacatgaggccattgaagatagaaatgtggctagtccaaattgagatgtgctgtaaatgtatactacacactggatttcgaaaacctgctatgactaagtatgaaaaaaggaatgtagtatgtctcattaataaatgtttatattatacgttgaaattgtattttgagtatatttagttaaacacgtattaatatcaacatattctttttctttttcctttttaaatgtggctaaataggaaatttaaaattttatatgaaatatatatattcaacatagtcatcttgaggttctcaagttttatctcatgctgattttgtggttctagaatagatttatattactttgaagaggaaatcaaattgtactaacaagtctttatggagcacttaatatgagggtctttaggtcatgagatctaacgacccatgtatgactaggattgtgggtataattgagtatttttacctaagaaaggcaaaaggtattgtactttactacaattaatcaatttttttgattaattatagtaaaactgacttaagaatgcgtggatcatttatttgtttgtcccaggaacgtgaagctagacgtgttcattgtccctgttaaacagcaaaccatgactgagttcagacaaaaggtgatgtgaatgcagcaacaatttctaaatcagttaaatgtctataatataatatgtaggattcttgtctttctgggattgtgactggaatctctaccacaaacagcacatctggtcccctgagccaattcatcagcatcgcctgtaagccatatttaagatcaaaaggatagacaaggttaccaatgatgaggttctggaatgttgccagcgcatcagcactaacatgatacttgccacgacttaactctgagggcctggggatgtgtgaaggatggatatcagcaggctctctaagcagattctgaatgcatggtgtggtgaaacagaacagttacaagtatggtggccagaagaaaagctcaatgtgagacccttagtggcaaattcaagccttgtggtaaaactcaggaatgctgagaaatagtaaacctagttaacacccaggattttttgaggagagagagaaaggatataatttggggagtgacaaaataaaaaagatcttaggtactgatggtcacattgcttttcgagctatattatcttttaatttaaatgaataatttggacaaaatcagaagttgtaaattgttgatcctttctgcgaactaagctacatattttctttctttttcggtgacatcagtgttttaaataattgatacaaatgcatttaaacagggcattggtttcctgattttctgtaatctgcaaccctccttattgtcttagatctggctca

SEQ ID NO: 116351 - DNA, 1066 bp, Homo sapiens
ttttctgggtttcccatatttcatatttttgttttctgtgttctaaaaggcagttgagtttatttagcgttaattctgcatcaccaagcccagtgctgtgcacacagtaggatttttaatgtttgtttatcaagtggtgaatgaatgctttgcagtacaactgaataattgagacaaatacagtaaatggagtttaagttgaatgattctttttaaatcattttatctgccatgtttaaataccattagtaaaatgttgacacatttggactcttatcgttattatctggcataacatcaggactacctaagagtttattttagcactgtcacattgctaaacaaagctcatcagttattactttaatttggcacaatttcctacctatttcagaaggataaagtatggtttatgctagttgtttgtctccaaccttcataacacttatttaaacattgcgttatatccaaattagcctaaaaagactccattcattcactgttctttggctggtgtgccccttactcactgattcattgactgtggttgattataaactgccagtgagatccatttctatggatttgtcatttgttacagtttaaatgcatcacaattccctctgctattggactttataatgtgtaatacggtgtttttaatgaccttccctgcaaaatacactcccttgatctcaggtcagcctagtttaaatctgttttgttggacattacccccaagaaaatttgtgtccctcgttattcttctctttccatgaaaccatatcctgcaatattttgaaagccagagtgcaaaataattgtgtctctataaaatattttcagaaagataaacagccacaatattttacattagcctcttcaccaaaatcaccttttacaaaaattttcttcattcctaataaatcgtgtaaagttccacaaagccacccttttagttagttgtgtactggcctgtttgtgaaccccttaagaaaaaggataaaaccacttttgcttcccaccatcatcacagttctttatacttaacaactttaaagagcag

SEQ ID NO: 116352 - DNA, 1130 bp, Homo sapiens
gactttggaatagcgaagccctcctgacagaagtgatatcttcattgagacaagggttggtgagagttactactctcaccaactcaactctcagttgagcaactcaagagttgagcagaatactctttctggcataagattgatcatatgtgcaaacccaggagtagagtgagagaatggtacatctaacaaaattcagtataattgtagaagtaagctgaccaggaaaagaatgacattttaaaaaatactttagggagttttatttttgtcttgaaggcaatagaaaaggatctgacttgatcagacttgcatttttagaaaaattctcctagatgttttaatgagaattaattttatctgcttggccatgtataaactatagcagtaatctaagtaagaaactgtggaagtattggagatgcggataattattagacagatctaagaactgtttatgtggtactgattagattttcaagatgaagttttgaaaggcatcaagactgattccatctttggggcgtgacaagttttgtggacggtaacattaagaaagctttgacctgaacacattactgagacagcatgctcataataaggagttcacacattgctaataatcattgctaactgtaatttgaagatagctaaacagtcttcataaatacaagatttcattaaaaaatacatttataataaaccatgataaattgaccagttactattcttgtcaaattgatgctcaaagtaactttagcttttaattgtctgattttgagtataaataaccaaaggatatacaaattagtcatttaaaaaataaaaaccttacgagatttttgttgaaaattttgaaaaatcataagtaacatgaagtggtacaacataaagaaaacatgtggatgtttggaaatgaaaattcttaagtaaaactttctaatttgggcaatactttttgacccaatactaacttaaaagtgcttcaaaatggtctgaaagtgcattagtctatcttaccaaatctggataatataatcatttttaaaaagcataataaggtaagttacagaatcagggatttttttataccagaagtaaccatgtagtctaatttttccccacctaat

SEQ ID NO: 116353 - DNA, 1040 bp, Homo sapiens
aacttactcttttttatgctgcagatacttctggggtctgtggtttatccttaatagcccactctgcctctgacattgagagtattagatttccaaagatgacctcctgagttaccccagtgtcagcaggtatttgtcattaagtctgacttatagctgtactggctaagagaggaggctgacatttgggaaagttatgtaaacagatgcagacacatacattcttaagtgtttggtgctatgttaataatcagtttatttggtgattggtaattaatagattacaccattgacctgtcttgtaagatggtcgtcagttattcaggttaggttgtgaaaactgagtagcaactgatttacagaattgaaaatgggcatttgataaatggcatggaaaaataatgtttgcttgtttggtcagattagaaatttactacctcaagataggtaactttgagatactgcctattgaagtatggtgtgctagaccttatctcagcctcttttcttgattatctttatacttgtcagtaagacatactacagaggcacaaggtagcctgaggcattggttggttgttttctcttgggaaagaaggaatatgtgttttgaagtttcagactcatttagggttgtattttaaggtttgcgttttgtgcttttttctcttaatattttatatcttttgaaatgaaacaaggacttatttattctaaatattttataaacacttgtgaaatgaataaataaataaaacagccaaaagcagtcatagtagactgagtactctgtgttcataatagatggtggttctgtgacaattggaatattttgaataggaaaactagtatttatcttactttttttttttgtctgtgagaagatatagaagatagcctaaatgaatattaatttggtctttcgttgacaacatactgttttaaaaataataccttaatgatgatattggatatttctgatacttttttatttaaaaatatttgtaaatatgtacattgatttataatcaatttacatt

SEQ ID NO: 116354 - DNA, 1044 bp, Homo sapiens
aatgagttgaaattgaattatgtgccaggcataatgttgatcatgctgaggatcccagaaagtagaaaatagacacagctcctgtcctcatggaactttcagtccaattgttttgtctgataatgacttaatggtttgcgggaagaaggaaatattggttttatgttggagagctgcatcttaggtcttttcactctatgtgtgaaccaaaggtaaggttttaggttgctaacattttctgagtacactgtgttgcttaagcaggtttctgatatgcatgatacagagatgaaagaagtttagctctgaatcaagactaaatatttttatttagctttttaataaagataatgtgtttgtttctccaaacatacagacaattaatattatgttccttttcttttccatgtttaggtaatcatgtcaatgtttatgttatatattttcaccattttaaaagttgacaaagttgatgtaaaccatatcagctttggtaacggtctgctaattatatcattgtaggccctttaggcagactgcccctaagtagaaatgaaaacacctgttagatgtcagtgagcattttaaatattaagagaaatttagcatgtatcagtcagatgttgagtggttgataccctactgtataatgcctcctcttttgctcaaataaaacaaaatgttaaattatgtatttttttcttatttttttatactataggattttttttgcattttgaatacaggagactgaaattttatggctcttaaaaattttaaatactagttgtactttcccaatatttttaatgaaaaaaagaagcttctataaaacaaaagcaaaaataagccttagctcttaaaaaacctcagagtaagacgttctcaattactaatggctagcccttattttaagttttaaaattaaaactgctacctattttcctcccttcctgaagcatgatttttttctctgacagcttgtcatcaaaaacataaacatcaattaggtcatgtaccctatctgtagactcacaaataaac

SEQ ID NO: 116355 - DNA, 1036 bp, Homo sapiens
catctcaaaaaataaaataaaataaaataaaaatttgaaaaccactggactctgtaaattctagtaacttatacgacaatatatatttggaaacatgtatgttaacagctcagttatctttgggtagtgacttttttgtttgtttgtttttgcttggatttttctgtgttttccatattgtctacagcgaacatggtacttactatagccagaccaaaaaaaaaaaaaaaaggtttttgcaaaaaaacaaaaaaggaattgacaacaaatagtccacaagccactgaaaattcttcagcttaccatttttggcattcaaataataggtttgtaaacctgctgtagctatgaaatgtttcctactaagtataggttataaagaacgttgaagatacagttcaacaccctcattttacatttgaagaaactatgtccaaaatgtttcactttgtcgaagctagagctgggacctcatggtcttctgattccattgccttttctgctatccacctaatttataaaatgtatattcataattctcatttcttccatttatgtctacctagttggagcattcatcattgtgttactactttttcctttgagtgaaaactattatttttgaggtgccagtgatcaaatttctctgtttaaaaaactttgtcacaaacctagaacattaaaacaggtccaaaagctctcatataactaattgttctgatatacacaattggaattttataattgactttattccactaattcattaaatgtgcatgtttagtcaaatttataatttggaattgaactaaattgactccaaatattcttactgttttcattctctcttggcatctacaaggaagacattagaacatgttccatgtgccccaccttccttctcagacatgaatgtacttgtgaagcactctgtcttgtattttagggtcttaactcatctcggagttatcttactatgatcacattgatctaacccccaaagtaatggatctgtgtaatattttctacatatgta

SEQ ID NO: 116356 - DNA, 1074 bp, Homo sapiens
gttttgggaaatattccacaaagataaactggccatggtgccatattgtgcaactaattaatatcggtcaagggggggttgtttgtttcattgacaatagcactggtaaattaaaagtaataaattcagttgaaaaccacgtgtaattctgagtcgtatatgttctgatcccattggtaactcctttgggctttgttcagcggggcggaggcatggttcatgattccctccactgtcacttcaccctcctggaatgtagcaactgattttcaaaagctgaaaccatgacttttcacaggagcttgttattccttttttcaaagtttatttgaatcagagtgggattagtctaagatatcccctgtgcttggcatgtgttcctttagaaaagctagctgatccagcccttaattcctggttagtaagataatagacatagctgggtgaggttctaaagatggaataatttggcacaacacatctctgactgaaatctaaatgtgactcttgagaccaatggactgaattggtctgtctgcgtgaatttcactttcctttctcaattaatcaacttcgtgtctgaagtgtctaaaagaagctcttctctaacttttctggctcacacatttacttttctgtctgacagcttgtcacctttattctaggcccaaagcatccaacaagtagtttttgcccttgcttagtggctctctgatacaattttccaaaatgtacactttataatccaggaaatcctctacattcatgatagccataacagtgatggcaataataagagcagctaacatttatttagccccatgtgattatgggggctggcaagtctgaaatatgtatggcaagcaggctggctggaaactcaaataggagttaatgctgcagtcttgaggcagaatttcttctcttggaaacctcagtttttgcccttaaggcctttccactgattggatgaagcccacccatattttctaaggtaatatcccttactgaaagtcaactgattgaatatattaacgacatcaacaaaatagcttcatagcaacacctagaata

SEQ ID NO: 116357 - DNA, 1081 bp, Homo sapiens
gtttctcactctcatgctagtctacattaagtctccagcagttcattaaaattcccctttgagtgttcctatcaatttttggctccagtggcctctaccccaggtaaccacatctcagttgtgactctctcgatttgtctttctccagatttttggatggttgtttgccctgcaacctcagttatctaattggtataaaaaaagtaattgactttcagtttgttcagctttttcttgttagggtaggagaaaagattatctttacgtattgaatatctccttcatataataaatttatttaatccataaataaatggaaaaccacaatattcttattttgacttatatatacattgtatagaattatatataaagtggatgcccttttattaattctatttaagaaaatagaaacttaaatatctatattttattcattttataaatatttataacattattactattatatatcttaagtattctgatcatattctgcactatgtgatttgtaaagattatctgctaaaaatcaatctttagtagttggacactgtaaaacatactagtaaggcccaacctggtgttgcttgtctgaaaaataatttaaaagaatctgtttcactttatctgttactcacttaaagggaaaattttcattctgacttcttgtttaagagttcatgcagcaatttggagagtttagggattttctaaattagtatgaaggagttcaagttctccacaattttttccctaattaaataaattgaatttttatccttttgtcaatgcccactatgcagagatctgtaaagtgctgtgctacaaaattaccaccctttatgaatattggcaggtaaagacttactcttccttaggcattataatgtgcctttattgcaggggaaatgtagtatacccacaaaatcattactttgttgttttgttgggttttatatttttattcagcttacatagattattcatgtgttttcaaaactttaaaatcaacagatgaatgtgaatacattctggtagaaaataaagtgaactttgctggtatcttgtaatctctcta

SEQ ID NO: 116358 - DNA, 1019 bp, Homo sapiens
ttactatgtatgccattaaaaacattacaattagcctgtttaagcctcaatgtatctcagcgctgaactctatcaaatgctatgaactcacaattttccatgactttatatgcaattaaagacctcaatgaaattatttatgtttttatcccccaattatatagtacctactctgtgccaggcaatatgctgtggactgaaggtaccaacatgaataagataactttccctcactgggtgtgataggctgaataaccactccctccatctcccccaaccgccgcatgcgcatgtcctaatttgtggaacatgcgaatgttatcatatggcaaagactttgtgggtgtgatcaagttaatgattttgattatcctaggattatcctggattaccaaagtaagcccaaatacaattacatagatctttataagagggaggcatagagagatttggcacagacagagaagaaggcaaagtgacattggaggcagagattggagagatgtggctcccagccaaggaatgctacaaccacaaaaagctggaagaggaaggaacagattctcacctaatggccttggaggcaatgcagccctgatgataccttgattttattctggtgttactgatttcagacttctggactccagaactataagagaataaatgtgtgttgttttaaacaaccaagtttgggtaatttgtcacagcagtcataggaaataaatgcactgaggaactcaaagtttaatgaaagagacaaacacaaaaaataattgttatagtacagcaagagccctattcgaagtatgtgggagcggatggggagcatgggtggagtattgactctgatggatctagttctttaaagctacttagaagatctgaactgaagcttgaaataaaatagtgttttccaagcagggaagggagtacaaaaatgcagaaaccaaaaaaatatggtgagttttataatgcaaaatggtattttgaaatgcacagtttaaatcaggaaataa

SEQ ID NO: 116359 - DNA, 1051 bp, Homo sapiens
agaagagttgatatctgaacatctccaagtacccgtttttgtattttccactacttcaggatggatagtaccaaatgacttcaacagaagtggagtgaacctgttactaataaacctgggactgatgtgtaattacgttttcagtgattcatctgtgaaacaccctgggttattttacatggaagcatctggttcacatgtgtccagtggttattctgtggtgactgacatctgtattcttctaataaagtcccagttgcacagatgtgagctgttgccttcttataaagacagaacttacaattgaaaaatcctaagcttaaactcttcttgaatatgaacatttcaatcttctacacacacacacacacacacacacacacacacacacacacagaaagagagagagagagagaaatggaccacttgcactgtgtctggaacgtaatataaatatttcatgcagtgtctttcaatcattggacatatgtatgtaggcacctttatctctttttatgtttgtttatagcatagcatctgttttagattgtaagctcaaagaaggcagtccatgtcaatttaatattatacagacagtgtctagaaaagcataattcacttttgagtgcttgctaagtatttgtcaatcaagatggtgatgttaatgactttcaggaaaaatggagtttataatctgactgtaaacaccttttgcactataagaggtaaatgctgtacatggacttgcttcttatttcactcattatcattagacaggtaacgcctaaaactttgttgttttgagaaaaatttatttatgttagaataatcctctagtgatgtgtgatatatgagattttaaagtggcagacttcaaggcatgtttcatgagggaagtagcattttagctcagccttcgagggtaaatagaatttggacacataataatgaagggaaaagaaggagaggccattggtgaagagcatggaggagacaggcaggcatgggttcaagtccttccttggccagtaagttatgagacctcagtgaa

SEQ ID NO: 116360 - DNA, 1054 bp, Homo sapiens
aagtgatagatgatagtggtcgcgagcctgtctcaatgattctagttcagttatctctagataagacccaatgtctgtttctttgagctatagataatattacactaaccttgcagatccctcttccaaccagcttgggggatttcttttaactctggaccttacatgtcttgctcttgctcaacttctttctctattcagttttcctgaaatctatttaattcagcatattggaataataattgggccctaataacaaagttaagactagagtggtagaatagtaaaccacccaccctcttcccccagagatgtctacgtcttaattcctggaacctgagaatatgttagaccacgtagcaatgggaaattaaggctgcagatggaaataaggttgaaaatcagcagaccttaaaaacagtgaaattatcctggattatccagttaggtccaatataatcacaaaggtccttaagtagaaaagagaggcagaagaagaaagtcagaggaagagataagactaagcaagcaacatcagaatgatgtgcagtgagaaggagtccgcctgccattgctggctttgaagttttgaagacaggaagggagtggcctctacaagctaaaaaaaaaaaacaacaaaacagaaacagcttctccactagtgcctccagagaagtatacagctctgccaacttcttgacttttgatcactgagatctgtcagacttctgacctccagaactgtaagatgataaattggcattgttctaaggcattatgttatggtaatttgttgcatcagccataggaaacaaaaacagctcatcccacgctatggtgaaactatcccccttggtcccagtttagaaatcactaacctccatggctagtattattgtctacccatgtgtttgccacttctcttgatagctaaaagtagagttctgttttcttttttgtgtatttctgttttccttaactggaccactaagtttatggtttcagactaatggatgttgttttctcagcgaagaaggtaatacagcctattcca

SEQ ID NO: 116361 - DNA, 1829 bp, Homo sapiens
aattttagtgtataatatgtatatgaaagactaagagaacttagtggatggaaataaagattttctgaacatttgggaccatagatttttttagaaaatatcttacagaactaccttttgagacacactgcacacaaccaagctgccttcctcagaagaaaaaaacatcctctggagtagaagtaagagttagtgatgacccccccactcccattagaatggcctagtgtaaagggtatggattttggattttaacctaggctaaaatcctggctccattaccgacttgactgcctgctcacctatgcttactggctgtgtggtttcaggtacattgcttaactttactgagccttcttattaatacactctcatatattcaattatttgttatttggttaatacatgcaatcagtggaacttttatgtgctaaatattgttccaagtcaaataaagcagagtccccccaactggagaggcttctaggctagtgagggaagtttcgtttgtagcacagcaagcggcagtcagctcacagatcacctggcctgtcttaaaggaataactttccaccaacgtgacagttttccactttcataggcatagatcaacagtagcaaatgtcacctatgtgacttcaaaacttggaatgtatgcaggacatttcaggtattgattttttaagtatctgtgtactttggtattgattaatgaattaccataacaattttgtttatctgaataaagtacagctagagtaacaaaatctttagtcattatgaaattataacatttctgtgtaagtggccagcatccttgtagattctggatatgtttaccttagtggttgactttaaaatttgaattctccagaacagataatcttatttttaaatctgtaatatatgtatattttacaggaaaattttagatttctcatcctttcccaatgtctataaagcatgtcaattcattttaacattaagtgtattcactctttattattctgctgattttatttccatcttcttcctgctcttgatgaatttaaacagcaaagtcatattcattagaaaaagatatctttaggaatttaactgaaaataacaaatgcaatttcttttatttgccattttgtctgccagaaagtttcagcttctctttttattttctaggccaacgaaatgacgtgtaggcctagtgaattccaggcaatgttcagcactggttttactgaatctggatgacttcagtctgttaatttatttaggagatggttttggtttttataaggtcaactagaaatttgtaggctacttttcccacttattctaagatcaaattttttttaatactaacatttaaaatttgaaaatacagtggtaactttggtgatgtcaagtctttaagcacattatttaaaacttttccatttaagaagtgtttccataattgagtttatttcataatgggaattctgttaaggtcaatctgatagctgcttagttacttaatatcagcaagtacctgatattttgatttggctgttttttaaggtcatttcgattaaggtttgatttgatatgtcctaaaaacaaaccgtaaaatatttgacttttttttttttaaccaaatgatgtgtgccccagccagtgcttaggatggattctcaatttgtacagtgcccttaccttacccctcatcttcatcccttgccccatatctgagctttaccctcgtcgtcatcggtgatgaggaggatgaatgccagggaagtttgtgataaaacaaagatgtatatacttttgttattttaacatgagtaaaa

SEQ ID NO: 116362 - DNA, 2066 bp, Homo sapiens
atttttagatatttaattccatgttacaataattatgcctgtatttattgttaattttaacatcgcaaatcccagagggtagtacttgtcatcttgaatgcattaatgcctagcaccttggcactcctgtgatgatgttgtctgaaattggcttgctcagaataagacagaacatgtcccaggtctagtggcagccaactgtagttaattgtctctaatcaagatgccaaggagaactcatttctaataatctgtgcaactaggtaagggtgcaggcttttaaaaatactcatcacctaaacacacttgatatttgggggttttcattggttattcttctctgctgttaacgaaactcttacatagtttatggggtattagcaggtaataataatagtttccaaattctttgtgggaatttacaagcatttacatttacatcaactcatttcatctttagaccacctctagacaaatactaatatctcagttttacagtggacagaatagaagcccacttagtttaaatgacttgcctaaagttacatagctaacatgaaatagacctgggttcaaacttgtgtttcctgacttcaagtcccatgctttctcagctataccaaggtgttgtgactctacccccgcctttgaacttggaaatagaggggtattaccaagtattactgggttagctcaacctaatcataattgccccagaggccacctctaattgataatattaagcatactttattaaggttccatagagaaccactgacaaggtttctacaaggatattaacacacactccacagctttacttctgattgagctctgttattctctggcacagtcttcctaagaccaattaatagtgatcatggcagtcagcctgttatcttaggattcaaagaaaatatctacataaatatagcagtcaatccattgaagtagtgactacaatactgaacctgaataaaatttagtttactaaatgaagatatgcagattcaataaatgattatggaccaacatttcatcagcaactgctataaatgtgaaaaatcattatttttcatatatacacatgatcatcagacccactaaaggtaattcatgtgaccaaaactttctgctgctaagagattaaaatgcatgttaatcagtagaatttaagaaagccagagtaaaatgtaaattgtgatgaaatcattaaaggagtaacttgaaaaaccttctatatcctggcataaaagtgattatagcacagaggacagaatattttatttcttgaccttgattatgagtattgttataggttcttgaattttccttaggtcagaatagagacattaattctaaagcagttagagaaattagtctctttatctctttccttatagttaatagcatagagaaataaatctctaaaccaatttgaaacaggatttaactgtcatttcacttatgtgtctcttcattttcttttactctataacagaagtttttaaaaataaaactattttgattttcttttcagttctaggcctgattcttcactacctgagacgtctaaaaaggagcacatctcagctgaaaacatgtctttagaaactctgagaaacagcagcccagaagacctctttgatgagatttaacagtctcaaaaaatactttgatgttcactagactatgttttctattcatttctttaaaatgaaaaaggagaatttcaagtcagcagccgctattaccgtatcttacaatttaattacatacacagtgaattgaaaccattgtgcaaaatggattacacatgtatacaaagatacgatttgatgatgacactggcacattattctaaactattcattcagcatgcctataattacataaattgtatgagactttttgttgcaaaggacacatttatcatattcattcacacatattatatgtgatagctgtccaacatcctgtctgggaagattttgaaaacaggacaaagaaaacatcattttaaaatgtcttcagctttttttgaatagacgtattcaaacatattc

SEQ ID NO: 116363 - DNA, 1037 bp, Homo sapiens
agcctgggaccttgcgcggacctgaccccttcagaccgcaggcagtctgggaggaggtccggccgggggaggtgcaggatccccgccgtgtctctttgacgacttggggactgtcacggttctctcccggcgcccctgggttcttttgtcctgcacgcggtgcgaaggggccagcagggaaggagcagaggatggggggtggggttgttggagccccgcggaggtctgggaggcccctgggcgggaaaagcctgttctgaatcggcagggatgtgcaacaatttttctcaccctgaagagtgaaatagggtctgtcgctcccatctcaacaagcaaaccggcacccagagcgcactgcagacaaaggtggctcggggacccgaatcaggggcctctgggtcagtcctctcgcccagactacaggagtcctccgtttccttacatattccccaccctctcctagttctccgctctagttgagcaactttactggcaggtctagcggcagcggcgcgcgcgtgtgccgggagccccgggggacgtcctcggctggagcgccccaccgtcctgcagaggcgtgggcgctgtagggcgacatccctggtgcgtgcagacctagggcatccgggttgttctggcccgcggtctgtgtcactgggcgtggagcggtctgggtgttaggcagaggagagcggggtagaaaaatagtgtcatagcctaaactatttgctctccaatccaactgcgtctcggcaagtcctgcatgtccctgggagatgctgcgggaagggggagaaatctacacggcgcctggagagttgtcctgccgcgcgcacacccgcggcagagtctctctgggtcgcgttcctcatctttgtgtctccctctgtctccatcttctctgcctcccttcccctctcccagcctctgttctctctctctagcttctgcgtcccctcccccacagctgacaaatgaatggctagtgtgaaatccctgcctttcccgtgctccaaggcagcagggagggaggagcg

SEQ ID NO: 116364 - DNA, 1039 bp, Homo sapiens
ttcccttaagtcattcattttgcactccacaatctgcggcgtacatctaggagtttggaggaccctgaaaaaaggtcttggtctgtgcaaagtgcagagatgccttctcgcgagtcggctggaacgcacgcggcgccctgggtccagttcgccgcttagtggacgaacgcacatggccagggtggagccaggtttcggaggtctagacgcgccaccctgggcgtctttaagaaagataatacacataccgtgctctcaaaacccatgaccacttgaacccaacgctagggccccgccccaggatattgcaaaagaagggctcctaatccaaaacttaaacttcctcaacttcagggcgggcgtcggacgggaaagtggagagaaggcgggcagtgggaggaaaaaagaaagggaaggaagggaagtggaaggaaagaggaccgtggaggggaggaaaaggagaaaggaacggagatggggcagatggcattcaaacagccaggaacggaccggaagggttcgtttcggggtttgggtctgaatttcgagactcgttttaggatactcttttccctttcccagcggcaacaaatgtgactgcagaggcgtgccgggatggaagggtgggaaagaactagacaagcggaggtggtccagccccgcccaaaggggctgggtctggggcccgcccccactcgctcacctcgcgccaagggaggacccgcaacgggcgctccccgcagcggctgggttagccagccgccacgtgggttggcgcttcggctcccagccgagacgggtgtgacttcctgggctcagagactgcagtacagccgcacaggcggccggcgcagccgaggcccccacccaccgaggccaatgggggcggggcggggaaggcagggcccagcttaaccgagagagccgagtggcctcgcccccaggattcggggccggctgcttctggagctgacccgagttccatccagacagcgctgaacactcttattaaaaggctatttaagttttattttatttt

SEQ ID NO: 116365 - DNA, 1049 bp, Homo sapiens
caaacatatttatgcaacttattcaaatgtatttagagcatgtctgatctcctccttgtattcttacctagtcttaggggtaatcttaaggaaagtgatgcgtatacttgttgtacctatgtagatggaggaccattctcctctccccaacaaaagacacttttataaggattgagtgtggcacaaagagttcgatttttagtatttaaattgagtaggaaactcaaatacagaagatcctttcctgggtcacacctttggtttttttaaatgagatttgactctctagatattgacaaacatcatattattgggtcatggtaaatcttcaagtggactgattcaaaagtgttcaaaagtatttcaggtgttaaggaattgttggcacggagtttcaaaggtgtttctgcataagaaatagaggcgttgatcatgtatttgatctacaaacattcctcaaggatataccctgaacctggcaatgaagaaatattgtgggaattattaagttgaataaagtactagctctgccttccagaagcctactgttctacagaggagattagacatgtttacagataatttgaagtacatagcaataaattataggatgatttattccaagcataaagtgtatattgctactatagtggtaacctaggttataattttcaaatgtaagagccccaaatactattctttttactcttagtgatatgaaactatgttagaacatctgcagaaagtctgaattagtaattttaataataaatattgagtactgatatattgtatatcactgagatttattttatatacattattttatcaattcctatgatcacttcggtaagtactaattttcacaactaagtagtgacagaaaatgaggtttagagagatatagtattttacccaaagtcacagaatataagtagagaatgcagaacttgcattctgggctatttgacagtggagcccagacttttaaaattaggcttataaagatttcctggaaaaaaagaaaaataaaaaatagagaacaaatt

SEQ ID NO: 116366 - DNA, 1581 bp, Homo sapiens
aaagtttaaaagtttaaacagaaggacattctgcagataaatattttaggacggttaggtgaacagaaaccaacctttccccattatataattgaaggtaatgtctcactgcaaagtgatggtagctggatttgttataattatgaaagcctttggttccaacacaggaccaaagtgcatccttcaaatgttaggctttccctggttccagtcctatgaagcacttttttattttcacttcatctttgaattttgttttcatttcctctaaggtaatgtggcagttattgtaacaaacattttttgtctttcgacctgtagacataattttcatctttcagctgctcttcctaatgttggtccagtcctttaaacctgccctacggattctagtctgcccttctttgcccttaattgcttgacctcttatgcttgccttttttttttttatcacttattttgttcatgttaaacactaagttaaaaaattttaaaatgaatgatgccacatttctatataaagaaatgagcattattaatccctgttgttgtaaaacatcattgaaattgtatgctattctctttatataaagtcattctaattatgtcacatgttgaagatgtaaccaaactattataaaggctgcttatccattcacatattgaatagattaagtttgggttttttaagattgttaatttgttattttctctttcctctagtcaaagtgggaaaaagcccaccggtgaggggctccctctctggaaaagtcagcctaccttgtcatttttcaacgatgcctactttgccacccagttacaacaccagtgaatttctccgcatcaaatggtctaagattgaagtggacaaaaatggaaaagatttgaaagagactactgtccttgtggcccaaaatggaaatatcaagattggtcaggactacaaagggagagtgtctgtgcccacacatcccgaggctgtgggcgatgcctccctcactgtggtcaagctgctggcaagtgatgcgggtctttaccgctgtgacgtcatgtacgggattgaagacacacaagacacggtgtcactgactgtggatggtaaggcttttattatctgcaagaaggtagtataacatgacacctggttcagaagcattgagaaatagcactcagaagtaactgttgtttggggtttggatgagcggaaaaacacctgtcaatccagtagtccacgtctttcaccaaaaatgaactggtactcattcaaaagtcaaggcaggtgcatttttggcagccacttcattgattccatgaaggaaagtattgtatactgaaaataacgaatacctcaaggcatgacacataatttaataatcattacttcagtgttgagtcttatcagtgattctttttcaagactctgaaggcgaatctacattttaaaaattattacatatgtgtgtatgcacatgtacatacatatacacacatatatacacatatacacatgaaaaacctttcccccttttttctctcttaatatgattattaaaatatttgagtttgcttttaggaaattct

SEQ ID NO: 116367 - DNA, 1316 bp, Homo sapiens
acatagcagactttttccttaaaaaaacaaaaacctggatagtaatctaaagaatcactcagaaggatttgttcattttaaagaatgtattataaaatgttattaaatgactgattctatggccaatgtacacacacacatacacgtatagaataaaacttctcgggtatgtgttatttatgattatgtattcataattataacgaagctaagtcaccattatcttttctgctttaaagtatcagaagctgctaccttgccatgaaaaagtattacatgctcctccaattccttccccaccatatttatccaacaggaaaggaatgaataataaaactttgggctttttttcccttcttttttttccaggtgatgtgttccacctcactgtccccagtaaattcaccttcgaggaggctgcaaaagagtgtgaaaaccaggatgccaggctggcaacagtgggggaactccaggcggcatggaggaacggctttgaccagtgcgattacgggtggctgtcggatgccagcgtgcgccaccctgtgactgtggccagggcccagtgtggaggtggtctacttggggtgagaaccctgtatcgttttgagaaccagacaggcttccctccccctgatagcagatttgatgcctactgctttaaacgtaagtgtttgatacctttttaaaaattacagttttaaaaaaaatgcttcgaagcatgcattgatgttcaactagccgttggagtggattccatgtcttgcagtgtgtgcacggaatggaaacagttcagtgattttcaaaagcaagcaaactgaacagcagtgatatggttaaaaccacaggaattttggcaaatggatttttagaggggtgaggaaatatcaggttaagctgtaactgtgctctgttgtgtccagagccacagagcatttttctaagtattttatattaattgcagtccttaagttttgcaatttgtttattggtgttacaatgccaaggccaactgaggctgagttaaatccttaagattgttgattttgtcttcggtatcactctgtttctttgagatggcaaagaatttaaatttcagtaattacaggtgagtatttgaagctgacatggatactcaaaatgttcaagtcataactaaaaatgaaccatactatcaataaaaatctccatttatgtcaagtaatggaaatacatgccttctaatcattaattctgtagtatcatattgacgtacaatatgtgttctttgcaacctataacagagtatctttagttaggtttactaattaacatttttt

SEQ ID NO: 116368 - DNA, 1011 bp, Homo sapiens
aaaagtaagcaaagtaatgtctttgtaagataaagttttcctgtatatcttctcttaatgattaaacaattttgcatatttagttttttacttcagaatttagcaagttctgtgaaagttggagagttatacaaggctttgaaagatcatttcatacatccccaaacttaagtgaatcaaaaccattcaaaactcatgataatctctcacagaatgtgattaattatctccaggagagggagatggaacatgtttcctagaaaactcattctaatattccatgaccttcactctcagataatttttctaattaagtactttgcatttgaatttgaacccatgttttcatttttgagttggagaccaaaatctgaataacagccatttctattgttgatcacaattgtttatttatccctcagcatcttctccaactgaaacagttttcttgttttacagtttcaatctccaaatttctaattattgatatgttcttgctttgaagtttcatcattgtttagcacattcctctatttatgcttaagtttagaaatcaagatggtggtccagagaaggctaaattaattcccaccactttctatcctatcttatatactcattcactgttaaaatttgcctgcccttctaacctttggttagttcattatcttttttgtgtgtgccctagttcataatctgaccacatgtgccaaaactaacctttccccgattggtatattacaaatgtttcctgtttattgaatttgaatttgttagcattccatcactcatataactttaaaaagatagtttgaattggccgggcgcggtcgctcacgcctgtaatcccagcattttgggaggccaaggtgggcggatcatgaggtcaggagatcgagaccatcctggctaacacggtgaaaccccatctctactaaaaatacaaaaaattagccgggcatggtggcgggcgcctgtagtcccagtccctaacccaaaccctaaccctaa

SEQ ID NO: 116369 - DNA, 1528 bp, Homo sapiens
ctaaaattattgaaaacccttgtttttggaaacaaagtcacataaatactggctttctagaacagattctctaggacatattgctaccactttattacacagcaggactagaggaaggaatgcaacagcaaactccatagtaataattgacaatgaaatctagttatttagttttaaaaatatgagtcaacttttaaaacactataaacatattttcatagcattgtagaaagttgctagcagagagcttggattggaacataggaagcctggattcacagcccctttggccctaatgcaattgtacctgtttctaagttaatttcatcagccaaggaaatactcagagggaaaaagtaaatttagcttttttgttgttattaataataatatgattaaattttctctaatatgctgtttgctaagtatttatattatgtttccatgggaactttttctgtatgtatctttttactatttccccaaagaatgcagttataagacaaacatgaaatttggcagttaaatgaagtaatggttatggaatttcagaggatagagaattgaattaaaatagtcatccacattttgggtttttaagttgttcatgtcaatcaaaatagaacaacgcttcttccaggaaatgaatgtagaaaaagcttttctttaaaaaggggaggaaaaggttatttaatgtttttaaactccaactcttttttggttagttttgttttaatattagaaagataaataatgacagactttaaagaatatttaaatgtatcataatgtaaatagccctcaaatgttcatgataaaatcagtgaagctgagctttaaaatggtctggggaatgaccacaactaataacagctcgtgccagacaaaaaataaggaacctgttacagccctagtctgatttacaataaaatcacatcattttatgattaagtttttacagagcaaatggagctaaaaggtagcctgttttgttttttgagggctcctgttctggaattattaaaaataaaaaagaagatactatagatactatggctattacacctcttttcagggcaaacaagcatttactcataaaactagctttaagtcctataggatgtagcaaaacaataactacaggtttcttcaggacagttcttttgagttcagtggcaactattaataggtttttatttttaaaaatactgatttttattttaaaaaaacaatcattatatagtaggctgctgccttttccctgtgttgagaaagaatcttgtttacaaactgttgcttttatacacaatttaaatttctttcaacaggccaggccattctctgtaaatctggagccattataatgcagcattttatgatgacaggttactttatattgcctgagcctgttctttctgatgcttagggttgttcccagtgatttgtaattacagacctaaaatacattatgtgggtactttacttcctgttctacatttgtgtttcaggctaaagtaagcctggaaac

SEQ ID NO: 116370 - DNA, 1911 bp, Homo sapiens
aatgtagaactacaacaaatgccgactagcctctgccaggcacattttataatttattagaaacaaatctacaccatgaagttgaaagaaggatgaagacaaatgtccaacacctgggatcaagtgaagagtggtattaaaaagttttaatatcctgtttttatgaaagtctccacattatggacaatgtaatggtttatatgtaacttggatacatttcatgtggcttttttgttgttttgcaatctgagacacaccctctcccctgagataatatgcagcaacttgaaaagaagggagcatgtggagaaagctggagacagggtacagaagcctccagaagaatagtactaaattctcctgcgaggcttcaagttgacgctgtagtttctggtaaataaacaatctactgtatctaaaatctgcatttatatttttgggagcttttccttatcttaaaactacataatattaattttcctcaactggtaacagtcatgcatacttttaggtaaaagcagtgataacccttataacgtaaaacaactgatcaatttatgactattaagtgttcaattatctgtccttgggttaattcaagtatagttttaagactcctctccatcacagaacatttctgggccacccaaaaatactccctacaaaatactcaggagcacttaacaaacactgggcatacaagtttttattagtgacttgtctaatcaactctttgaaattatttttctagctaaagaggctacaaccatcgatttgagtatcctcgcagaaactgcatcacccagtttatccaaagaaccacaaatggtttctgatagaactacaccaatcatccctttagttgatgaattacctgtcattccaacagagttccctcccgtgggaaatattgtcagttttgaacagaaagccacagtccaacctcaggctatcacagatagtttagccaccaaattacccacacctactggcagtaccaagaagccctgggatatggatgactactcaccttctgcttcaggacctcttggaaagctagacatatcagaaattaaggaagaagtgctccagagtacaactggcgtctctcattatgctacggattcatgggatggtgtcgtggaagataaacaaacacaagaatcggttacacagattgaacaaatagaagtgggtcctttggtaacatctatggaaatcttaaagcacattccttccaaggaattccctgtaactgaaacaccattggtaactgcaagaatgatcctggaatccaaaactgaaaagaaaatggtaagcactgtttctgaattggtaaccacaggtcactatggattcaccttgggagaagaggatgatgaagacagaacacttacagttggatctgatgagagcaccttgatctttgaccaaattcctgaagtcattacggtgtcaaagacttcagaagacaccatccacactcatttagaagacttggagtcagtctcagcatccacaactgtttcccctttaattatgcctgataataatggatcatccatggatgactgggaagagagacaaactagtggtaggataacggaagagtttcttggcaaatatctgtctactacaccttttccatcacagcatcgtacagaaatagaattgtttccttattctggtgataaaatattagtagagggaatttccacagttatttatccttctctacaaacagaaatgacacatagaagagaaagaacagaaacactaataccagagatgagaacagatacttatacagatgaaatacaagaagagatcactaaaagtccatttatgggaaaaacagaagaagaagtcttctctgggatgaaactctctacatctctctcagagccaatt

SEQ ID NO: 116371 - DNA, 1023 bp, Homo sapiens
ttttagcttcatatatttgtacaagaattggaagaatatgttaaacaatgtggaagaatgttagatacaattttatgttaaaagtcataagaagccctgctttgtcatctaatataaccaaatcatcactgttacatcacttcaaaacatgcagaacaaagtgttttaatttcagtgtcttttcatacattactactcaagtgtagcactagactgtgttaacattccattggtctttaactattaaccttcagtacttacaatgtggacggctaaaatcgttttgcatatccctaaggttgacagaaagatatttaaaggtttgctttggtttttctcttccaggattttacaggtttattatatgacttgtgtggtgggtaataggtctctaatgtaagtgttattttaatgtaaatgcaacatattcttatgctattgttttggggtattttactgtggttttatctatttagagcaagtacaacctagcttagttgtagggagtattacagtttattgtattaaatataatttcagaaggtggctatatattcattatccttgcttcctaaaaaccaggctgtagtgttgttcattttatgatttaattgttttaccgctaggaatatttgtgatgccttctattccactcaaatattttagctctctgacagaactcttaaaagctgtttgtttacattgattaatacttggagttgtcatgatcaaatacgatttattgctgtctaaaggtgagcccacaccatcttttacatttgataagctgagttgagaatatatagcaaatgcagttcaataaatcaattcaggtttgtctctttctagtttagaaattacgatcatggattttagttaatttgctatattttcattttcatataagaattaaatgaatgagtattcgttgttttcttgacctggctctgagaagacaggatagaagatttttttttttttttttaagcagggttctctcttactgttggaatattccctttc

SEQ ID NO: 116372 - DNA, 1035 bp, Homo sapiens
gatttgatcatgattttcttgctaatgatattgtttcttggaaatcataacatatttcctcttttctacatccttttccatctctcggaactggtgtaggaaaaagaaaatgaattgccagtaagtcggaatgaggattgcgttaggctggaaaagagacaggaatataacggtgaaagaaaaacaaaaaagaggtaaaaggaagcaaaaagtaaatgactaccaacacttagtttcataatttaaaaaaatgcttgaatggatatgcagattgtttttcaattgatactactctgttagtgtagctaataagttgagttgaataatataaaacccagtaaaaatgttctgcatttaaaaactcttccaagtgggaaactgccagttaggaagtcaaattacaaaatggaaaaagtgaaacttgatctctctgaaagaattggcagtcatcaaaaaaaaagaactaagttataaatggttgctggaagtggagggtctgagtaagctaaacctgaaacaatttatacaaaggtgtacatttataagtgagttgtggacttgattcagctagacctgggagacgtatataggtgtttcttctccttctgcttctaaaatgtgagactataatccaccttgaaattaattttgttttgcataataatattaggtcagaaaaccgtgcaatacttggttacttccatcaggcagaattctaatgtgagagtgtgtatatgtgtgtacaacaaggggatgtatctgtggaataattatgtatctacctacctacctaccttcctacctacctacctgcgtacctacctacctacctacctacctacctacctacctacctacctacctgtcatcatctgtatttttgtgtgttctgtatatgctgttctccttaactaaaagcattgtttattgtcttcataagacaatgaagtttactcacctctaactgctcacctatactaatattatttattttctatgagaaattttatcctccaacattttgagctttggcaa

SEQ ID NO: 116373 - DNA, 1926 bp, Homo sapiens
tattttttaaataggaaaacaaaatctttttgttacacattaaaataaaatccattttaaaaaagaaatgtgatcctaatatatctctgctgagtagattggtgtacatttacgtttaattaaaagctcttaaacttaaattgtaaaattccccaaagagaacgtgaactttaaccagctgcctatgcatcttagcaactatgttttgtgtctggtaacagtatgactggaagacttgtgctctgtctacaaaactttgttatgaagtacttaaaaatacttgtgaataatttgaggtcagctagcaataaagctttgtgtgaaatgtcattaaaaaaagcctattaaccatggtactgttatattcaagtcaagctgttaaaatacattcatataaacatagaaaagattatgcatacaccctgtagagttctgtggtttgattcttgaaatccaaacaaaagttatattgccttttgagtaaaattctagaatagagcagtcttttataagactaagagcttcatctaagagcttgaaatgtcaattacaccattgggttgctctgttcctatgaaatagagcacatctccatttcggaatgagatacctcctctcacagtagcacaggtgtaccccccaacccccttactatacaccgcaaagaaacttttctggtttgcaataatctctgttgagattctctaataacgtgtgtggtgggtggaggtggtgacaggaaatggggatgaagaggtaatttcagaggaagaataaactaagagggggcaagtaggatttggtgagatgcaaggagttagtgacaaatatttgggtgatagggcagggaaaaatttatctgcatatattaatagtagataggttttataccccacctctccctgctatgagatgttaaaagtatgggaagaaattatactgacagaataaaatttagattgtatgtataggaaatgtcagcagaaaattttaacttgaaagccctgggtaattaacatttctctctccttcaaactgatattaagaaatccagccaggtgcagcggtacacactgtaatcccagcactttgggaggctgaggcaggaggattgctcaaactcaagagtttgaggctgcctgtaatggtacccctgcactctagcctgggtaacagatcaacaacctgtctaaaaaaaaattcaataaaaccatttgcaagttgtcgcgaacttatttaaagaataataatagttgcttaattgtgagactattactttcagaaaaaggaaacaaaataatttcaactcccattttgcatattttttgaaattaaagaattcccatttagtagacaattttttttctggggatctaatatacaaaattaagactgtagttaataaaattgcattgtattagagattttgttaaaaaagtaaatttcagttgctcttctcacaaaaagatggtatatatgttaatctgcttccttttaccatctatatgcatcccataacatcatattgtaaacctcaaatacacaatagagtttattttagaaaaagaaaatttctatcatacttattaaatgagcatattattttatttatatgtagattttcttctcaattacttaatttattttgatgtgctgccagcttcatgatgagaaacataagatgaaactgcataatacatttctgttttctatcattttgaaggcaagtcagatcaaatagttgcgaggtgggtggagaaaggaatcctaatctaaatttaatgattagtacatttgcaataagtacattccaaaagtttcccattaaaataggagaaaagagtttagtaaggccagttctctaacttactggcaggaacatttgtttcagagagagagagaggaagggggcaaggagagacttgg

SEQ ID NO: 116374 - DNA, 3885 bp, Homo sapiens
agaagcagaagaagatgaagatacaatgttcaccatggtaactgatttatcacagagaaatactactgatacactcattactttagacactagcaggataatcacagaaagcttttttgaggttcctgcaaccaccatttatccagtttctgaacaaccttctgcaaaagtggtgcctaccaagtttgtaagtgaaacagacacttctgagtggatttccagtaccactgttgaggaaaagaaaaggaaggaggaggagggaactacaggtacggcttctacatttgaggtatattcatctacacagagatcggatcaattaattttaccctttgaattagaaagtccaaatgtagctacatctagtgattcaggtaccaggaaaagttttatgtccttgacaacaccaacacagtctgaaagggaaatgacagattctactcctgtctttacagaaacaaatacattagaaaatttgggggcacagaccactgagcacagcagtatccatcaacctggggttcaggaagggctgaccactctcccacgtagtcctgcctctgtctttatggagcagggctctggagaagctgctgccgacccagaaaccaccactgtttcttcattttcattaaacgtagagtatgcaattcaagccgaaaaggaagtagctggcactttgtctccgcatgtggaaactacattctccactgagccaacaggactggttttgagtacagtaatggacagagtagttgctgaaaatataacccaaacatccagggaaatagtgatttcagagcgattaggagaaccaaattatggggcagaaataaggggcttttccacaggttttcctttggaggaagatttcagtggtgactttagagaatactcaacagtgtctcatcccatagcaaaagaagaaacggtaatgatggaaggctctggagatgcagcatttagggacacccagacttcaccatctacagtacctacttcagttcacatcagtcacatatctgactcagaaggacccagtagcaccatggtcagcacttcagccttcccctgggaagagtttacatcctcagctgagggctcaggtgagcaactggtcacagtcagcagctctgttgttccagtgcttcccagtgctgtgcaaaagttttctggtacagcttcctccattatcgacgaaggattgggagaagtgggtactgtcaatgaaattgatagaagatccaccattttaccaacagcagaagtggaaggtacgaaagctccagtagagaaggaggaagtaaaggtcagtggcacagtttcaacaaactttccccaaactatagagccagccaaattatggtctaggcaagaagtcaaccctgtaagacaagaaattgaaagtgaaacaacatcagaggaacaaattcaagaagaaaagtcatttgaatcccctcaaaactctcctgcaacagaacaaacaatctttgattcacagacatttactgaaactgaactcaaaaccacagattattctgtactaacaacaaagaaaacttacagtgatgataaagaaatgaaggaggaagacacttctttagttaacatgtctactccagatccagatgcaaatggcttggaatcttacacaactctccctgaagctactgaaaagtcacattttttcttagctactgcattagtaactgaatctataccagctgaacatgtagtcacagattcaccaatcaaaaaggaagaaagtacaaaacattttccgaaaggcatgagaccaacaattcaagagtcagatactgagctcttattctctggactgggatcaggagaagaagttttacctactctaccaacagagtcagtgaattttactgaagtggaacaaatcaataacacattatatccccacacttctcaagtggaaagtacctcaagtgacaaaattgaagactttaacagaatggaaaatgtggcaaaagaagttggaccactcgtatctcaaacagacatctttgaaggtagtgggtcagtaaccagcacaacattaatagaaattttaagtgacactggagcagaaggacccacggtggcacctctccctttctccacggacatcggacatcctcaaaatcagactgtcaggtgggcagaagaaatccagactagtagaccacaaaccataactgaacaagactctaacaagaattcttcaacagcagaaattaacgaaacaacaacctcatctactgattttctggctagagcttatggttttgaaatggccaaagaatttgttacatcagcaccaaaaccatctgacttgtattatgaaccttctggagaaggatctggagaagtggatattgttgattcatttcacacttctgcaactactcaggcaaccagacaagaaagcagcaccacatttgtttctgatgggtccctggaaaaacatcctgaggtgccaagcgctaaagctgttactgctgatggattcccaacagtttcagtgatgctgcctcttcattcagagcagaacaaaagctcccctgatccaactagcacactgtcaaatacagtgtcatatgagaggtccacagacggtagtttccaagaccgtttcagggaattcgaggattccaccttaaaacctaacagaaaaaaacccactgaaaatattatcatagacctggacaaagaggacaaggatttaatattgacaattacagagagtaccatccttgaaattctacctgagctgacatcggataaaaatactatcatagatattgatcatactaaacctgtgtatgaagacattcttggaatgcaaacagatatagatacagaggtaccatcagaaccacatgacagtaatgatgaaagtaatgatgacagcactcaagttcaagagatctatgaggcagctgtcaacctttctttaactgaggaaacatttgagggctctgctgatgttctggctagctacactcaggcaacacatgatgaatcaatgacttatgaagatagaagccaactagatcacatgggctttcacttcacaactgggatccctgctcctagcacagaaacagaattagacgttttacttcccacggcaacatccctgccaattcctcgtaagtctgccacagttattccagagattgaaggaataaaagctgaagcaaaagccctggatgacatgtttgaatcaagcactttgtctgatggtcaagctattgcagaccaaagtgaaataataccaacattgggccaatttgaaaggactcaggaggagtatgaagacaaaaaacatgctggtccttcttttcagccagaattctcttcaggagctgaggaggcattagtagaccatactccctatctaagtattgctactacccaccttatggatcagagtgtaacagaggtgcctgatgtgatggaaggatccaatcccccatattacactgatacaacattagcagtttcaacatttgcgaagttgtcttctcagacaccatcatctcccctcactatctactcaggcagtgaagcctctggacacacagagatcccccagcccagtgctctgccaggaatagacgtcggctcatctgtaatgtccccacaggattcttttaaggaaattcatgtaaatattgaagcgactttcaaaccatcaagtgaggaataccttcacataactgagcctccctctttatctcctgacacaaaattagaaccttcagaagatgatggtaaacctgagttattagaagaaatggaagcttctcccacagaacttattgctgtggaaggaactgagattctccaagatttccaaaacaaaaccgatgg

SEQ ID NO: 116375 - DNA, 1557 bp, Homo sapiens
ataaactgcagttttgttagtttttacatgtaactacttcaatataattgtggggtgtattttgtgaaagtcaaccccacctgtggatgagcaattctgtgggaagattgccaatgaagaatacagtgctatgaacaatgccactttcttgtggaattatgtaaaaattggcaacctagaaagtgtagctgatactgccagtgtaaaatttagatatatttgaaaaatattattgtcccactggaatatcagttatagtgtgcttattgtgaaacacacacacagacacacacacacacatatgtatatgacctggtggaatgggggggtgagttaaataatttaatttatttcatttttaataaacttaaaatcttgatgcattttcattgggcattacctatcttacccttctttttaggaagaaggcatacagttctagctgtatcccaaaacgtacctattcataaaggatttttttctctttgtcagttttacatgacaagagcctgtgacttctcagatatctctttgggaaatgggagaggactacttccagaacctttgaagttgttatgcaaatagggcattcataattctattagccggaactcttatctatcacttgaatgagtctcttagaaaagttgtgttggtaaggaattagccccagttgcttcacaagtaagtcagccagtgctatagcagcccaagagattttggctggcccctcttccagttttctctggctttaatcaaggaagttgctgttagatgctgcctttgcaatccaaagatatatagccatccacttggcacgaatcagttgggctcacttcataataatttctttgtcatcgtgaccaaattttatgaatcagttacttcagggacattgcacagatactggcttgggtatcctactaacacttggttgggggtgccaagtttgaatgacgtatgtgcgtttaataagctcctgcctgtttcttctcagataccgagacatgtgactatggctggcacaaattccaagggcagtgctacaaatactttgcccatcgacgcacatgggatgcagctgaacgggaatgccgtctgcagggtgcccatctcacaagcatcctgtctcacgaagaacaaatgtttgttaatcgtatgtaccaaatagatacgagtttccaggaacttcacttctcatcactctcttagttttgtctgtgtgcaagtgaaaagaagtagctttttcaatcataatacaacttatcaaatccctcatctgtgaattacttaaaatcatctcacctatgttaagtcccccatttggggaaacattcaactataatataggtaggcattggtttgtctgccagcagtaatagttgaaacacttgctgtaggttgaatcataagcagttgctatttgatcatttttaaatatacaaaaacagctatttcttatggctcaatagaattcttactatggttatactttcatagtctctattttgaatatttatatgcctgtctaaaattacagttgttttcagttatttt

SEQ ID NO: 116376 - DNA, 1046 bp, Homo sapiens
catatttaatgttatgctatacagctagactaattcaactagtatactaaattaatgatgttatttggctaagttatctaaattgcccttattcttgagattctgatggattcattccacattactggcctctataataggatgttgttatcattgatgaaatgccaaattctcatttctgttatatttttaaaatctattactttttttatttggggtgtttgcccaataaatttcacaaaagtgaattcatgaataaaattgtgcctagccttacccttgtgatttatattaagattatttcttttaatacatttcagtttttactttgtcacttggctttctcctaacctagttattctttaacttgactattgttaacttgacgattgttctctatagcaaaatgtgcctactgctttattggaaaccctaacaaataacttcactaatgaattgctttgcttgtcacccaagtaatatcttcaaagacactcagttaaaccatccaagttaaatatacattaaagctggcaaacttaaacaaacttttcttatctagcttatatactgttagctgactttaaagttctttcttaaaccaactgttaaatgaatgactagtcagagtgttttctttcagatctgttttccagtgctaatgacctttcccttccctggctatgaactcttgtcgctcccttaaaattcttcagtgtctgctcattgccttcagtataaaatgttaattattagtatggcagacaaaaccaatccactccgtctgccacttcctgagctatagcatctcaaaatactctcagctcctggaataagccatgggttctcactcctgggcggctttgcctgtactggccctagtgtttagcatattctcacgtcttatcctcatttcatctcacaaacagtcaaataccctgcatagccaagggtctccttccaggaagccttccttgctgggaatgactaagagctcctcttctgtgctcccacatcttttttgtcctccacccatcctaactcag

SEQ ID NO: 116377 - DNA, 1497 bp, Homo sapiens
gattttaatatttcagaattatgattttggggactttagatgttagggattttaacctctagggattttggtctttaggaatttcaaaatttgggattatgacttttgagattatgtcttttgggattataattgtcaccggtttttgccaactgcctggtctctgtaggcatttgagctttttaaccattcccttagaagtttattttatgcttataaactatggatcacaaatgccatccttatatctgtagttgaatatttacaagatataataaaataagaacatgtgtaatataaattttatgagaattgtttagttaacattaaacaagaaatattttaaaagcgaattttttaaaaggtgtgtttatcattggccaatttctaaagcacgctgtacagactttttccctaaacaaatagaaattctgtaaaatattttaacctatttgcaattaataatggtgttatcacatgaatatttaatccctagacccagacttttacccatctcaaataagagtacgaagtacacatgtaaaatataaacctatttgattaatttgtctttgaatacaaaaataataaaactaaaaaccatactctataaatattttaggaaagatttaaaccccaataatgagaaattctattagaagaaagagaacactaacatacatcaagcccgagtctcatatgaaagtcagctgttagcaataagtacgttagtctgctgttttctcacccaaggtagaatgtattctcaataccttttctacatgagaagctttcctgaccatgtcccttacttcagcacctctgcgatgagatttgtaaaactagcaaatcaagtattttctatttttctttttccggtgtaggaatctttactaaattattcgtctctatccaaatgtcatgtttgccctcttatgtctccaatggtccctggagtcatacttttcattttatgatttaaacattcttacatttcctattttattttctcctatagcagggtttctcaacagcagagctattgacatttttggtcagataattctttattttgagaggctatcctgtgcattaaagcatgtttagcataatccctgccctttgtatactacatgtcagtagcacctttacatcctttctgcattgtaaaaagcaaacatgtctctagacattgccatatgtctccagaagaggcaaactgtcccacgttgagaaccactgccctataccaaaaaagattcacaaaaacaccatgattgtttacatttcccaatggataacaagttttataaaatactggttctacctcattaaagaagaagaaggaaaaaaaccctatttttgcattttatctcccctactcgctgatttttatatttgtgcagtcaattctttactaatcagaactctggggaagtttttaaatgtttataggcttttaaaaaagatacccttttctctttttagatattttaa

SEQ ID NO: 116378 - DNA, 1312 bp, Homo sapiens
atttataatatatacaaaaggcatattttttaaaagaacacctcaatgcatactgcccatgtatctgtggagtatcctgtgggttcctctcaatcctatctatttacttctcaactcccaccagagataatgacttaattcccttgcttttcccttttctattatgatatacacttgtttcactaaacaataaattatttagtgttgtacatttttgaactttaaataagtgggatcatactgtatatattctgtgctttgctcttttttttgttcagcattatgtttgtgagatttattcatgttgatgcatgtaatggcatgttctttgtttttgtttctgtattgtatttcttgtataactatacaacattttacttatcaattctcctgtcagtggacgcttgagtcatattcggtgtttttgcttttataaacaatgtttctatgagcattcttgaacttgttcttggtcaacttttgtgagtttctgtaggatatatttccaggagtgaagttgctgagtcataggatatatgtaccataaaatctactttaaaaagccaaatttttttccaaagtggtggtaccaattttcactcccaccaacaatctgtgatagatcctgttgctctacatcttctccaacatttggcactattggactttgaaatttttgccaatctggtgggtataaaatgtaatctcttgtgacttaattcacattttttgatacgtctctctgaatatcttttcatatatttatcaatcacttgaagctctgcttttgtaaagtttctgttcatatcttttggttatttttgaaaattgtttacttataatcttatacatactaatttgtaggagttctttttatattctggttactaatcccttgacaattttatatgttgcaaatatcttctcccagtttgttgcttgacttcacccttaccttatgatattttctgatgaacagaatccttaattttatttattttttttcctttatgatctaatcttttttgtgttttaagaaatctttacctactgataacctacaggtcacattggcaggcttccaaattaatccgcctgggggaggtcttatgattcatggcttacatcctgtccctgagtaaacaattttatcgtgagttcctcaaatcttatcatgaattccttaaactgttgacatactgattaatatgtagcctactgacagtggaaaaacactgatttgtttctgaatcctgaagttttactgattgttttgcacatagagcattttagcttgtattttgtaaatcgt

SEQ ID NO: 116379 - DNA, 3031 bp, Homo sapiens
tatttgtatttaggagactttgtccatatttcaaaactatgatgttattgtagattgtaaggttttttgtttgtttgtttgtttgtttgttttgttttgttttgttttgtttttgagacacagtcttgctctgtcacgaggctggagtgcagtggtgcaatctcggctcactgcaacctccgcctcccaggttcaagtgattctcctgcctaagcctcccgagtagctgggactacaggtgcccaccaccatgcctggctaattttttgtatttttagtagaaacagggtttcaccatgttggccaggatggtcttaatctcttgatctcgtgatccaccccgcttggcctcccaaagtgctgggattacaggcataagccactgtgcctggcctgtagattgtacgtttttataaggaggtaatagtaatagttaaattcattattgtcccaagtgaaggtaattaagaaataaaaacttagggacggtgatgaagacagtatgctttttaatttggaaattttgtcagaatagtggcccttccagaggggtagatgaatgtatgaccatttagtcctatggttgttttaataaaacaaatttcaagatggcataatctgagattcaaagtaggcccagagcctcaacattacattttctttttgaaaaatttcatattcttaattctaaaagattgcctttgatgaagttgcttactttggtaccataaagaaagagagaaaaataagagactcatattagttgaaatacttagattatttggaaataacccaatttgctttcctttagtcgcttgcggccagccccctgttgtagaaaatgccaagacctttggaaagatgaaacctcgttatgaaatcaactccctgattagataccactgcaaagatggtttcattcaacgtcaccttccaactatccggtgcttaggaaatggaagatgggctatacctaaaattacctgcatgaaccgtaagtggtcctttagaaagaatggactaccgtgctataacaactactagacaccttcattttacggctgtggtatcggcagtttagggtatggagcaagtaatattgtgtgttttctttttttctttctttccttccatgtagcatctgcataccaaaggacttattctatgaaatactttaaaaattcctcatcagcaaaggacaattcaataaatacatccaaacatgatcatcgttggagccggaggtggcaggagtcgaggcgctgatccctaaaatggcgaacatgtgttttcatcatttcagccaaagtcctaacttcctgtgcctttcctatcacctcgagaagtaattatcagttggtttggatttttggaccaccgttcagtcattttgggttgccgtgctcccaaaacattttaaatgaaagtattggcattcaaaaagacagcagacaaaatgaaagaaaatgagagcagaaagtaagcatttccagcctatctaatttctttagttttctatttgcctccagtgcagtccatttcctaatgtataccagcctactgtactatttaaaatgctcaatttcagcaccgatggccatgtaaataagatgatttaatgttgattttaatcctgtatataaaataaaaagtcacaatgagtttgggcatatttaatgatgattatggagccttagaggtctttaatcattggttcggctgcttttatgtagtttaggctggaaatggtttcacttgctctttgactgtcagcaagactgaagatggcttttcctggacagctagaaaacacaaaatcttgtaggtcattgcacctatctcagccataggtgcagtttgcttctacatgatgctaaaggctgcgaatgggatcctgatggaactaaggactccaatgtcgaactcttctttgctgcattcctttttcttcacttacaagaaaggcctgaatggaggacttttctgtaaccaggaacattttttaggggtcaaagtgctaataattaactcaaccaggtctactttttaatggctttcataacactaactcataaggttaccgatcaatgcatttcatacggatatagacctagggctctggagggtgggggattgttaaaacacatgcaaaaaaaaaaaaaaaaaaaaaaaaagaaattttgtatatataaccattttaatcttttataaagttttgaatgttcatgtatgaatgctgcagctgtgaagcatacataaataaatgaagtaagccatactgatttaatttattggatgttattttccctaagacctgaaaatgaacatagtatgctagttatttttcagtgttagccttttactttcctcacacaatttggaatcatataatataggtactttgtccctgattaaataatgtgacggatagaatgcatcaagtgtttattatgaaaagagtggaaaagtatatagcttttagcaaaaggtgtttgcccattctaagaaatgagcgaatatatagaaatagtgtgggcatttcttcctgttaggtggagtgtatgtgttgacatttctccccatctcttcccactctgttttctccccattatttgaataaagtgactgctgaagatgactttgaatccttatccacttaatttaatgtttaaagaaaaacctgtaatggaaagtaagactccttccctaatttcagtttagagcaacttgaagaagagtagacaaaaaataaaatgcacatagaaaaagagaaaaagggcacaaagggattggcccaatattgattctttttttataaaacctcctttggcttagaaggaatgactctagctacaataatacacagtatgtttaagcaggttcccttggttgttgcattaaatgtaatccacctttaggtattttagagcacagaacaacactgtgttgatctagtaggtttctatttttcctttctctttacaatgcacataatactttcctgtatttatatcataacgtgtatagtgta

SEQ ID NO: 116380 - DNA, 1018 bp, Homo sapiens
ctatgcttcacaacatgaggggcagaatgtgatccgtagtcacatggcaaggggcaagggaaattgtgtggctctggtacctgagggcttcagggaacatgccagggcatcagtgggaatgtctagacacccagacagaaccagaggctgctctgggagctggggatgctgttagaccctctgcacagatggaatcaagagtcagatgattagttatttaagccattatgatcacttcaaggctgttctagtgaagacaggggtaaatgaggctaaaagtgtttcagacactttaatttagtagtaaaagagccctttctactcacaatgaaagcttattctgaacacagatacataatacagatagaagtagagctctctgtgttgaaatggtaagaacctggagctacccgcttagctcaaccggcatctatgtttcttacagctccctaagtgcttccaatttgcagccaaggtggaggaccactgccttagagaaatgcttctcaaacattaatgtacttactagtcacctggggatcttgttaaaatgcaggtttctattcaggaggtctgggatggggtctgaggctctgcaagtctaacaagctcccaggtgattctgatgttgccggtaggtaaaacacactttgaataacaaggtcttggaacactggttctctcactttcgtgggcataaaaatctcatagggtgcttattaaaacaccgattattgtgcttggctctcagaatgttggattcagtaggtctatgatagggcctggcaatttgcatttctaatatgttcacgggtgatgtagctctgggcgtgatcacgtagggcaatatttgcaaaacctggcagaacttggcaacctcataatgtatactcatgcctggcacctccacccctccccactccccttgacgctccatccctgcctctagcagaatctgctttaaaggccccttgttgatgctaatcaaaccattgatataaggccttataggtcacat

SEQ ID NO: 116381 - DNA, 1027 bp, Homo sapiens
attgattttcaacatgaatctatttctttattctaggaaattatacctattgttatttcctttagattaagttatttgcaccataaactatggtatccaaataaagcaagtcatttaaaaaacattaacttttaagcagttatgacaaggtgttgaaatgttatcatcagagaaattgagatttataatgaagaggaagcttaatggacttatgctcacttattcatagtaatatagatttggagttatttgatttgtataataggaaaagaaaaatacacatgaagagaaaaagaagagattgttgtcctatcaaatatattttttaaataatgtgattatatctcctttaattttcattcaaacatttgattactgtagtaggccataaaacatttaaaaaagggtaaactagaactaggcgtatataaagaagagtgaagagtttagttaataaaaactataaagaaagggacattctctaaaatcaagaccaatgagagaaggaataagcatttaatcaaagaaagcttaaatcatgttttagagcatctacagcagcagtccccatcctctttggtaccaaggactgggtttcatgaaagacaattttgccacagaaggtgggttggcattagattctcataaggagcacgcaacctacatcccttgcatatgcagttcacaatagtttgtgttcttatgagaatttaatgctgctgctgatctgacgggaggcggagctcatgcagtgatgctctttcacctactgcctggttcataacaggccacggactggtaggaccccaatctaaagtatggaacaggcttagggtaagtggacaaagaaagcttagggtaagtggacaaagaaagtaaagggctaacggatgaatgacacagcctttgttctcatctttcctcatactactagtaacacagaagatagaatgaagacaaagatatgacactttaagaattcattgaaaataaatgttttggcctggagcagtggctcatgcctgta

SEQ ID NO: 116382 - DNA, 1042 bp, Homo sapiens
gataaattgtccaagttcaataaatacttggaatgaatacttggaatgaacagcatcaggaaaacttaaataagtatgatcatttcaatgtttcttactcccagcaatctcttctaacttaaatttaaccaatcaaataaaacagtacatttaaatcaaatagcaggccttgttggcttattaattaacttgactctcatcatgattacagccatatatttaggatttttctgagtaaattttctttacctgtgtattgctccatttcatctgagtttaacaagttctctaaaatgataaggttaagtatttgtaaaacaggaaaacacagctatcgtttgatcttttttaatttaaatatcccattttcactatctagaagtgatttacttacctctattattttcttatgcaagtgatttctataataaatttataaaaatatatttccctttaaaacatcactttgaagatgattacatatctattacaaaacctctcctgttcaagcttagataaaacaaggaaaaacaaacctagcataggcaatgccttttctgtgtcaccgtttttgcctttgcatgcagtattcccactgatagttggatgaggaaaggagcattacagcaacattaacatgtcaagctcacaggctgtacctgccaagcagataaatgtattgtgggaattaacaagcatgctgcacctgggttttctcaatggtattaaaaataattcttcgaatagcataggtatggtagcattggtgccttaagacttaatattaagatttgtatatcctgaagctaaataaggaaggtttggaaccctgggaatgtgatgctatctgtcctaacatctaaaacagactgagaggttttgctttagatttcagagaagtaattggaagaaaaaggttaaacaaccgtactatatagtcaacaaattcattgtgttaaatgtagacaacataaaaatgaagacataacttttattgagtgcttactgtgcacctgatgcttttttaagcgctcaaatttca

SEQ ID NO: 116383 - DNA, 1049 bp, Homo sapiens
agttttccctgccctttgttcttccttcttttttattcgattcccattatctttagtgatcattcccttagcatttcagttttctctctgaagtcctttgtgctgcacgttgtttgattacttgtgtttatgctttgtttcttcagctaggatcattagcacatatctctcagcattggcaaaagtcctcgaaatcattgacacctagcatatactttatttttaaaaaagaaagaaagaagagaaaagggatgggtttattgtccttttcaacagactagagtatacggggtgaaactgcttcacttgattcaataaaatcgtttccggtaacaggccccaggaatcctagacctaagcctggcgcgaaactacatttcccacaatccttcgggggctgataaggctccgcaatggtctgaactacaattcccacaatccagggcgatttccgctttgtcgcgtttcctcaaggctccgccccatttcccatctttcttttcagtccttgcgcaccggggaacaaggtcgtgaaaaaaaaggtcttggtgaggtgccgccatttcatctgtcctcattctctgcgcctttcgcagagcttccagcagcggtatgttgggccagagcatccggaggttcacaacctctgtggtccgtaggagccactatgaggagggccctgggaaggttagtgtgtaaggggcacggcttcgttgggggagggggcgcttggctgtgactcgcgcacctgcaaggccgcctccgggctgtggcgtgggagatgatagccagaaaccaggctgagacgcagactagcattccacttagcccaaggaccagtgaggaagctgggcatcctagcgcgtagccgctaaaggaatgggcaggtagatccggaagccctgcctccatcagccacctgacgccccctcccccgccccgcagaaagccctgagatggctccgggaggccacggctgtaggtgtgttggttaaatccgagctggaggtcatcggacccgaaatgaaggtcattggaaaatcatgagg

SEQ ID NO: 116384 - DNA, 1040 bp, Homo sapiens
acttgtttaagttgtgaaaaatccctgaagataaaacccttctagtgctccttgatacataagtcccagataattatgcaattgtaaatctgtgcctcaccaactcagccatgttgggaaactcaaacttttaaatatactttcctcattaaggcagtggttcttaaatgaggatgattttacaacacaatggggcatttggcaatgtgagacatttttgatcgttccaacttgggggcaaaattaccagtggtgctgaggttgagaagccttgtgtcaaggggatatgttaatatatgctcaaaggagtcgttcatattggaaggttagcagatttgctgtgtgtggataaaatatttagcttaattgtcatcagagtttctcagagtaatactatagaacactaggatgattggaaagagtgtcatagtttagagggggaataacttatccaagctactaatgcggaaaggttgcggtgcatgtgatgaagcaaatcagtatgaatgaattcatgatactgtaaacgctttctgatgtactactcaaactgatagaaaatattttcatgaaactacatgatttctgttaaatgaatgggatttttaaaatgccattaatttctgtttttattttgcagatatgaagagcattttaagaggtgcagcctctggaagtggatcaaactagaactcatatgccatactagatatgtttgtcaataaacttatgacgtgaatgcttaatgcctcttttttgaaatagggaatgtaataattggccatttgcctactttattatttgggtaacattccagtattactctctgtgatttagcttatttaatggtgttaaactgaggttatattaaatttttgattcccaggtcaggattttgttggtaatttatataataaaagggaaatacaaatcgatcttaggtttatttctatgatttttttttttatcgttaacttggaaaaaatacttttgctcttgccctttgacatagtaaattttttttcccatgattgattaat

SEQ ID NO: 116385 - DNA, 1044 bp, Homo sapiens
tttcatctgtggtttgttaggaaaagtttttgaagtttcaggtttcttgggtaggaatttaatctgatcacttatcttccttacaggcatactacctggcgtcttcctacatttattgctcctctgggaaagtgtaaagtctttaagatggaaagcatgagaaaatgtgtatctaatgagaaccggatatagttctgtcccttccaagttgaggtggtgtcccagaatttagtcaaactgcggctaccaaggcagtcatagtgtatattaacttgtgtgtgttacttgataaagctagatgattagtgagaagctttgaatacaggtgtttaaacgagtactatagtaataatttgaaaaatgtattggttagaatgtttttatttcagtgcacagcccagcttctgattagagaaagcatagtgatgcagaagagtctttgggtcacttaatgagaacttgggtcagagagaaaggaaaggaatcctgtgtattataggtgtgattaagagcctatattccaacaatgtatcttcttccataggcttgccacttaatattaacgcactgcttttatagtggagactttggaagtacaacagtgaggcaaaacaaaatcaatagagcttcccttaaacattttttgttggtggccagtatagtattctatttaaaaattaagttttacagtctgtaaaatatacaggacaatgacttttttaaaatgtaagttaatacctcctcctcacttgtcttaattgaacttaggtgtttattcttaaaggtggaccttgatgaaaatgttgagatgggaagtgttattaggcaaaacttgttatagatttctcatataacccttaattgacccttagaattttaacaaccggccgggcgcagtggctcacacctgtaatcccagcactttgagaggctgaggtgggcggatcacctgaggtcaggagttcgagaccaacctggccaacctggtgaaaccctgtctctactaaaaatacaaaaataagccggacgcggtggcacgcgcct

SEQ ID NO: 116386 - DNA, 1001 bp, Homo sapiens
aatatgggaggggactataaaatggcatgaatacagcaagttgagctttcctcagggcatcaaagtaacagtaccatgtgtattacttattttcatgtaatacgagataatagaatactagtagtgagggacaggctgggagataggacaaatacttatgagttcttccttcaggcccagcaagctaagttgtcttttgttaaatgagtcaaatttctccacaatagatgttgctttttggctaccattaccttaattttaaaccaaaaatactgaatacggatgttgtttattgtttgaatatgcaggtatttctgtgttaccttgaaatcactggcagtacatttcagttttgtgctgcgttaaaaattgttgttattagatacaacttattgataactatgtatgtcttgtcacatctctacaggatttagggtatgatgattttaggtgttttagtggttatgtgatttagtgagtaaaataatgaacagtatgggggacaaaaagaaatatacaattctacagtctagttggaagatgaggcattactggtagggaaataagatgataaaagtagtctacagatacgttgtgcaggtaaatttttcaaattcagaggatagttgccaaagagtgaaagaatgaaagtaaatgaaagaatgatactgaaatttcataccataattctcttgaaggaaatttcagtatcattcatttaggattattacagtgagaaagtgtgattaacttttgtaacatttgtgtttcaaattgtagtcaagttgttatgtgtaacatagagttttagttacagagggaagcttctctgcttagatacagaagtagccttaggtagagtgacttgcttcactccaccctacaccctagctaagttcatataactaggtagtggtagaactgggacagaatccgattctcatactgtttcacatatatttagatttgagtaatatttataattcatttttttttaaatt

SEQ ID NO: 116387 - DNA, 1082 bp, Homo sapiens
tcataatgattttctttaatgtgcttatttaggtggttctagaaaggaatagtttaattggttaagtggtaatgtctgctgccattcagctagtgaaatattggccatcattaagaaggattgtagaatcaagatagaatacaatattctatgattattcaaatattgagttaaatgttgtataatacaagttctgttgtctgaaacattgtccaagatacaatgaagcttgagatagcatagagaaagcagttaaagctttcaaggataggagaagagatttacttaaatttacttaatagattttgatttgtgaatattaagattgaaaggaaaattgctggaaaaaaagacaaatacagttatagatacagggttaatggtaccatccaacaaatctggaaactttgtattcagatgcattcttttaagcctgaaaggacaaattcaagaattactaatggttttatattgatgaaatacatcagcaacttgttgtttccataattgtgtggaggttgaaaacatctaggtttcagtaaaaggaaactaagttgtatatgcatctctgtactcttaaattggtaacagaaaaaaaacatacattcctttctcataatatatcccttggtacctaccactttcagagaaagaatgctgtacccattggataatgggtatctgggtgaattaaacaagccctggtttttttataagaaaaatgttaactgacataagcatctacatcatgcttatctaaaataaacattttctgaagtaactctatatcttatgtatgtatagtgtgttaattatatttattttgtgttttgattttatatctaccctacatctgaaagagtaataacattgaagcataagtttttcaattcagttttcttgtagttacaccccaaaaccttcaatatatgtacaatcagtttctgttaacagaagttgtaatttgaatctaacaataattcagtgatatagttagtgcagatactactatcaaacccattttactcatgaggtaattaaaattcagattatttattattttcaggaattgacatgtggat

SEQ ID NO: 116388 - DNA, 1035 bp, Homo sapiens
tattacgaagatttacatacagaatttagcagttttagccagtattccctaactatgcttaggttccttccaaattaggacaggtgtagatattactgaccagaagttactgctgcaaaatttctgctctctatttttatgtattaaagctggtaagatacaccagagagatagcagacaagcaatgtggatggttgtgaatcataaaccagaaaatttgaaagaaattatcttaaaaaaaaaacaagttcctggtgaaaatttacatatgtttatgactttgaatgcactttgtaataatactacttaacatcttttcttttttatttgataattagggaaaaactaacagcttaattcttacagttggtcaagtctgcagttttcttgtgaggccctcagataatactcctggcgattattcactttatttccggaccaatgaaaatattcagcgatttaaaatatgtccaacgccaaacaatcagtttatgatgggaggccggtattataacaggtaaatcataattttttagctatcttttacttttcgcaaaaatagttgaaatcttgataatacagtattcagagtcaaaattatataaaagtttctaacttctaaaaattataagaccttcaatataatttcatagtagtcatgcccaagaattctttagacagtgtcaaatatgaatacaaattagtaacttatactttgtttccttccaaaacaatttttgtgattttaaaaattagacataagctgtttgcaacaaatttactaaatccatgtgttatctgtaggaggagcaaaatatcttaggaaaagaaaatatatcaacattattttatcagtgagatactttagtaggaaaaaaaaagtttctaaagatacctgagacttattatacagatgttatcatgtaactgagttcttctcaagttgacatttcttacatgtgattgttggtttttacttctcactttcaaagtaaactcattgtttgtcccaaaactcagaatgaattatagtta

SEQ ID NO: 116389 - DNA, 1043 bp, Homo sapiens
ggtttttttcttctttttgcctgcttttcatgtgttttatgacctgtttctgatataaaaccagtatgtgtaaatgtgataataaaaattcttaatttacctgaactctgcttcctaaataaatgccatgtttctgtgaattcttcattcttagtatctcatatatactcttgggggtgaaaaaaaaggtagacttttaatcatttcctcatttatggtgactctttgaatatggtattgttgacctggctgcccacttgatgggtatggaaaatcagaatctgggccatgtattctggcctgtaaatctatattgagaacattgttttttctaaaataatatgaatgttatgatcatttattctattaatgtatttgtgttatgtgctttgaaaaaaatttgctaattagataatccttggcaagaaagtttacacatatttttaaagattttgcagttttatgagacagattaatactagaaatttttattttaacagcattggggacatcatagatcactatcgaaaagaacagattgttgaaggatattatcttaaggaacctgtaccaatgcaggtcagtgttgcatttcttattgcaataattagcattttattttaaaatgcattttggtggtatgtttttgcacacatttgtacaattcaaattggatacaacttaaaactacagattatttagatttttttagaaagtcaactgtaagaatcttttagtttttatctatgttgattttaggtaatcaggaacaacctagtggctttttgagattagaagcagtcgtggaggaaggtaagttgcagtaggtccaggagtgagttttttggaggcaaaagtagagacagcagggataaaccacagccaggattattaaagcctggggagtaataaaaggaaataaaaaatactgatagaagaggattagggcaaaaaatggtttacactttttctttgtttatttgcctgtagttttacggtgagaggatttgagaatgtctgtatactctgagtgaaaactgtat

SEQ ID NO: 116390 - DNA, 1112 bp, Homo sapiens
agaggaggattatctgaaatcatggttataacaccagctgtggatggatgggtgtggcatgtgacacacttagtggattgagggaactgttaggtatttgaagtgtgtatgttttgttcattctcatgtcttagttcacctggtacggttgtctgtattcacctagcatttctcacagacacaattgtgcataggcaaacatgaatttgctttatgcttacattggttcctaatctaccagttatgctgggacaagtttatgtttttaaaacatgatttgctgtaaaatataactgactgtattcgaaaatagcttattaggtatccatggaaacagacaacttattagttgttcttgggattggcaaggaaacctttctgtgaactttgttgtcggtgttcttcgaaattataaggaagcatttctgagaatttctttggaaagcaaaagatcatttatgtgttatgtgtatctagattttagtattttaagcgctttggcttttaattggtacttttatagatttttacttcatttccatcaagaatgtatgaaataattttaatgttttttaaaattcaggatcaagaacaagtactcaatgacacagtggatggcaaggaaatctataataccatccgtcgtaaaacaaaggatgccttttataaaaacattgttaagaaaggttatcttctgaaaaagggtaagttcagacttttatcattaacccatttgatagagacgttgtaaatatggagctccgaacttattgtgatatatatttaataagttttgacatgagttattagtaattgacacttgtttagagcccatatataagcattcttcaaaatttagagtgtaggtatattaaaagtctacattttcaaccagaatgtttcttctacccatggtttctttttttctttctttctttcttttttttttttgaggaactccttatggcacatggcacattcataatattgatattttacagatttacctcaatttgacataacgacattttggggaattgtgggtgggggtgtgctttataaagtggaagaattttttccttaagactgttaaagaattattccaaaacaag

SEQ ID NO: 116391 - DNA, 1005 bp, Homo sapiens
aaattcaaccttggaaaaatgaggttaaaaatgattcactaatgatacttacaactgcaattagatgaatcttaaggaagtattaagatgaatattgcaatatctgtaagattgaagaaaagctttagcattattttgatatagtttatatgaacagatgcagttagattggaagtctgttggcacaatcaaaagaaaggtccacattacacttgatggtaaaagagaaagaattgccagagtaaaaagaaggatcagatccttgaagcacaagttgaagattgtgaatgattcctattctggttagtaacaagaaaggagtttctgtctggtagggggaaagcaataaatatacatttaccacttgctgtaaggttgtagcttgcttcttgtacagtttcttgttgaaggtgacttaaagaatttgaagacattagaaaaagtctttgtaatgaattatatttaatgataccaggtctgaaacctagtatgaaaaagttatgttcatgagaactaaactcaagtctctcatttagaaaacagatttttcttttaagactgggcgcagtggctcacgcctgtaatcccagcacttcgggagcccaaggtgggctgatcgcttaagctcaggggttggagaccagcctgggcctacatggcaaaccccgtctctttaaaaaattaaaaaattagccaggtgtggtgatgcacacctgtggtcctacctactcaggagagtgaggtatgaggattgtctgagcccaggctcacaactgccaggatgttgcagtgagctgactgtaccactacacccatggcagagtgaggcccggtctcaaacaaaactaaaccaaaaacaacaacaaaaatttttttttcaaagtatgctactttattattaactattttttttaaagtgccttcctgtgaaatagagaagcacttagtgagaaagactgaatgccaaggcaaatagcattaacaaagtacatttcaaggaaatga

SEQ ID NO: 116392 - DNA, 1017 bp, Homo sapiens
actccatgtctgaaaataaaagtcagtcaacacaaggaaagatattttaggaatctattctctaagccaagtcgagatataatgtctactttagattagctattaatccatgtgcagtgtccttcttatagcgtctattaagtaattgtgtgaagaaataatattttttaaaaaacactctttaaaaaatattttgcaacaaagggagaacccacctctataacaaaagtaaaaaattagctaggtgttctggcttatgcctgtagtcccagccactgggtagaatgaggcaggaagattgcattagcacaggagtttgagttacagtgagtaagatcgagacactgtaagccagcctaggcaacaaactgagacactgtctcttaaaaaatttttttgctttctttgaaccctaatatttctggagtatatggttgtattttatacaaatacagctaaatttctgcttatattctaacgaaggaacttaaaggtggttaagaagtgaaagtggctttgttggaaatataatttgccaaccctagatatgaggaagatgctcttaaaactagatcctagcgtgagactcacagaataaacctgaatgagcttacaactgaacgtcatatttcacatctttatcaaatatctcatttaatgctcatttcacatgtaatgcacataaaattttacggctatgtatccctaatttttagatgagaaaggtagtgctcaaaacattttggtaacttacatgatttttttaaatgttagaaattgagttagaaatttaaacttcagtatcctattttctaagtattttaccatggtccctctttctgaataaaatgtcacataccataatgacatttcagcatgttttgcaagcctaacatagaacattttttaatgtatttatacataatatttctgtatttccataaatggtatttccagtttttgttgatttattgggctgtgggggtctctggttattctcttctatttcaaaaagct

SEQ ID NO: 116393 - DNA, 1417 bp, Homo sapiens
ctccacaggctgaattagatattatttctctgtactcgaatagcattcaccactgttaacagcacttaccagtgctgaaacataattgatttcttgccttcttgactaaactgacctctatgcaactcaaagaacacatctcaatcatctctgtactctctacctatcagagtttagtgcaccgtagacactcagtaaataaacaactaaatattgaatttgtgatgttactgaaaactcctttaatgaaaagcatttaacaccatagggaagactgaacaccaggaaaatttacttgcatgactaattatcgtgttctctttttaaacaataattgcttgtttttcttcccaagtatttatgcgctgccagttgagccgattacagaaagggcatgccacagatgaatggtttctgctcagctcccatataccattaaaaggtattgaaccagggtccctgcgtgttcgagcacgatactctatggaaaaaatcatgccagaagaagagtacagtgaatttaaagaggtattaaattatttatcagtcttgtttttgttggaattaacagaaacatttaacatttaataaaagatccattaaggtaaacatagtaattcatagcttagtagcacaatgatgccagagattttaaaccttgttttatactgtaattttggtagaaataagtagactacgaattcattctattttaaataaatttattcaatgggacatcattttaaatataagaacttgtgaaagaacatatttcttgttagtctcatggagcatgcttataatgctacgtactttaaacaatcttttaaaatgtcattttagcttatactgcaaaaggaacttcatgtagtctatgctttatcacatgtatgtggacaagaccgaacactactggccagcatcctactgaggatttttcttcacgaaaagcttgaatcgttgttgttatgcacactaaatgacagagaaataagcatggaaggtatggtatggccatgttagtgtgatacaagaaactgggtttagattttatatcaaggatatatggactctatctctgaatatactaaattgttaaattatattgcaaaataagttattctgttttccctccttaaaaattgcagttggatgtcagttctgattatgttggttactatgggaagctgatatttctaatgtaggttttggcagataagtactagaagccacaagaaggtggtatctgtgtctacatcaatggcttgactgtttggcatatttatctgtattctcttgttttttattttcttttgagatggcatctcagtcgcccaggctgcagtgcagtggcgcagtctcggctcactgcaacctctacctctcaggttcaagcgattctcctgcctcagcctcc

SEQ ID NO: 116394 - DNA, 1485 bp, Homo sapiens
cactttagggtataaaaattctcttagttatgaccagaaatactcagccaatgactgaataatagagacttatgttttgaggggaattgtggtaatattttatgcatccttttgctttgatacagtttttttcaaatccaggttcccatcctgaaattgctgaccgagctttcatttattttcataccatttttcctctgtctagcacgtattgaaaaagcttctggctataacagaactgcttcaacaaaaacaaaaccagtatacaaaaaccaatgatgtcaggtagcagccttcgccccagtgttctgcatggattcagcatgtccaacatggtaattcacttcagtttaatgtctcctttgctcttgccaaaaaatagcacacttttccacattccagtgatgtgtgagctatgcaaacaaaatccaagattctgctggtgaataactatgccagcaaccttgtaagctatctgtgcaggatatttgcactatttccacatggaatcaatctttaacaacctctgagccttggtgtacagaccacctttcacaaaacgaaatgctatgactgtatcttgatatctcgaactttcaaaatatattttcagtacacccagttgccaaagttttgctgtctcttagagaaagaactatgaaatcaactgacaagaaacacattcttattgacaattgtgtataactggattgcagactgttcttactgtaactacttcctgattaggaatatgaccatttgactgttcaatgattatttgtatttacagtttccagagtttgtcattataataggaacaatctttgctgtatacttttaaaaaatactctgctatttctcttgctggaactgttgaaagaaaatatatagaatgatctattgctcatcagctttattttttaaacatacgacttattttgttgaaattgtcaaagactgtatttagatctcataatgctttgttaaatgtttacaagtaaatagtttgaattcagtaaatattattggttgttgtattgatcaatgcatgttacccattcaaccattttatagactaccaatttcttttatgttaactagaatgcttttgttaaaagttatttgttcattatttgtgctacccctttgattatgcagacaacctcatcagctgcctaacttatccatctttgaacttctgactacttgttgtatctgctggatatttagttcaactgtatagttttatttacttctgtatgtgtatttttgtgaagtattcacaaaggttaagttaaaataaaaccaagggatatcttgcataattgattacttctgtctaaaagagctaagcatttaatttatttattttcttcctccttcaggggcagtttaaaccttagcatcagagcaaggcccagggagaagctgaagctttagattagtatttttgctaatggcctcttttgaaaaggattttataaa

SEQ ID NO: 116395 - DNA, 1110 bp, Homo sapiens
ggaaaaaaaaatgctaagggcttaaaagatgtctgcttagtagttccaagctacaaaaggcagttatttctatgggggctgctaacctatgtggcttcaatcaccgtttaacactgataccaaaaatctcaacatgtcccatgctccttttccttgaaatcagctcaattcattccattctctcccttcttggctcttttatcaaattactctcctttccaccccttctgttttttagctggacttggaccaacatagtatcccaggtggtctccttccttggttacatgatagaagacagggaggatatggattagtcaagatatttttgctgtgcactttggctcccatttatcacacctcaatctttagccatactaacctgtcattcctcagtctgaaatccttctcccttttatttaaaatcacaaacctgacttaccctgcttcttatattttaacatcatttgtctctcaagttgaaatggaaacttgttacttacctttgtaggccctctagtaactagcttgtcagtgttgaaataaaatctctcacactttaacgtttttaatggggctgggtgggaaaattttcagtgataagtgtggaccttgctctgatgccaaagtttggcgatctgaaagggaaaatgagacaaattgtgaacatcttgtaattctgtctagagcctagcagcaatatatttaactaggactgcgatggaggatttataacttttggcttcttccactctgcttttgtaaaaatctcacatcacgaattttattcctttcactctggaatgagaaaaaaaaaaaacccacaaaactcaagcctacagtgtaaagaattattgttagagagatgaatatgcatatagtaagtattgccttaaaatagatgtaactataatggtacctacctttctggaaagtacagcctgggatgtactgagactgaggaggtgtgtgtatttgtgcaatttaattagattcaggacacttgaattactcggaattccttcaagccagttttcctgaaaaaaatctggcttggtaaacagacgtccacagtttggttccaattataatagttaacacttactgaat

SEQ ID NO: 116396 - DNA, 1048 bp, Homo sapiens
ttattctccaagagtacaggcattatagagttgtgggttttttcattttttgcatacttccttacgtacagtactgttgtccattattaaagggatttttctctcttctgtctttatttaatgaagaatccttcctgtgttcatagaaagcagaagcaatatgtatacatactacatttttgctttttttcttattctccaaggatttttcccttacccccttttaaaaaaaattttctatctgtcaagtcaaataagtgaataatcagaggcaaaaggtcacagccataacctttattcctcactggaggagtctggtgagaccatgccaacattactaacagtgaactattacaaaatttcctggtttatcttttgtaatccacatgggtaaaaggaggagaacattttcttaaagggaggtaagaggtaaacaatactggttatgcttcagtgttatccttaccacactttttttccttcttaggaagaatggactgatgacgacctggtagaatctctctaaccatttgaagttgatttctcaatgctaactaatcaagagaagtaggaagcatatcaaacgtttaactttatttaaaaagtataatgtgaaaacataaaatatattaaaacttttctattgttttctttccctttcacagtaactttatgtaaaataaaccatcttcaaaagagctagaatagcacctgttttgaatattcttattccatcgtgactaatatcaaattaaagctgcaactcatttgcctaattttttaagcaaaatatgataggcaaacctatgctttttttaaaaaaggcaccacaaaaaacaaaacttagtagccagctttaaaagtgttaaggaatgtgttttgccctctagaaacctttataaatggctttttgaatgccatcctgatatatttagctatttgtccattactattaaactgcagaaggtatttcaactgttacatggtactgaaagccagtcgtctgggtaatgaatattatttttctttagttacccgaaaacatttc

SEQ ID NO: 116397 - DNA, 1082 bp, Homo sapiens
tcgggagttcgagaccagcctggccaacatggcgaaaccccgtctctactaaaaatacaataatcagctggacgtggtggtgggtgcctgtaatcccagctacttgtaagactgaggcagggagaactgcttgaaccctggaggggtcacagtgagccaagatcacgccattgcactccagcctgggcaacagagcaagactctgtctcaaaaaaaaaaacaaaaaaaaaattatgaaacacaattcctgtacttaactcactgcaaactggaaactgttcatggaccagctctggtacttgctaccatgagtagtgctactttaggactaaatatttgttttccttgatcttcaaaattattttacctttagttttcatgacacaaaaactgttttgtcattgtcagtcaatacaagtgaaaccaaagttccctttgatcaaaacccaaatctgtcatgacctcagaagttacttagcagttgtttacctttgccagccttttctctgcacgtatatccatatatttatgaaataagcagcgtttttttcttctttgcatttttcatacatattgtacaatgggtgattatcaatgcttagcttttgctagtctgggtgaaaaagtatcacattggtattttaatttgcattttcttgattatgggacattgaactttccatacttaacagtcacttatatttcatctgtattgcttatttatcccctttgcccaattttctggcttttttgtttgtttgtttgtttttgagatggagtcttgctgtgtcacccaggcttgagtgcagtggcgtgatctcactgcaacctctgcctcccgggttcaagcagttctcctgcctcagccttccaagtagctgggacgacaggtgcatgccaacatgcccagctaatttttttttgtatttttagtagagacgggattttaccgtgttagccaaggatggtctcaagctcctgacgtcgtgatccgcccgcctcagcctcccaaagtgctgggattacaggcgtgagccactgcacctggccacatttttgtggtttgtagtgctttatagatt

SEQ ID NO: 116398 - DNA, 2868 bp, Homo sapiens
gaataatagctctttctcttaacagtggaaaaggggaaatcatgggttaggatactgttatgcctcaggatttggtgttgacaggaaatagcgcctttctttggtaagagatagttttctgagagtgatggagtttctgagaattatcaaagacattaagacagatggaaaatatttatgcagtcactgaaaaataggagagtcaattgtctgtggaaatactatggttgcttggcagtgtttaagagccttgctgaggtcaatgaacatgagtttatagtaacattaccagacttctgcttgtatggttttctctggcagccctcagaaatcttggtatagttgcaaagcgaaagtttgttggattcaaccactgttcagtttctggttttgccagaaatttgttggcagcatattggggcagggaattcaggagagaaatgaggaccagaggacactggtgagtgggagcaagtagagggataagtgagcaaaggttcagaggagggagaacagctgtgaagtaaatgagtaaatatattagaaagggaggcattgtggtcagagtagtgggtctgaatttgtcatatcacaggtgaggcatttttgcataattgactctgaatattttgtttcagagtgtagaaaagctttcttagtgctttaggtgttgcatatggatatctgaggacttaggatttatagtttattttatagggtatgaagaactgtcaggaaataggaggtcttccacatctcttgggcatactctaaaactttttctgtgggaattcgaagtctagtgtgttctaatcaaatcgagattcatttttatttacttcttcctgaaagcaaattttaaatagaaggaatttcatataaaaataaggtgtattcctacatgtggccttacatttgaatcacctgggttgcctgagagaagcatttacctgggaatatgtatttcttggccctactttagactcaatggaatctctaagagcttcccttccctccccttcctactcaggtggaaaaggaccaagagaagggattaatgtaaattgaggacagtgtcaattactgtgctaggaactttagatatgttatagcatatatttcttaataggagttgtgtaatttttaaactgttgttatactccatttaaaccctcagaaatggtaacatttgcaaactttctttgtagacccgctatcccatattggagaatccagagattttgaggaaaacagctgatgactttcttaatagaattgcattgacggatgcttaccttttatacacaccttcccaaattgccctgactgccattttatctagtgcctccagggctggaattactatggaaaggtattaattagttttttaacttaggtcaaattcagtcactgggtttatttattcatagaatcatttctgactgtaatctttaatattctttgtggctgggatggttggtgagaagaagaaatgaaattgccttttgaggaaatctttaaacatcatgaaaaatactgttaaactaagaggatacatttaggattaaagtagaagtaaaccaggtgatccttgaaagactgatatagctatcagtatatgacaaatttagaagttcctgtgaactggtgagcaacttgagtgcagcaaatgtctgccttgttttatctttattccccttctgtagagcatgtatgacacgcggaagttaaatattgttaactaactgaagcacaagctagcagccaattagacatttttagtttctatattaagtttctcaatttatgacctttgaggttctgcttgatttcattcctagaaatagctgaggaagaaagatgataaaacttcctaaagttaattaaaactattttacatgattataatcccttatccataatttcagaatccattgataaggtggcagcaaatagagcagattgtatttagtttttatttcacttaataggaatatttgtgttcccttgcagaaatcttaatattcctgattacagacatcacttgggtatttcacatttcataatatatacaccagataacttttctaagacatgaatacttattaataagaatttcgcaacacatctgcatctaggataagggattgtaggtttatattttatttatgatatgcctgttctctgcaaacgcagctcaccaactgtatataaatgtatacgtttaatcccaaagtgatttatatctccacttatttactaagcaaacatttattagataccttctatgtactactatgcactgtactacactttaggagtatgaataagataaatctctgtgttaggaaagatagtcatgtaaattactgatgtatatggagttaagatgtggacttccattaattttgtgggggttgggtggttattttttttgagacagcatctcactctcacccaggctggaatgcagtggcacagtcaaagctcattgcagcctcaacctcccagcctcaagcgatcctcctacttcagcttgctgagtagctggaaccacaggcacacaccgccacaccttggctaatctttttgttttttttgtagagttggggtttccctatgctgcctaggctcatctcagtcactcctagactcgagtagtctcctgcctaggcctcccaaagtgctggggtgacaggtgcacaccaccatacctggcctgcagacttcattctgtaagggaacaaaagtcctcttttccacaattcaaataaccaaaagtttgattaatcttgaagcattgtatatagtgcatctataaattcttcagtgaaggtccaaatgaatttatttcatcttagaagttta

SEQ ID NO: 116399 - DNA, 1726 bp, Homo sapiens
atacttacatggtacatatgtgggtactgctttatttttaactcttccatctacattatacaaagtactcttattcctcagttaatttgtttttccagatatttaggttgtactgcataacactgtcattgagtcagtgatgtttgaatgccatggcaatattggtttgacctaattttatagttgtcttacgtctcctaatgaagtgtgaacaggaagtgtcttttaaaaaacaattcttgcaatgtctagcagtcgcttttgaatattaggcaattatagaatatacttttagaaataaattatttagatacttctcaaagtatatgcatgttcttccaccccacccaccccctgcctcctgcctccttattttttcctctaggctcacttgtgcatttttggcctgcaaagtagatgaattcaatgtatctagtcctcagtttgttggaaacctccgggagagtcctcttggacaggagaaggcacttgaacagatactggaatatgaactacttcttatacagcaacttaatttccaccttattgtccacaatccttacagaccatttgagggcttcctcatcgacttaaaggtaaacttgatgtaaaataaactaatactacattctcctttcctattctttaacaaaagaatccaaaattttaaaactcataatcatcctcgttgttatagcatggatacaacctgtgggtctggcctggtcatctagggcagttgttttcaaacttcagtgggcatcatcagtcatctggagaaattgttaactgagattgttgggtgggacttacagagtttctgatttaagtgatctgcaatctcatttaagtgatcttcattacatccagggatgtaatgaagaccattgagagtttagaacggtgcttactataaaggcttaagataactcttctaactttgaattatattgtcatggatctgggcctgatttaaaccataaaaaattcttaaactagaagattgctaagtgacttatatttttagaggtttgtgaacttaagtcactatgtaggcatcaataatatacgtaaacaaacattgacaaaagcaacttttttaagttgttttgtttggctctaaaagagaagttggatagtctgagtcgaatcaaatcaggaattggttcattcatgttagatcagtggctcaatttgggtaccttctatgtgccaaactttgtgcttgaggatgtaaccagaaataggacaggaacagtctcaacttttgtgaaccttacaatctaaaggttttagacaatcatatatccagtgtgctcaatgatacagaggggaaaatatattttagagggagataacagattaaggggtaaggaaaacattctgagaacgtatcatttaaaataaaattcagagtaggaataggagagagaagaacattccaatcagagacttccctggtaaaaagctcaaattcaagaaaccattccgtgctgaagagcctgaacagagcctagcaatgcagggggaagagatcacagacagctgctgccagagtggaaggcagagtctagactgtggagacaatgttacagattttgaatacagcaaagagaagctagtgaaaggtttaaatttagagagtggcatgattagatttgcagctttaaaagatcatgttggcaaccttatggatcaggtatttatcgcgcatctgtatgtgtca

SEQ ID NO: 116400 - DNA, 1074 bp, Homo sapiens
ttggttaatctgtgaacgtttgtatttttcttcctgaatttatctaattcagaacatttttgatagtctgatttctaatacacacacacacacacacacacacacacacacacgtatttttaaatccagtgaccataggaaggattagccagagtaggctggggatagacaagcaaaggatgggaaagaatcttttggctatggcatttctgtagtaattcatcacaatttgttttgattaaagaagaattaatgagtattagtatttttctgggtaatctctacaaagaaacctttccataaataagttctgtttcacaaaatttaacatttaacatttgtgactagatcctgatgatatattttttttaacccttagggtacggcttgtatgtatttcaaacgtttttatcttaataactcagtaatggaatatcaccccaggataataatgtgagtatgtctgtctaatatattgttttcatttaagaagacctttataatcttttgagtattttttgggaggagagaattgtgagagagagagagagagaactgacttcctaatacagggtaatttagacttgaattctatttttttttttttattcagaacttgagatctctgtttacctgtacttcagtaattctgatggtatgtgaacttcagcttgtccagattcaaattttgtttttctcaaattagctacttctctaacatctcttcctattagacacctttgttcttccagttgttcagactgagaatcatttatagtggcccctcccacatccagtcagtttacggatcctatagcttcatactcatttcagttgaacaaaggtctgttgttgctgctctctgctgagcgctgtgtctatcattaaaaatgaaattagtatgaaactcatcaaagagtttgctctcaatgacattgtacctgttttctcttttttgattcccatttccaccagtcaagattaggcccttgatctcactgccaactgttttttacagtagctttcttactgttttctcatactgaacagcatgaagtggccaggtgaatttca

SEQ ID NO: 116401 - DNA, 1062 bp, Homo sapiens
ggctgccttaaaaaaatcaccacaaactgggtagcttaaaataacagaaatttattgaaacatttgctgtttttttacaacttgtgacgtaatgactgaccgagaaacggatgttggaagctttccaatcatattttaaaaagtctgtctactttttaatttataaataatgatatcacaactgtgagcatgtgcacacagcctgtcatgattgtttatactttaatgaagcaaaggtctagctgacattccgaaaagtcgtgaaatgatggtacagttttagtttattaaatattttcctacagctattttgtgtaatgattagcgaatctataaagaaaatgaggcgtgatatatacccttcgttggatatataaactaaatttaatctagatagagaaaaatgttttacaattgtttaattcattgaattcattgaacttgtgttgtaattgttgatctaaaggttcttccgaatgatccagtctttcttgagcctcatgaagaaatgacactctgcaaatactatgagaaaaggttattggaattctgttcggtgtttaagccagcaatgccaagatctgttgtggtaagttacagtggtgatgaaatataatgtcctttagttggcttgtgaaatttgacctcttctaaattccctgtccactcaagtcttaaaaattcaccttagttacaattaattagtttttggcacattatatatttttcaatacaggccttaaatcatgagttgctgtatcatatcttcaaaagtatttcaagtctcactttgtggtcagaaaaaaatttgaggtcaggtaatgtcataaagaaagaaaaaaaataaattactttcctctaagttctcaactaatgagccataggactgggactagaacatagactactgcttttccaactctgtgacacccaataaatgtttgaaataatgcattcattcatcattggtaatcatatgccccagctgaaactgataccataagatttttttaagccttgattagtagaagctggagttttatctttggtgaaaaagattgc

SEQ ID NO: 116402 - DNA, 1396 bp, Homo sapiens
tgttaatttcaaatataggaagatttttttttaataaaaagcttggtaattagttactcttcaaattgtatttgtgtctttgattttctaggtaatcattcctggggtatttatccagaatctatctctaccttaccagtggataatagtctactgtccaattctgtttactctgaattaccatcagctgaagggaaaatgaaggtaactgttacacaaataacagtggcactgagcagcttaaaaaatatttttactcctcttctttttcgaggacttctgtcttttctgacctggtggattgctgcttgcctcttttctacaagcctttttgggcttttctatcaccagtatctgactgtggcatgaatctcagttaacaaaaaagcatatccaaatcaccctttaaattaaaatatctgtgcccttaaagggctgatgaaaaccagaagaaagcaaatacaatgggaaaaaaaaaacatatcagaatgtcttgtattaaatgtttcctctgtattctcagggtgaattaatgtagtaatatttaaaattacaaaatagattgttaactgttacactgtggcattggaattttaactctttgtatttactggtatgagagggctatctacaagggtaatatttctgattaccctggtttacagaaacctccagcagtctttgaaacatctcacatgactctagttattgattgcttttaatggttttatggtactgttgatagtcatagtggctgcctatagaacaatcttcaaactgagccatgctttaggggagggaaaggggctaaagtctcttctgttggtaatttattagttactcttgaaacaataaaatccaacagaaaggaagagatagctactgtatattacagtaaagaaagctgcatagttattttaaatttaatggagatgaatatggttaaaatatataactactgctgcttgagaatagcaagagtattgttttaaaacatattccacccaacttgagagttcttttaaaatgattggccatatgaacatttgtaatcttgccattaggtttggacctgccatattttgttttattctgtgatcctaactagttccttttaataggctaaaatatttatcaatactgatcagactttaaagaaattactttgtaaacctgctgactacctgtatgtattgtatatatattatatattaaatatataatatattgagattataaaagatgaaaatattgaatccttataatattttaagttgcagaatgtatgttaaaaagtgacttgaatgagatgtatttgtatctagaaattttatttctttttggaatgagattaaaatacattttgaaagttcagcagagtaagcaatttatttgt

SEQ ID NO: 116403 - DNA, 1025 bp, Homo sapiens
aaaattatagttttacctctgctctcttttattcttctttaatttgaattcgtggttaagttattagaggcagtttttaatttttgttaaaaatctaaaatgcatgtgatagattgtgaaaaaatggctgcccatcaaagagggtaggatgaaggaaaaataaagtgacaggttcttcttctgtcacagacaaattggtttgtggaaaggtctttgtaatcagaagcaaaaatatggtataatgtagtttcaacccagaaatgtgtttgagtccatcatgtgttctgataaagcattgaaaaaaataaaatatggtaaacagagtccatgtgtgctcataatctcctaagaagaacacagcatatacaggaaagctcagaatggcatcaggaatttaaggtggtttcttctgcctgttctttccctatatactttaagctcctcctcatgctccttcttgagatactctatcagatcaacttcttcagatatttatgatggtatggaataatctaattagaaagtactatttaatgactattatcctaaatcctcaactcataaactgaacaaataattttctagttcactaccttattctgttcctttcattcacgttacctgttatcctcaaaggctgtgaaatagctgtcttcaggctgctcccagttagttgtccttgttgcacaactggagggagcacagtattgtttataggtccccaggaaagggtcaaggctgtgggtaggcttgtgtcttacgtactgttactctcacatgatggctcctaaatctcattgttcattgtagtggaaacatgttgataaaatgttatgcctttatctttcttagccaacattgcttttccattgaaattttatgtccatgtcccctcatgacttaataaaaagaaatgagagagtatatatagtaaagcctttgtcccatccccatttcttacctccatttcataaacagttcgagcaaaattttacacttcaaattttcctatattgtagttttag

SEQ ID NO: 116404 - DNA, 1114 bp, Homo sapiens
ggtgtttgtgtgtattttgaaccctccagtttagctcttaagtgtggttgataatgaaagcagtttatggtaataaaatgggtgaagaatttgcgttttttctaaaataagaaaaatttttatcagccatctatctctgtaggatacaaacttggacaattaacaatgaagttatagcgcagacctgaaacctttgctgtattaggtatattgccttgtcaggagtaatgcaaattatatatatatatatatatatatatatatatatatatatatatatatatatatatatatatatatgatagggaaattatttcaagtgtgttcatactcattcaaaaagaaattaaaatgtggaatcacttaacgattgttaacaatggaagttaaaaattataaatgatcattacacgttaaaaggttcctcagttgcgggttgttgcagtaggttccgtctgccatatgccttctagtaatatggacctggctaatcactatcatttacttgtagataatgaggagacactttgtttcagttgccctagaaagtatcagacgactcttctgtactgaaaatccattagattcgttgactatataaagttagaatcattaaatacctgcttattaaatcaggaataaagtatgagattattaaagaatactagaatagaagtgaacaaatctgaattttagtcctatatttacattaacttattgccaagagcaagtcatttaacttttctgtatctaaatgttctcatttgaaaaattaagataatgatataatttctcacaggctcaaatcagtgttaaatcataatgataaatataaaatgatggtgacagtagtatcgtaagtagtagaatactgcaaataagctcctacctccattttagtaagaccccagcttctgtagtttattagcacgtgctgtttctgaatttttatatttatttcttacgtactttcagaactttacttcatatcaacttcttggcacctttatttatggttctgctctgggtaaaaccaatcaccaaagactacattatgaacccaccactgggcaaagaaagtatccctttgtaagtatgggcatttgagggctga

SEQ ID NO: 116405 - DNA, 1637 bp, Homo sapiens
ttcgccgtgttggccaggctggtctcatactcctgacttcaggtgatccgccggcttagacctcccaaagtgctgggattacagacgtgagccactgcgcccggcccacagttgttttttgtttgtttgtttgtttgtttaagttttttaaaatgtctgtaaagtagcaataataatgtggttagtgtgagaattaaaagttaattggtaatgcccggcatatggcaagtactaagtgatagctgttaattttccatgcttgacataaactttacgtaaaggttacttttctaggtttgtttgccaagcaccttagtttgttttgcgatttcaaggagaacaatttggtgtataatggaaatctgagttctatctttgggccatgcactgatttaaccttgattaaatcaatttgtgtgtgttggggtggttcagataagataatctcttcagcctattttaataggtgaacatgttgaaacttttgctgtttttgaatactcagttggaacttgttttctctaaagattttttcttattactaatgtgaagtggtgaccccagacacttagttttcataccacagatcaacaatagctactagtaaaattctcaaattttaacttgttgaattattacggaggattcctgtgttatgtgtttaattataaatgtaaactggtttaacagacatgcctaataaagacagttctctagaataacctctaccctggcttttcatgtcactgagaacatactgcataaaaatcttgaaataaccttctagtaaaatttgagtgagataaactagaaatacattccctagctacaacttagtatatgggtgctcttttccttaatttaaaagtgttttaaactccacttggaaataaatgttgtagtcaaattttattgcaatcaagtcctataaagatcattgtgtatagctcctataaatttattgtggtttttcctgaacttttccttctgcagcaaagttctattttcattaactacacactattttaaagtagaagatggtggtgaaagatctgtttgtgtcacctttggattttttttctttgtcaaagcaatggcagtgttgattgtaacagaaaattatctggaatttggacttgaaacaggtaatagtttcatacaactttaaaaatcaattttgctttatctagtgttaatatttttgacttcagtatttaagttttatgtctgataaatatctaaaattaaatttaaagtgtatactctgtaatgttcaaaataattaacctttattattaagatcttcattttttgcttttgttttagctaagtttttaattaatgtttttttccaaaaatactgtctcgtttttttccttacagttaaataagtttctgtaatgctaaagtttactcttatagttgaagaattaatgcaaattttatgcacactcatggaatgtacaaatatcaaagggacgttttcaaagactgttcctgctaataaccaaattttattgcattatggcatactaattaacacatgaaagagctaagctagtcacttcaaaatttaagatgctctgttttctaacattttatttccatggaaagattctgtatttcacatttgtgat

SEQ ID NO: 116406 - DNA, 3294 bp, Homo sapiens
ttctgtctcggcttcccaaaacactaggattacaggcatgagtctttgtgccctgccagtattgcttattattgaatattcttttcctcactttcttcatggtttacacatatgtgggaatacatatacttgatatgcagttttattttaatgtgattgagcccttgatacatatgtaccagagaaattagaaaaatatactttttaatagctattcatattgtttatgtgagtaaattttatctttcattttactctataatgcctaataatgtgggagcaaaggtcccacacagcctttagcactgaactgactttgcttcgttttaagtaatccattcctgaaaggcatcaaacagtaacatctctgcaggaatcctgtagctcgctggctgtctccctatcccagagaggacagaaagttctgaagagcttacaggccaagctactttctgccagctttgattctccaaaaagagggtggggaagaaggcagtaaaattgtgtgtatgcttgagtatgtgattttttttttgttcaaacctgtagcatgtgataaagttacctaccacctttaaaggcatataggagaccagaattaaattccagatatccagtttaacaccagagagaaataagtttacatcctatcttttatctttagttataacataacctgtttttcctttcataccctatgattggaatatagcagaagtaacccctgtctggcttctctttgttttcttattgtatgtgcctacttagtagtcaaacacgtgtctgcattgattacacaggacaatagctttgcttgattccatagtcatacatacctcagttaattcagaaattctctgcagttgttactgatgaaatgttccttgttaaaatggtccccaaattagacacataaaactttaaaaatcagttcacttaaaaggaagcaaagtatttaacttccatggtcattttgttgtctttcccccctcactgatatgtgacatacataagacagcaaattatgctttctacagaatcttaaaagttctaaaagcacaggaatgactttttaaaatttgtgacactaaaaccttgaaccctgaaacctagaactgagtcttctcttgtcatcagctctgctttctgcttcacctgagttgttcatgcatctcagccatcacagctgctttcaatctcactcctaaacccaaactaattctcagctctactcttctttctttctcatttgtaattctaaccatcttctctgaccaagtctgtgtgttccacttccatttatgccaagttacatgttatggggaaggagaaaggtaaagaaacccttgcaatgaggatggagtatttctagtaaatgtctttcctgtatgatggcccatgaagtcttagagttgctgtaggcgtgtgtactggttttatggatatgaagtgtatcatttttgcttatgaaaaaatgaaaagtaaaaaggtaaaaatgttgcttgcaaagccagaggtcctttggtggaagtaaaactttaaaaaatgaaaatattttacaatgtatagtttttttttttcccaagaatctttcttagaaataagctgtagcacagagagtaatactgagtcaattatgtgaatttgagtgagaagaaagctattctacaaagagtgataaagcttctcagtagtcctattatatttggttaaaggcctggatcattagtcacatttccacagtgcttgtattttacaatgtggaggtttaaggtacaaaaccctattatgtatgttttcatggctgtgttaaaattttaattttctttcgttgccaggcatacaaattttatacaaagctaaaagctgtgactagtttaagttaaaataaattttaaggttttctggtttaataatcagttctatatgtagatttgtttattaaaagtctacaaatgttgtttttatttgctgtgggaaataaacaactacaacaaactagtacaacttagtcaccatttctaaattccttcaaaggctttaactatattcttttatttacaaaaatgttctgctttagattaataaggaaaagcaaaacattataccctgaagtaaactgcataagatttcagttctagtgagaaaaggaatgaaactcagagttattgaatctgagccaaggtacttgttttatcttgaaaagttgtatatgtcatgttatgtcaacgcttgtttgttgtatgaacatggagatttttttgtgacattaatgctgtcatattactcagatttcaagacaaaaatctagagttaaatagagatttggggtaataggacattatttctgtttattaatttataattgagtctgactttgctcttttagctgcaaagtgataattttttttctgaaactgaaattttgttctgaaaataaaaatttttctgaaaataaaagatagttttcttttgtattttaaataaaggttgtatattatgctttcagaaatttttggctattctcttcacagtctggttaggttgaggctggctgaaagctttttttgtggaatggcgttttaaacaggcacgatagttttttgcttatatctaagggaattttaggttctttttctctgtaattaaagtaatggaaactgcatatctaagaaagtatgaaaaatattttagtttaaaattatttttgttaaaaaattttttttaacattggaagataggatcagattatttttaagacttttacttaataggtcattaggattaatgtacttatttttagttttcagtgtatatctgtaataagttcttggtacagtttctaggtttctttgcaatgtagaatgtgaagtataatatattttgagtattttagttgccttttcttatggaaaaacagaggtggaagatttaattatttgaatagaaaaacattagggattttatttagtagcagtgatcagaaaaacaatagaatcttttttcacagaatagaaaaactcagtttatataaaaatcacttagttgagtggaaatgtgatctattttaaagagataatcataaatttgtgaaagttttttgagaaatctctatgtttattccttaggatactatttatcatacttgtgtattagcaacaaaatatttcttcttggaatatggtctatttcttctcaaaagagcattgagataatctcgctccatcgcccaggctggagtgaagtcatggtcttgactcgttgcagcctcagcctcctggattcaagtgattc

SEQ ID NO: 116407 - DNA, 1043 bp, Homo sapiens
caggaattttctctgagctttgaagtccagagtttttttgagtttcattatatagggacaattttaagtcattgatacgaaattgatttcaatgatccaacttaatttccaggcccctcccatcactggaggtcaagttcctgaaagtcctgaccctctaatcatgtgcttggtgtttctgataatcagctccatcctgcagctatctggggcccaccttgacctacctcattagcataacaaagatacttctacactcttgtttttataaggacttttaaaactctgtgccaagaactggggacaaagagcagatatattttttattataccacaagaagactgcttgtaaacaataggagataagagtttgccaagtaggggcataggtgttcacaaggagagaagaatatatgcaaaaagcaccaagggatgaaagaatttgtgaggaagaaaatgtcacttagtcaagccagaaagtgtcaccttcaaatgggaatggttgaaggtgaatctggagaagtaggcattggtcagatcatgaaaggctgtagaagcaagagataatgcatgacccccatacacatgtgggccttgaaatatgtgttttaatgggaattttcaagtatacaaggagtagatagaattatgaattcctgtgtactcatcacaattaatagctgatggccaaacttgtttcatctgtacttcccccagcgtacatttcagtatatatatcaaaaataatgagatttttaaaaattaccacaatctcattatcatacctaaaattttttaatgtaatcaaatattcagtgggtactcagattgccagttctacagttgttgcagtttttttgtttgtttgttttgttttgtttttgagatagggtcttactttgttgcccagagtggaatgcaggggcacaatgatggctcattacagccttgacttctcaggctcaagcagtcctcccacctcaccctctcccccgaccacaggtgcatgccaccagacctggctagttttttaattttttgta

SEQ ID NO: 116408 - DNA, 1061 bp, Homo sapiens
aattttgtagctcttgttaaataacacatattgctattagtattttttttagactgttcttttaaactttttttttaaaagaaactgtatagtagtctggtttaactctattaatattacccttataattgtttaaaattttatactgatacaattttttaaatgttttgtttcatttagatctgttcattgagctagggaggtgtggtgatatgttacaacttccaaaatctcagtgttataaaattaatggaagtttctcagtttcttcagacaggaagcagggtcaaaatggggaatcagaaagggattgggcagctctccaggtaggtccctcacaaaatgatgactcaagggctcagctatcctctgagctatccttcttcccttaggactcctctgttccccctgctaccttggagtcccctgctagattgctgtgccagttggtgagtgaagagagagtgagctgtggatctttcaggagattcttaagtgtcaaacttagaagtagatacatcatttttgcccacattacataggctggggccttgtgactagttctggccaaagtgcaggggaggctgggaaataatacttatggtataaaaaacaagattggtgagtacctagttactttctgccataggtgatattatctccatttttacaaatgacaaaacaagttttaaatgatttactcagtttcacacactgataaatgaaacagatccagacctcttatcctgaaagtctgattcacagtctagtatttatgtgatttatggctgctcatcagttccacatcttgtcctggaactgtcatacttgaatagagttttaaatttggttggggagacaaatacaacttttctacaatcactgtgacttttgttggcagtttacggagtaatttatttaaattattttccttttctattttgtttttcaagccatacttcgtcttttagaatatatcctataggttataagtagtatgcagttcacttgctatgttcttatggattctccatgacaacataatcagcttttattttaaa

SEQ ID NO: 116409 - DNA, 1429 bp, Homo sapiens
ttaagaagagggaaatggcatagtaaagagatagagtgaggttacatttttgtattgaacattattttagtcaaacattaacactgagaatgtactatgatgtttgcctttctttgggtcattctgtttaatttcttctttgcttttatgtttgatcagtctctgagttcttcaacaatgtctctaaaatgtatttctcttctgggtactgaagataccactgtaatttaaagtttcataatttcttgtctggattattacagaaagctagttggtatttcctaattctagtcaatccagctcactgatttttgcttgtttgtttttgccttaacataaatttacatctttaaaggtatatctgtcaacagtatctcatcatgtttggtgatttggaggaaggggagagttgggcaagatgccctcttccccagtttatatactgcctcatatgtatcttccaggtcagtctttctgaaataccatttaacagttataactagtagttgtgactgagacataatttttgctgttaaggagcagaaatcatatacttttaataaattattatatatgtttgtgagagattttactgaattatgaccttgaagattccgtgtaatgctgttagttctttcaaagctaggttgatgttgccattgtttacaaaacttcccatgactacaaaatgatctcttgcttttaagtctgtaatctcaggtagaccaaccttctggcatacttactaatgtatttcttggtcttgttctgcctgaaagagttctttgtaatggcattcattgaatggagattgtagaacttctatcagaaactcacagaaaataggatagtaaattcaaatgataggaaatgtgaaagaaaagggtaaaaaatgcaacctttgatgttaggtcagtagaaaaatgaactgaactttaacctagttgatagagtttaagacattaaaatatccacaaataaaaccatagttgagtcaggtttggtagacattttaaaaacagttgggtaacatgatacctctagttttgttctttttatcccgtttgcaaatgacatgattccatatctagaaaaccccacagtctgtgcccaaaagctccttaatctgacacacaacttgagcaaagtttcagaacaaaaaatcaatgtataaaaatcagtagcattcctatacatcaactccaagttgagagccaggtcacgaatgcaatctgactcacaatagccacaaaaagaataaaattcctaggattacagctaactaaggaggtgaaagacctgtataaccggaattacaaaatactgctcaaagaaatcagagataacataaacaaatggaaaagaattccatgctcttggataggaagaattaatattgtccaaatggccatactgcccaaagcaatgt

SEQ ID NO: 116410 - DNA, 1068 bp, Homo sapiens
atttacccaaaattatttggggtttgagagtattctaccctctagtgtggtattttgtatatttcatcagactttcatcactccttgaatgaaatatgctttaatgatatttgctgctttctgccctaaatcactactcaccaagcatcctgtttctaatttggcttccagtatatcattaagacagtaatcgaatggaacacttagtaaacctaaatatctgatccacttcatagtttgtttcactgtatgttaagtgacaaaactcttacaaacttattacaaccagtctccaatacataaagattgatcatcctttatgtattagcaaaagcctatttgccgtgtgttcggaaaagccgaggatgcacccaaggtgctttccttgggaggcctatctgaagcttgtcagccttcttcgtgagtttctttcagtctacaccttttcccgtcagtggttctagtattctaccaatcatccaaactaaaacatcttgaaataacctttgaaacattcctcagttttattctacagttgttatactttatgttcagtcacattcagagtttgattttcttctgaagtagatttttgttctttccttttgtttcaacgacatttatcttattcttagtttttatctttaattgattaatatatcgctatatctaattttcattatgtgttacttgaattatttcagctccctgcccctgcctgtttagaagtcctaggtgatctttctattaaacatttcagctaaataccttctcttggttttaaagactcaaggagctaaaattcagtcttcatcctattttccacagttcctttttatttagtaagtttgctttggttgaggtaggcgttttgctgttgcaaataccttctgtgttcacacttgtcatttagcctgaaattcccttctctttacttttctgtgattttagtttctgtctttaggtttcatctactctatgaaactttatccaatttaaaaaaattctacaacccatattcatagtaccgtgcaattttgtgctcaaatattattttaatatgtatat

SEQ ID NO: 116411 - DNA, 1319 bp, Homo sapiens
ttctgcccattgttagttatatggatttggaaaagtcactcaattttgataagagttccaaattcctcctgggtaagagaagtgggacttgatgggtattaaagcaccttcttaaatttatgattccatgactactcaacatttttgaggatagttacatgtttcagattaaataaaagttagtctgatttccactgttttgtttccatgccattttggcttaagtttgatttcttttatcattctctttttcatttttttcataagtcacatagatagtacttggaatctttgtatatttggccaagtctttcactactgtcttaaatactgctccagaatggaacacaactcttggaatgttttgatttaattcttgttttaatcaatgataaactaattctgtgctctcattctctcatacattatgtataccgatactcaatagatacctgtgcctataacaaggtttttgtattatgaatgaaggagaataggattatgatccagactgaaaatactgaactcacgcttaatttttatgctttcaagttgttgtgaagacaagtctataggaaatttactaatggaataaagccatttgctctattgcactttcctttttgaaaattacagaccaactttgatcaaatataaatctttctaccattcaagctaatttgtggaagataggtagattagagctagctcctggaattgcagatatcacggcttgcatctgtgtatcatcctgtagtaacttactgctgtaattgaacaatggtttgtgggcaggtgtgggagagtaggccatggggaggttataaacctttgccataatcaattggatttgatgaaaagttttctttttgaggggagtggaggggagtgttgggaagagtgtgtaaatgctataagagaaacacatataataggctcaaagagtacagtggaaagaaattatttctaactgagagcaggttgggtcatgtagtaggtcacaggttcccaacccctgggactgtggacttgtactggtccatggcctgttaggaactgggctgcacatcaggaggtgagtggtgggcaagtgagtattaatgcctgaggtccacctcctgtcagatcagtggtggcattatattctcataggagcgcaaaccctgttgtgaactgtgcatgtgagggacctgagttaggtgacccttaaatgacaatctaatgcctgatgatctgaggtggaacaatttcatcccgaaaccatccttcctccacactgcctccacaatgtgtgaaaaaatcgtcttccatgaaaccag

SEQ ID NO: 116412 - DNA, 1062 bp, Homo sapiens
agggtaacaagagggcgtcagttaagctgagacaaaatgacggccaaaggtggtctttactctctctaaatcacctgggtctggagtcgactcccatcgcgcaccctcactcccacccctggccccctcccgccccccacccgcccccctccctctcccctcccgctccccacaccaacgtgtgcctccgtcacctctcagacagtggatgcgttcctgttgaaaccacccaatctacctcagggtcctcgcaagcgcagccaccacgatccgcccgcccacgtacctgtgctgcgcctgcgcctcctccgctctctcaaggtcagcaccgcccccagcccacaacctggcacccacggaagttgctttagaggacgtcctgcgtatcttcacctctgcgtggcgtggggtcgacggcgctctggagaagggaggaacttcctgtcccgcgcgcgcacaacttccggcagagccggaagaccctctctttcgctgtttgagagtctctcggctcaaggaccgggaggtaagaggtttgggactgccccggcaactccagggtgtctggtccacgacctatcctaggcgccatggtgagttcttctgtgagggcaggagtgacaacggtggggcgaaaagggcggggaggtcagtactgtgaaaagagccatcaggtgctctgctcagaatggagttgagacgttgggatgagctgctgggtaggacccaccacctatctcagggtgtctgagcccctgaggaagcagcattacgcctacctgtctgggagactagcgggccggaggcaggggcgtatctgtcagggagtatggactgggtagcctgcctgttcatggcccatttactgtgtatggcctgtggcgccaggtgatcccagagttgaccttgccgggtcagtcacctcttctgcgcccccttctccatccgcggaacagtggccaagaacttcagatcttagaaatgcttttagcctctccaggtggacacaacgggtctccttgtataagatcaacacctgtcatttaaagaaacggtagtccc

SEQ ID NO: 116413 - DNA, 1046 bp, Homo sapiens
accatcccagtttaggggaaagaatcaaacttggaaaccctgctgccgatgtagcagcaccgacttttgtctcgcccactttgaagaggtcagttgaccctatacagcttctttgatatgtgacagaaaggaggtcatttgctgaaatgaaagacacattacaaaccagattttaagtgtgactctttccttcagctgggtcacagttcttactttgagccagagcaacacactttactggtcagataaaaatactctgccatattttagaataatgacctttcttatgctttggtgtctccaaatggttaaatggagaatatatccaattgacaggaggaattctgttcatcatttttactcttgtgtttatatcttctcataaaaaaaaaacatgtgaaaatggcatcatgtatctctattgtatttttcattcaaaaatctcaaacaggtgagtgtaatccagtctttaggttataggaccaaagactctcaaagactgttacaaacccccggacagtgtccctaagggctggactttgcatgtggattaccgagttaactgagagatgtgtaatatcatctgtagtcagaaaactccctactccctatatggagcaaccaaggacattcacatgtgttgcttactcttgaaagtatatgggataaatgggctcctgatatgctagtttcagaataactatggcaggaccttaaaatttcccactttccataagatcatagctcatattcaattactggcaggataaacatgtaagattattaactctgccttactagttcttttagaggagcatagccccttgatgaaggcattgttctaagccaaatctggacctatccaatctttattcatgcattttatccgctttcttagatcattctttcagaaatgaaatgagtgaggtacatgaaatatattttctgatgcactctttttaaaataaaatactttttatggttgtgcatttatttgtgaagtgaatgtttagaaaactttaaaaccaattctaccattctgtcct

SEQ ID NO: 116414 - DNA, 1033 bp, Homo sapiens
ggtgcaaattcattatctctggcaacgcagaacgtagtgtggggactgaaaaagaccgtggcaatggatgaacaatagggcttcagttcatcagtaacaaaagcagtggggaaattggttgagtttcagagcacgtcctcctcggcagagggggctggactagaccttggacagcccccccaaaaacttgccaagcctcgcacacaccacttcactctccactccgaggctcagggagcaagtgcctggcatggggggtaaaagttggctttttttttactccttggtcttttgcgcccttctccctctccccagaagggaagacccatttaaactattttagacgcaatcaaccaagaatcaccatgtggaattgagcggcagttttaaatgtgttgagcaggggagaggaatgatgagaaaaacatttttttttttttttttggagacgccgaaagaagcctgtttgtgtgctgcggccgtgctgtgactttggatcttgtctttcagccggcgcctcggttcctgcccagctggatttggggggcagcattgcctggcgcagggagatcaagtgagtatcgtggcggccctcaggctgcagctcgcccgcggcgcgaggccagcagtgcccgccgcggccccgcgcccgcactcctcacctcgcccgctagccggtgcccgcagagtcccgctgcgggccgctccgagggccagtccggggctttgcttcagctaattgattgtgtgcctcggatgttaaacctgttgatctcgtgagttttcttagccagtactgttaattatccagcggcttgacccccaatcgcagagagatgccaggaaatcttcgcgttggaaaagggaatttttgtatgtaattttgtggtggtggtggtggtggtgtgtttgggggggcttttcccttttaaacctagagcaaaatgcacttgtattttgcacttctgtattcgaattcgcattttgaagaattcgcctccctttaaccgccccaaagttgcaattacctggc

SEQ ID NO: 116415 - DNA, 1051 bp, Homo sapiens
acaacattatctgactatttggtaatgaaccctcagtacagggctttcttcagatttctgaatatttcaaaaggcagaatcttttgtttctctggaaatataccacacttgtaaagcaatttatatctctggaaaagattcctgcagggatgcaagcactcagcacccatgatttcaggtaagccaaaacaggtgtttagatcctgaaattttcccatagtgcctcaaagatccattaaagtgtagatctaatgctgtatttctaatttctggaacacaacctcgcttgtttctatattccaattatcagaagacatttgggtagtagttaattggtaaaaatctgtcagtgtggaaagtgaagcagtaaggagctcagttttcatcaattctgaatggtgcaatgtctcacacataatatttaagtcaaaagcttaacctcccttgtatatttaatgcaagataaattaccaacacagcattttcaagtatttaggtaactctatatttggactgaatttgactagcagcaacatatttcttctagcaacattaatttaaaaattagctttgtacatgaggctgtttctactcaagtcactaataataattaacacacagtatttcacagtatttgattttatattattagacagtttattataggaattgcatttatgagagattcaaaaattgtaaatgactcaactctaaaaaaatactcttctgtaacagataataaaatcactcttaagaaaagttaataacatctttcttattcataagactttggacgttttctttatcatcttggagaaaaacacaaagaaaagaaaaagcatagctttctggaaaaaaagtgatgcttccttggctctttaaacatagagctaagtacatgagttattgaggtgaaataagttgctttcaacagttgttaatatatcattaataatcatacatgcaataaataacaacatatgagttatttcctaagagatatatgactgcaaattgcagtaacacatcacagcatgtgtaaagaatgctc

SEQ ID NO: 116416 - DNA, 1179 bp, Homo sapiens
atattaaacaccatctttttcccaaaagcttcccataacgctctatgaatcatgagacttccattgaaggcctatagcatttagagaaacaaattgttttgatactttcatacacttaatatggaatcttttggctggaaactaagttttgttgagataaaaaccactttatttgtatgttaaactgctaaagattagaccttgctgtcttttttgtggactttagtgttcttctctctttgtgactttttcatgcttttcagtatctaagagcaatgaaattttaaaaatattgggtatatagaataataaacatggtgaatgtgaagttaaaggtaaataagatgtactacaagatagacataaagctgtggtaatgatacagaaagagtcacttccccctgccccctcaacagcatatataaaataaaacacagcacatcttttggaaaaaatgaaaggaacgttttgaaaagccagaatggataatcttttaaataatgatgatgttttttaacatttatttagcagctactatattggatattagcattaattatgtcacttaatttccataataacttgtaaagtagatatagtattatacctatacatgtgtataatagatgcatatatagagatgaggaagctaaagctttgagagattattaatctgcccaggttatcacaaagctaatactgtacatggtagagccagaactcaaaatcaaatctccaaaatggcaaagaatgtgcttttaaacgtaatattgtattgcctttcgggctatgaagtaaaatattaactagacttctatgtttatggagttttaaaaattacatgctattataggaagcagtgtattagcaacatactcagttggaacttccaattctaagatttgcttttccccttcaaagccagatggtctctaaggtacttaatctacttagttctgtaaaattcttattgttagcaacttgtaataagatttgctctatgaaatggttgatgtatgaaaaattttgttaaagaaggcagtataaaaggaaacaaagtgtcatattttcttgattcaataaatgttttaccaaagcttattttaagctaggcattgtggtagatttattagatataggaacttgatataagatattgttaatagagaaggttataaa

SEQ ID NO: 116417 - DNA, 1578 bp, Homo sapiens
ctatttactactttgtaaattttggaaaaccaagaggttcttctaatcacaaaggtattagtggaattttcaaatgctgtctgagattgtgcctgtgtctgcgatggcagtactttttgtctcttgcagtttttcttgttttgaagttggattaaatttgaggaagaatcagtgttagtatgacgtttagtcagcaagcagcttttatttagttagctccaattattttgttggtatgtctctccacaggtagatgacacactccttgtgtgcttgatgtcagtggagcctagtacaattcttgataatagtagatcttaaataaatatggtataaatgtagtcctttttattttgcctctgtgtgatatagttttgcttacttttataataagacaagttgctcatgataaaaaaggttaacatttaaaatatggatttgatttttctaatttcaggtttatctcggggtttggggatctcatttgacattttattgtcagactaaaagttgacagtcacagctttaattctcatctaatatttagttgatttcacaaatgaatgcctttgtgattatgcaggtttattaaaatatatatgtttttaaactgtagtgacagactggatattggaaagagatccccatgaagaaatactcaaggcatttaaactatttgatgatgatgattcaggtaaaataagcttgaggaatttgcgacgtgttgctagagaattgggtgaaaacatgagtgatgaagaacttcgagctatgatagaagaatttgacaaagatggtgatggagaaagtaagttttaagtgaaacgtattttccaggttttcctgatgctacacatgtaatacatttttctaaaaccaaatgacttgcaagacttttttgtaaacttaactgcttcttgtaatggaccttctgtctaaataattcacatattcaatttagaatgaagcagatctctaaaaccaattatacttcaagaaggtccttcacttttctctgaaggtgaaaccaccaaaatttcagcctttcaatataatttcagtctttaatggcttctccctcaacctacatgctaagttctaagttctattgattttccccttcaaatgttttgaatctgtttttatctttgtccattgtggctgtcctagttcaggccctaatttctagttaggaatgttataatggcctcatttattcttgccttggctgcctactgggtgcagtgtcctgcgtgttgactggtgctacacaatgaaaaaggcagatgtggttcttgctttcactttgcagtctcttgtagtgtcctaattgccctttcggcatataaaagtctctaatctcttcttcagtctcttggtatcattcttttcctaaaatatacatttgataatgccatttctgtgtttagacacttgaaacgattcttcagtgcctacagagtaaagttcaaagccttctatgatctatcccaccttgagtaactgattttactttccagtgtattctttcacttttcttctttaaccctcacctcctgtatgtacacattttgtcaa

SEQ ID NO: 116418 - DNA, 1698 bp, Homo sapiens
acaataaataaattagaaaaaaaacagtattctcagtactataggacctgattaagtttgtgggactgaaaatgatttatgcttttcaaatatggaatctagctgtaaatgttgctgttatcttttggttggggtaggggaggcagctgcagttactatggtggtagtggaatgagtttggagtccaacatgtctaactggtatgtttggatagaaatttccgaaagacattgagaaatacagttaaagctgtatttctagcattacctataataatttttaatttacttttgatgtgatgtttttggatttgccgtattcttaagtgatttttacacattaaaggtctaagaaagtattttgatgaagtacatttctgatagtatgtgtaattaaatcatttgaaaatacagttgcatggacagaaatttggagttttgtgaaataaatgaaacccaccttaactgcctctatatcagtttactaatattttcattgaaaataaatatattccttataattaaattctactttgtggaacaagaatagaacctgaaggcatggaggagagtcattataaagttatatattaggtaatgtttttgctgtccaaaatgatgagcatttataattcccaagaaaagctgcattttaaggaagaatattgataaaagaatatatagacacatagctctgaaataactaacacaattaaagtaccagtgggataagaatttatacatcttggagccccatctgttccccaatcaccctgttgcttctttaagtacattaatactttcagcaagctgcttttttggttcacctgtcatgtaaattatttaattggtgaagaaaatttcttaacactttttttccttgtcctgcttttttgttgggactaaattcaaaataagttgagtatgtgccatagagttaagtgtggtattttattttggtgttatggctgtagatatgccagcttctttttgactgaatatttatgagctttgatgatttgcatacttacagtaatatacttcaattagttacttggaagcctttttggataaaattaatggataaaaggaaactattgaaaatatgtgtagatgatataatagtcatttgaataggtgattattgaaccaaatacgggtgaaacagcagcaaaacaacagcttgttggagacttcgattgtatttttttcattctgggttccttaaacattccagtattttccatctataagcagttgcttttttttttttttttaatgattctgtaaccttcaacaggaccgagttatttttaatagcatagtaaaggccataaataccttttcttgtagtggcagatagtgtatataattacttcagagatacttatttagatactgttagaattttatttagtaacttaccaatttttatgccatagatttttattttaatttttattgtggctattgattaaagactggtaaaattgaaaatacttaagcttattactatgttattacatgtgattatatttagtgtattaaaatacacaattaccattgaggtttgaaactacatttatttttagttagttgtctgagagtgatttatccaaacaaaatgggtaagctttaaggagaccttctttgcagaggttttttttgggtgggctttcctgctatagtcagatttgat

SEQ ID NO: 116419 - DNA, 1052 bp, Homo sapiens
ctattatagactcttcctagtactggaaaaaagctttaaaatatatttaatttaagtttagagtcaagacagcctgaggctagtgagtaacatagatattttaggaattagtgtctttaagactaacataagtcaaacgtttgtacactatttttgacatgtactacttattattgctgattgagattgtaatactgtattattgtcttcattttgcttatttaacactgaattttttggtattaggtactgtactggggttgggaagaagacttaattaaaagttactaaaaggttcttctttcagggagtttacaatgtaaatataggtgacaacaggctatagtactatgtggtaaattgtaattttgtctaggacagaagtcagcaactatagcctttggaccaaattcagctgctgcttgtacaccaccacaccccttcttttatgcagcttttgtgctactatggcagagtgagtagttagagactttatggccctctacaaagcctaaaatatttactattggccttttacaggaaagatttgttaatccctgatctagaggaattgaagtctttgcagaggagattttaaatttaggcctttggaaatgtgagtaagatttcattccaagattgccaggaagagtagagaaaaagcattctaggcttagaaagcagcaacaacaaagaatggtactagacggatagcatgtttgggaaactaggtagtgttctgggctagacatagggaaatgactggaaacataggattgggccagattggtaaagtcttgcaaaacatgaagattttgaattctagtcagcagagatcattcacaatttttaagggaaggggatatgatatgtttgagaaagaaaactgatgagagtattattgatgatgagttggaaggaagagagactgcagacagaaaatactatttttttcgctgaggatggcgagggtgaaaagaaaatacatttaagaataaaaaagaggctgggcttggtggctcatgcctgtaatcccagcactttgggaggtc

SEQ ID NO: 116420 - DNA, 1708 bp, Homo sapiens
gtttcaaaactcgttattccagtgttgcggctccatttgaaaatttggagcacatttagatgggcagctcttaaggaaaacatttctggctttaaaataatttttgctttttttctttaagcgtttccagagtttatgagaagttaacctccggtttacatgttaaatgagacaagactcatcacatttttatatagaatgaagcacaaacattgtatattggcatctaatatttgtcatatgtttagactcattaatattttcgatggtttgttaatatcaatggaggaaatgacacataaattgccaaactgttaaaaacgtgtaatctaaaaacattttgaaccaacagtgctaaaatactgtataagttaattcactttttttttgtaattttatgaacataattatcagaactatcaacagtaaaccgatatatagtgattgtcagttatgaattttggtttcatttggagattttttttaaattctttaacattcttgtaggataacgtgtttttgtttttttggttggagttggttggagtttcagacataaaagtagtgttgcttattcacagttcttgtttcttccacagtaacattagtgggaataaataaaaagctgggaaaaagaaaagtttggtcctcatttcttttaataatctgtaacactctttagttttgcgaagttcagatttatagcaatttagactatggaataaacaggtcattgactcataaagggaaagtttccctatctttctccaaagtactttcttttttgaaatttagaaggtaattattggctaatttctgttagtaaagagaattaaagtggactaagggctttttctttccatttcatagaagtgagcttgtagtggacaaaacaaagaggaaaaaaagaagagaactgtctgaggaacagaaacaagaaattaaagatgcttttgaactatttgatacagacaaagatgaagcaatagattatcatgaattaaaggtaatggtatactttaaaatatttgtttctgtgttaaaatgatttgcatttttacagttgctttacattacatttctaaataattattttaactaaattggttttggaactatgaaggcattttaagcattcatagttagatgctgtaataaaactgaagagaactcctaacatagtttttagaaaatctttttcacatgagaaaacgaatagtattttaaatgtaaaaatacattcccagggaaggtgcttatttttcactgtcataattaaaggatttcaaactggaatttattcttaccatcttcttttcactgttttttgtttttgtttttgtttcttggtgactcatactgttttcagactgtgggagtgttgtcttttaatcttataatttggatttgttagtaacatagtctcaatccactttctctggtgcaaacaactttagtgctgtttgatgttgacacatgctaataggtaaaaatgtcagctttaagacctagaatgtcaaagtgtagggagagatttgtaaattattatttgtcagggtataaggagagatttgggtttagggtagaatgggacttactttcagcacagtgggaaagatagtattttgagatttttaatggccttaatggataggtgaatgtaagtgtttatttggtagttttaatttttgtaatttcgtaagggatt

SEQ ID NO: 116421 - DNA, 1070 bp, Homo sapiens
aaatcatcattaagaaatacagtatttatgaaataaagtgtcatccttcccaatttctttggaagcatataatgctctagtatgctttacatgctaagtcaagtatacaacatgtttatctgtaaactctgtttccatttgtaggggatgtgatcaaccttggtgacagacagctcactgttatgcacatgccaggtcactccaggggcagtatttgcttacatgacaaagaccgaaagattctcttcagtggagacgtcgtgtatgatggatcactgattgactggctcccatacagcaggataagtgactatgttggaacttgtgaacgtctaatagaattagtggacagaggtctggtagagaaggtgcttcctgggcacttcaatacctttggtgctgaaaggctttttcgattggcttctaactatatttcaaaagctgggatatgtcacaaagtttctacttttgccatgcgatctcttgcaagtttagctctacgtgtaacaaattctaggacctcgccctagtatctatactgataatatattttgattaattatatacattaattcattctgtgctatttaactgattaatagtgagcatttcatgaagtgcttttataccactattatatatcagagaaagattgagaatgaataagccaaaaagaaaattgttagtttaaattgttttctttcttccaagaaagaagccacttaaataagcttatactttgccaaagctgtcatcttgtaatatatgctctagaaatgacataaaggtttatggggaagcaaagagagattttgtggcaagagaactgcccttgcctctgtttttcttgttttattcccttgatgacctagggaaaaaaaggcatgtagagtattatgtttatactttaaacttgatatttttagtgtattatttaaagataaaggttcttgggtttaaaatacattagaacttaatgcagacatataaagtaacattgagaatgacaactaaaacattccattgttatggtcctgaattttttatgcttcatttcatgtatttattct

SEQ ID NO: 116422 - DNA, 1049 bp, Homo sapiens
gaaagaacccatgcagggctgagtatcatgtgtgaggtcacataccccatctcggaaagagctgggactagaacccaggtttccagttgatggtagaatcccaacatttttggagctgaaaggggcctgcaaactacttgtgtggtgctttaagcctttaaaagggtgaaaagaaagcttaatgtttaccaaacactttgaaggtgatagtactgtgttatccgtgttatcaaaagttgtttttcattaggagctggatgccccaccctctcaggtagtgtctaatttcctctcttctcaagaatattaatttcccgtatcttctgaatgatgtggcctgctaacttgctgttaacataatccaggtgcctgggaggatacataaaatatttgtattaaaaatttgtatacagttacacacatgaacagcataaagtcttcattgctttggtagaatgcaaggagctgaaatcatttattacatttcctttaatgaattgatgatcacttgtcatggagaagcataaatctgtgcactgtatctctaacccaaaagccgacttgtaaatgagggacaaggagagaatagccatatcttccagtgcattattctggataaaaaagcaactcgccctactaatagtgaaatggttatcttcctctaagatagcagcagaccttaaattgacatagtacatacctctcgagtgggcatacatcattttgcccatttttcactatagtcaagtgatacaaagttctggcattgtgatccctattacatacatgtttaaaccatatgcccagtgtcaccaagatattatctcagaggagtggtttcaggtggacttaagtcatttgcagaggctaaaacaggttgtaggaaggtggtggattgaacagacacatctaatttggctctcttccgaagcactgttgaactgtgaaaaaatcgtgatttcaatttaaatccccattggcggggggaactgttttggatgctagaaagtagatgtggtgactaagttaacagttttatactatgccag

SEQ ID NO: 116423 - DNA, 1054 bp, Homo sapiens
ggaggcgtagagcgaggcgggggcgtgggatgcgggggtcggaataggaggaggaaggacgcagaccgacgctgcccgtagcgtgcgctcccgcacccttccgccaggtcggcagcaagcagaggctgcgccaccagcacgggggcgcaggagctaccgcagcctcggcagccgcaccacgagagagctttaacgcaggggccactgcagcagaatggagactcaggtggcgaccgtttcgccaccccgggcgtgtgacagcagaggcccgcagtgagggtgggaagagctagaaccgcccacccactggctctgcagggcgcgcactcccagctggcgcagaaagtgtggggcctcgcgggttgtacggcgactacggcgcctgccaagggcaaaaaaacctctttgccgagggggtggggccttcctagggagtgggcggggctagttggtagggctcactccgcggtcctggtgccgcgtgcaggtcggtgcgcgcttctcccgaggtggaacgggcggcagtcaagcgccggcgttctctgccgtcaccctttccttgccggccggcacttcggctgcagagttttgcccacgcttcgagacttagggagcaggtaaccgaggaagcaatcgaagacttgggaggggtggtgagggtagaggggaattaaaggggcacgtggaaaaggtgaggggaagtcaggggtagagattcattaaagcgcctctggtttgaggggcgtttggagatagcttggtacctcccctccttgtcctgctcccttcagaattttttaagtccaatttccagatcttacctagtctctactcctaggactgtttgcagtgagttagaagggtatttatgctcttactgatagtaggttattttcaaaatccatggctttatgattttttaggcactagtcattgccgcagattgcagctgaggaccgactattcagtatctgttttcgtaactgttggcactttatatcgtagggaagggagttgttaatatggtttgtcttttcttataaaaaataaaatt

SEQ ID NO: 116424 - DNA, 1130 bp, Homo sapiens
taataccgtgacttgactttcactgcctcctctagcttctatgtctgcttctatctgtttgtgcatttattcatggagctgacgttgttactggtggagggtgtccaggttcttggcgtcttgaacaaagaattggacgaaacgcgcaaagcaaagaaagaatgaagcaacaaaagcagatacttactgaaaatgaaagtacactccagtgaggcagtgggtggagcatatgggctcaagggtccccttacagaatttgtgggggtttaaataccctctaggggtttccatttagttacttggtgtacaccctatgtaaatgaagaggatgaagtaaagttacaaagtcatttacttggcatatgccctatggagaggatatttcctgtcatagccgtaatgtgaattggccttttgttccctgcctccagaccctattttcctgcctcagtgtggacaaggaactgtgtaagacgtggaggacaagacatttcagttacctcataactcataaaatgttagaactaggaggaatttcagagattagctcagcatctgctaggacgttgttttggtagttgattaaaattgacttttttatttcagctcttggatgcttaaactacacccattttcaaacctctcagaacaattctgaatagaaattttcaggagacatcctgaaatggaaggggcaatgctactgattttacatttttaattgagtctgttttgcagttattaattcacttcattgaataaagacctccctgggattaaaaaagtcttctaaccagcctagacctatgcttcctgaagtgtaatgcaaatggaagaacagtggaaaggtaaagcagtcctgcttttgttaggaattagctttgcgtctttaggtaatcaagtaaccgcttagggtgttgctttcctcttctgtaaaatgggaggtttaatctgcgtggttctttttttttttttttttgagagggagcctcactctgtcgcctaggctggagtgcagcggcgcaagcaacctccacctcccgggttcaagtgattctcctgcctcagcctcccgagtagctgggactacaggcgcgtgccaccatgtccagctaagcctgtagtcccag

SEQ ID NO: 116425 - DNA, 1013 bp, Homo sapiens
tattttacacacctgctaagattcctctggttaaaatgaagtacacttaccagtgaaggagaagccagtgcaggtggatttgtgggagcctttcactatactcttggtacttctctatctgaggcaacattttagcagttttggccctaatgatattaattgccagtaccaatgttcagaactagtaaaaaatatagttaacttcagtcttaaaaaaaaaaatcctactacgtgattatcatttattcatcatcattggaaaattggtgaggtatgatttgtttattctttgagaaaattaatttactctgaaaactatgtgactgcctaggatgcagtagcacgatgctggacagcatacgcaaagacaaggaaatataatacagagttgcagttgcagaaaaatgtgttaactggtagttttacttcagcaggcccaaaacccaaaaaggcaaaagacgcaggcaaaggcacaccactcactaatactgaagatgtgttgaaaaaaatggaggtaaggttttcttcttactatacaagtgaactgaaaaaatgtaaaagatcctacctcgttttgctctgtttcaacctttcagcattctcttactttttaataatgtaaatttggcagaagcgagcccaacatataaggtaactgggaaggtttgaactttgcaggctgggagatatggagggtctgtcctgtccttcgttaccactcacctggccacttacctcaccttctgtcacctctttctttttcactgtatccccctttccgcttatatttgaatcatgcaggcagagagaaacatgaacaagttttaaaaagagttacatatgtaactcttttaaaaacctctcatttttcctcctgttggttaatatgtacagttttaatgctttttttttggtcttaagtattgaagactcttgagggaaaaatgtattttatagaacttatttttatagctttctttatctaaatatttcaaaaataaaaaaatgtagat

SEQ ID NO: 116426 - DNA, 1053 bp, Homo sapiens
cccagatgactttcttattgctgattttttcagcaaaagcagttccaagttttttttataatagagcattcgtggatggagagggagtgacatacattcaaatctcatgattaatgtgtgagtaattagtggtaaactaatatctgaggtttcttatttctgcataacaggaggctctgtatggtggctgtaaggctgtataatatttaaaccagaagaactgctctctgtccataattgaacactgttttcagtatctttatattattcattttattcttaaatctgtaaagtagtaaagttagatggttaaatctcaacaggagagaaaatggagactagtaagtagaagagctgaaactagtagcttaatgcaaaaggaatgaagcaatgagacaatatatgtggctttgagatcaatttttattaaaaagttgcataaatctacttttaacctattttatgagtctgatttagatctgtgtggtggaaataaagatgaggatttttttttttaaaggtatttgaggtagcaataatagaaatagagacttcctggttcctatgtggcactgaatgaatactgtatttaaaaagtacttttggccaggcgccgtggctcacgcctgtaatctcagcactttgggaggccgaggcgggtggatcatgaggtcaggagatcgagaccatcctggctaacacagtgaaaccccatctctactaaaaattcaaaaaaaattagctgggcgtggtagcaggcgcctgtagtcccagttactcgggaggctgaggcaggagaatgatgtgaacctgggaggtggagcttgcagtgagccgagatcgtaccactgccctccagcctgggtgacagagcaagactcccatctcaaaaaaaaaaaaagtacttttacataactggtttaaataactgtgttcttaattataaaaataaaataatagcatgttttttagatatagtgtgtaccctgcacagagctaaataaatatggcactacaatttcctattaactatacaacttattggttgcaggt

SEQ ID NO: 116427 - DNA, 1116 bp, Homo sapiens
agtttgagaccagcatagccaacatggagaaaccctgtctctactaaaaaaattagccaggcttggtggtatgcacctgtagtcccagctacgcaggaagctcaagcaggagaatcacttgaacccaggagaaggaggttgctgtgagccgagatcgtggcactgcactccagcctgggtgacagagcgagactttctctcaaaaaagaaggtaggagataaattataaaaaataaagcattgtgcattagagctgataagcccaatattaatctgaaacccaattattaagtaacaaaatcaaagaaaatgctggtttagtggtgagacagtaaattccttctttcttgagttgactcatagtttcctaggtggtagccaggaggtggtggtaagatgggagtagaataaggtgatagataactgttcccttaaggctaagcagggaagtcagcagtctagtggtttccatacaaattaatgaaactcacttataccaggaattggaaaaaagaggtgatggtgaaaaatcagatgaggaaaatgaagagaaagaaggaagcaaagagaaaagtaaagaaggtgatgatgacgatgacgatgatgccgcagaacaggaggaatatgatgaagaagagcaagaagaggtaatggttcatttggggatggtagcaaaattaataaggtttatctaataaggaatcagatatagagtatgtattgaaatcaataaacagaaaccaagatgatgggaaccagaagtatattattatcaatggcatcgattccttgctatcaagagaacttccttgctatcgagagaactattatagcattgaaattataatgatgtcaaattgaatataggaaataaaaatgattggcaactttgtaagtataaatctgcaagttaaggagattgatcagattagtgcagttaagatttaacaacataaaaatttaagtcagcaattcaggtaacggagggcttaaccacctaggtctagaggagaatccctgcagtgtgtttcaaattccaaagtgcatgtggatactatcagagaagattgataatttaacctcaggtatctggctgagtcaggactctgtgttttc

SEQ ID NO: 116428 - DNA, 3086 bp, Homo sapiens
tagatagaatataatataggcatcttttggatttggtttggtatcatgcctttttttttttttttaataggaagtaaaagtctttctggcttatgcttagttatgttttatgactaaaaatctcagtactggtgtagtctaatggatgttaatgtaaactggctttttttcttgtctgtgcattttttgggtaagtgtttagtggtttagctaactaaactatgtatcatcccagtaagctgtaatgtgttagtagctatattatcctattgagatggtatgggcaacccttcatgttctcttagctagttagtgcctgacaagagtggaaggtggtggtcttaaggaagaaagcggcacaggtaaacacaagtgaaaactgttgtgtttttgaagcagataaaaagcagagacttttaggcctggaatattttcttactactcattcattttaacgtttacaaaggaatatatcatttcacttaggaaaatgactacattaattcatactttgaagatggagatgattttggcgcagacagtgatgacaacatggatgaggcaacctattaggcatgaaatttttcaaaaaatatttttatgatgcagcttctgaacatttggacagacttgatttgtattttatttctgataaggaataagtacttgtttctgttgttttggacaaatagttgttaccaaaatattcaaaaccactttgagtttacatactagttaccttaaaaattattccctgacactctgacattccttctaaacacctctgccatctctcttatgtactctcatgggtttttttgtatgatttgaatatgaatgtgcctaaagaatttttgctctcttaatctatgtatacatacttgaacaaatcattcttgcttaactgctgatcttttgtaaaactattgctagtcataatggatttctataacctgaaagttgatataatacagcacgtggagcactttaaaaacaaagaaacttgaaaataattttattttttacctttacatggtgtgttctagactactgcattatgactacataaacctacctgagctcttacaagtacagaattgtgagacagaggttttgtgatggaaaacatacacatagggaaaaataccaaactgagcaatataaatttcacagctcacatcttagccagtacaaagaaactttcacatggggtgaatattataatacttgaatttgagacttaatactgtatatgaattaatcatcccactgtaataactgacatcttcaaatagttgggcttatgaaaaatttgactaagacattttattttatactttatgtaaatgtgaaataagttctggtcatataaatatgtagaatgcatgtgtgtgaactctatgaagtgaagtgtggtggccttttatgtttcagagtactcaagtgtacaattgatttatataaaaatgcaaaatgaactcaggtcattttgaaattaatattaatatttttgttgtttaactttaaagctagctcccctaactttatatattttttgggaaaaaatacctaaaaacctcagcctacaaagactctcagaaatgccaaagattttcaaggaaattcatattatatatttcaaaaatgatttatcaatgttatctaccaaaagaaataattttatttttcccctttggggagatattatcctctaatatgagaatcagatccctagattctatttctacctatactattaaactcaaccttgaacctgagcttggttgtttctgtgccttagtttctccactcgtaaacaatttcctataaaaattgtttaaacaccaaccaaaatttaccatatgtattcattctcttgccttaaagatcacttcttaacttacatttggctctcaccctctaaaaatttgtagtttggagagtaactgaaagcacaattttaagaaacatgttttcctcacaaaatatattgtaatctgattttcctatcttgtattcatgcagaaaattggagaaaatgtgtattgtcttgtgccattctgcaatatgaatttctcaggaaaaagatgtttcaatggcaatactttcttaaataattcaagatgggtgtgaggacctatcttattagtttagtgctgtgttaaccatttgtgaattacttcttgtttaaaggaagttgtcaaaaaattttaagattctaaatggaatacacgaataaagtaagccttagaatagaaacctcacaaaaagttgtcatttgcggttgataattaacataggtgttttattctctcaactccttagtaccagagccaaatacaatttagttttcagaaatcttatcaatattgttctatttacctacttataaatctgcagataaccacttgaaccaggcaaatacactgaagataaaggttatttctttttttagctttgaatttgtcatgaccattttagtcttgcagatagcagggcagccccttggggcaaggatttactctgggaggtaccgttaagagccttctttccccctttgaaagatccttttacaatgttaaagtatactagttgcaagaacaagcaggatttgcaggttgctttaccagcatgagtctcatttttctggcttaaaatctgggactgtgaaattattccataggaaagtgaatgttattttgcagaattagcctcttacataaaagtatttgttgaagtgtctttaaaattgctatcatgagcaaaactggttgctgtaatgcttgtttttctgtatttatttacacattaaattcttacaaaacaaaatgtgttcgtttgttttatagtaagatgttttattttgaacttatttaaatgtttatttgttagagaaaactaatttgttaatatagatcttaactagtaactattaagcagggatgtttgttccaaatattcttgaataaacaatcaccacaaacaacaaaactctggttaatgattattcaaaaaagttgttgtgagatgggcatgctggtctgtgcctatagtcccagctactcgggaggctgaggttggagaat

SEQ ID NO: 116429 - DNA, 1048 bp, Homo sapiens
ttgatgttgagagcagttgatccataaatctggtgtgtgaatgtttcaagcagaaattaatttaaatgtgtgtttaggaagtacttaacttggaagatgtatcatttttcttaaaatgcatgtttaaattttatttttttaagtaatttttaaaaagtttattaatgttaaatttatgatgcagaatgatagcatcagatgtctgcagctgaaaaaaatttactactatgaacccccaaaatattcagttgcaagaaaatttgattctaaaattattcatggtaggatacgtaacacaccccttcaaaacttttaaaaaatacatttagcacatgtgctatgaaagcatacgtacaaagagaaaggggaaagtgatttataattcctacaacagaggccaagaaatagattaaaatattttcaagaccccaaaataatgtattatggttgggaagtcagtagaacactggaataggtgaagacctgacagtaatttttgtcttaagaatgctttctttaggacagaccctttaacctcacctctgtgcatctgtttttaaaatgattatatttgcctctgatatttgaaagcacttttgtagttttgatgatgaaaaatatattaaacgtgcatattaccattatttaggaaataattccttatatactgtgataaatcattgctgttacatacagtaacatgccttaattacatttaatgccttactgctttatgtaagtaaatccaagtttcagaattaaaaataagcattatttcatatggtccaatcagattcgttacataggctatataaatttgtctccattttcaccatcaagcacaaataattgggtcaaaactgcctttgaggtctgttgaagaaaatggttcattaagcaaaaaagagtagaggtattttatattagcagtaacagacaaattatttagtaatcccttaacctctgtttttcaaagagaaaatatccaatttagacttttttcctgatctctatatatagcatcaaattgggaaacaaaggccaaagg

SEQ ID NO: 116430 - DNA, 2071 bp, Homo sapiens
atggagtctcgctctgttgcccaggctggagtgcagtggcacaatctctgctcactgtaaccaccacctcccggcttccagtaattctcctgcctcagcctccggagtagctgggactacaggcatgcaccaccatgcctggctaatttttgtatttttagtagagatggggtttcacctgttggccacactggtcttgaactcctgacctcaggtgatctacctgcctcggcctcccaaagtgctgggattacaggcatgagccaccacgtctggctgacttcaattacatttttgctgatagtccataaatctgtgtctctagccgagatcgttcttgagtttcagacatatatctacaactctgtcctgaacatcttccacttctgtatctcaagcagctccaagtcagcatatctaaaatctgcatttagcctctttttaccctccacagtgttccatttctcaatgaatgccatcgtccatcaagttgaccaaaccagaaatctaagcttcatactagacccactttatctctctgacatgaatcaggtgatacatgattaggttttaaagtattgatggaaatgaatgggactaatagatggtgggagagcctggcataccaattggtaatctgccagacactcccctcttcccccaacacagtggaataggatatacagacaggttatctcacagtggatgggataatacaaacaggttgaggaatgtataatatatagagaaaaagcttataaaagtgattaatcttgaaagtagttgaataatgcatttacactgagaagtttgggagggaaatggcttcagaaataagggggataaattaccaattttttaaattctaaggtatatatgcttttccacacattttagcatctttttttggaatggtggcatcttcaatttttggtgaagttttttttttccctagatatacataaaataatactgcatcttagagttatggcatcttagttttgataaaatatggtagttttagttgggtagcatttgtctatattccagtttccaaactggaataaagaacataactacccataatccttccttcacaaattgtttacaagcagaaggactgtggtatttatgcatgatgcacaaagggaagcagcaaaggattctagaatctacttaaatagcattaattagtgttactaacatatatgggtgatagtaaaaagtagttggtgatttcctaagattggtacatctaaagtggtgtagaattctcatctacaaataaaattaaaatttctctgggtgcaacttaatactactaataattcaactttttttttcctccaaaagtaactagaatgaatgactattgctgcctttattttgattggaattcagttgtatgttgcttttttttcccccccacaggtagcagatatcaagagagttaacaatctcatcagtgatcaagacttttttgcccttaggtctatcaaaattccagtaaaaaagttcagttccttgaccgaaacactttgtcctccaaaaggaagacagacttcacgtcattcatctgttcaatactcttccgaacaacaggaaattttgccagctaatgattctcttgcttacagtgactcagctggtagctttttaaaagaagtagaccgagacatagaacaaatagtaaagtgtacagacaataagagagagaacctcaatgaggtagtatcggccttaacagcacaacaaatgcgttttgaacctgataacaaaaacactcaacgtaaagacccctattatggagcagactggggaatagggtggtggacagctgtagtgataatgttgatagtaggtataataacaccagtgttttatttgttgtattatgaaattttagctaaggtggatgttagtcatcattcaacagtggactcttcacatttacattcaaaaatcacacccccatcacagcagagagaaatggaaaatggaattgtgccaactaaaggaatacatttcagccaacaagatgatcataaactgtatagtcaagattctcagt

SEQ ID NO: 116431 - DNA, 1074 bp, Homo sapiens
ctgccaaatacgtttgttctactttaacagttgtaaaacctgaacctaggccaggcgcagtggctcacacctgtaatcgtagcactttgggaggctgaagtgggcagatcacctgaggtcaagagttcgagaccagcctggccaacatggtgaaaccctgtctctactaaaaatacaaaaattagctgggcgtagtggtgggcgcctgtaatcccagctactcgggagactgaaacaggagaatcacttaaacctgggaggcaaaggttgcagtgagctgagatcgcactactgcactccagcctgggtgacagagtgagactccatctcaaaacaaaacaaaacaaaacaaaaaaacgaacttaaacctaaatgtttaaataactaaaaccattaaaacaaaaacaaaagattgtgtcctgaatgtacgatgcatgcaaatcagtcagttggatcagctacattccaaaattttctctgctttttttttcctccagattttaacattatggcagggaggcatcagaatcgtagttttcctcttccaggagttcagtcaagtggtcaagtacatgcatttggaaattgttcagacagtgatattttggaggaggatgctgaagtgtatgaacttcgatccagaggaaaagagaaagtccgaagaagtacatcaagagatagacttgacgacattatagtattaacaaaagatatacaagaaggagatacattaaatgcaatagcccttcagtactgttgtacggtaagttttaatattacataatgcaattcagaagaaattatttgtttacgcacactgaaataaattctgtgtccttttttaccttgtttattcctttctccattttttgctcttattttttgcatagaaatctgtgtcacatgggctgggcgcggtggctcacgcctgtaatcccagcactttgggaggccgaggcgggtggatcacgaggtcaggagcttgagaccatcctagctaacacagtgaaaccccgtctctactaaaaatacaaaaaaattagccgggcgtgttggcaggcgcctgtagtccca

SEQ ID NO: 116432 - DNA, 1057 bp, Homo sapiens
caattgaggaaactcaaggccatgtgaagggaagtgacttgtctaaacttctacagctgggaagatggcagagactagattggagcccaaagctgagtggaatcaatgcttgcctcctgctttggaggtgacttggggcccaacaccccaggaggcacttgcagtgtccagctaaaggtttcatggcatctgtgttaggatgcccatggaggtactgccaggaattcttcccattgtcctatgaaatcaaagtcctgggacactgcatggaggcattccacaaggtggtgagcgtgcatgtgtgtgtacgtgcctgcacacacgtgtgtgcaggcacgtacacacacatgcacgctcaccaccttgtgaactggttttccgcctctgaatgacatggagataagaaatttcttactttcctctttgaccctagtctgaggagacattaggagggtataggagagcaaattctctgtctaactggcagctactgcttagctccaggcaagggatgccatggagaaatgtggacccagatttgccaattctggtaatttttcaaaataatctagacatccatttttttaaaatgtgaaatctacaaattttaaatcttggcaaaaatgatcttttagtattgttttgtaatcacagtttggactaaaaaacacatatctctaggcatctgggtttgtaacattaaattccctcttttgctttctttcttactggcagtgagtgcaaataattcatttagaaagcataagcacctagattcttcaataaaaacagactgtcttcaatgaagagaaagaaactcacagaaagtatccaaagaaacaatttttaaaaattagataatactactgaatttcaggagaaaaaaaaaattttgtttgactagagctaattaaagttgttttcagtgagatcttaatttcaagaaaactgcttttcatgactttttaagatctatgtaggattacaaaattacgtttgtttgagaagagttacaggggtcaaaaatctatccttagatccttaagaccgcttcata

SEQ ID NO: 116433 - DNA, 1048 bp, Homo sapiens
cgtgtttaactcctgaattaacaaccatttggagaaaagcaagaataattcacaaggaaaactaacaatttttatgtaatgtttaacgtactttccagattcttaggtattattagactttcagtactacttctaagcatatcaaactgataaaactgatagaaatgtatgacagttttttactgtttaatctttggagttatctaaggaccagttaaggctgaaagacattatacctggacttcattacttgtactattgcttccttacgttttcttttcctgtgtaaaatacattatttacctgtggaaaatattttattaattggagactaaacaagcctttctatttgctccctcagttaaagaatttttatttctatgtaattgtattgaaacataatgacttgttacactttagtttatttgcaggtgttttggctgttgatgttttgcctctgtttatattcctttaacaggtaccagaaaatgatgaaatatttttaattcaactgaaaagtgtagaaggaggagctgagattaacacctctaggaattccattgagatcatcattaagaaaaatgatagtcccgtgagattccttcagagtatttatttggttcctgaggaagaccacatactcataattccagtagttcgtggaaaggacaacaatggaaatctgattggatctgatgaatatgaggtttcaatcagttatgctgtcacaactgggaattccacagcacatgcccagcaaaatctggacttcattgatcttcagccaaacacaactgttgtttttccaccttttattcatgaatctcacttgaaatttcaaatagttgatgacaccataccggagattgctgaatcgtttcacattatgttactaaaagataccttacagggagatgctgtgctaataagcccttctgttgtacaagtcaccattaagccaaatgataaaccttatggagtcctttcattcaacagtgttttgtttgaaaggacagttataattgatgaagatagaatatcaaggtat

SEQ ID NO: 116434 - DNA, 1035 bp, Homo sapiens
tatctggaagagttgtaaatattgccttaaaagcctgcaaaattcagaagtaaaactggaagtagcgggtgccatttgtctctctgacttctctagggttaacgtggaaaaccaagtgctgaaatctggatatactagccgtgacctaattattttggaaaatgatgaccctgggggagtttttgaattttctcctgcttccagaggaccctatgttataaaagtaagtacgaaaaaaacttccatttattctgtgctcacaactttagaagaatgatctcaaagggtttcaacttttgtggatttgtttttaaaggaaggagaatctgtagagctccacatcatccgatcaagggggtcccttgttaagcagtttctacactaccgagtagagccaagagatagcaatgaattctatggaaacacgggagtactagaatttaaacctggagaaagggagatagtgatcaccttgctagcaagattggatgggataccagaggtatgggattttatattttctttgtgtttctctgtaagattgatagtatttggtatattatgaatataaatattttgaatattggcaaagagacaggaaagaggtgggcaagaaaagactgagaagtacatagatttggaaaatttttaacaaaaggtttaaaaatgaagactcattcatattagaatggtgtatttttgctccacatgaagaaataacaaacaatcttagactttcagtgtgtgatcagttttcatctccttttagctttattcatgttaaggcttcctttaggtaatatgtattgactgaacttttaatgatgtggttttaaactgaagaaattttgctatagaattactttgttcaaaaaaagaaatttgagttttatattaatggaaccaggtatagttctattatgcttactcaccaatacatatgtaactctaattttattttattcacttttgtaagtttaagtgactagatcatcagagataacatccacttttcttaccattttagagtagtat

SEQ ID NO: 116435 - DNA, 1100 bp, Homo sapiens
tagtaagcagaaattattctccccacccccctcgttcaaacttcaatcctttgtgagactgagaaacttgaattattcaagatcttcaggaactcttctctcagatgatatgtgactacccccaccctgtactttgcttttggaaaactttttccaactgtcatttagtattttttgatggagcttagaatttatctttcagtttggattttgaagacaagacttttatgactgtttctcttttattaaagttctaccttattcttctcttcccatgaaattcttcatagtttgcctcgtagaaccagctggtttgtttcttttaagacaatagatagtaaaaatatgtttccttaataacacaggaagctctcattagagtaagattcactacttataaattttctttaatttattttgtaggattttgaggcaccgaggatactttggtagtgtttctgtatcttggcagctctttcagaatgattctgctttgcagcctgggcaggagttctatgaaacttcaggaactgttaacttcatggatggagaagaagcaaaaccaatcattctccatgcttttccagataaaattcctgaattcaatgaattttatttcctaaaacttgtaaacatttcaggtactgtgtttttccatgtcttattttatttccatgtcttatttatactaaattttacattttatacttagataattagagccatatacaaaatgcaattggtgaagtatttgtgtcatgactatctgattttaaatgttaaaatacccttcttgtttcaagtgttattcttaacattcacttttttgatatcttagtttggttcagttttagggatggaggcctacatccatcctcaaacatgcaaatagactttctccacaccaactatagtgtctccaacaagacgttagtggaaggtaggaggtaaggattcatggtagcttaaagcttgatctttgtgtcataatttaagcaatcaattttcgcatcacttttggttttaaaaagcacagaattaaacctttctaattcatatactcttttcaggcttgactgattatcaataaaattatgctg

SEQ ID NO: 116436 - DNA, 1035 bp, Homo sapiens
ataccttaacttcagttctgctattcagaaagctctgattatcaagggttattggagtcaaacttatttcatgacagaactcatctgcgctaagtgaggctattgataatatgtatcccaattagatggaatactttgcaaaagtgttaatgtgtttatcaggtgctactgggagtgttatggaatacatacgatatgcattgttaattacctttataagtttgagaaattgagagatgatatggtgtttatcaggacagtccctttcattacaaaacccggtatcattacctcattattattatttattattttgatgaagaaagccatagtacataagccatccaaaggaaaaattggtaggactgagatacgaaaattgtctttatgtataaaatagataatttgggtaaatatgcaaaaatttttctttcctgtgttcccaaatctcaggtaagagcaaggagaccaagccagtgtttgggagcagggaagtggttaaacagtgctgagcttggttgaatgcataaaacagtagaaatgtgctgtctagtaggtggcatataaaaataccagcttttcttgtcttccagagacaagtccttgtatctccaaatcactatttgcattactaaaaaggttactataaaatatttgaaaagttgccctttgtgtcacttaaagctaaaaatccttatgtaatagaaagagaaaatgttagtgaccatgagctaatactgattaataattgtacatgaaatgttattgagatgataataatacttgtgatcatatgaccacttatagtgacacttgttatattattgagaaacttctccccatatctctagaatatgcattgttatatattaattggacttgaatactcactagaaaaccaaccttgcagttgcgtaggaagcaatagtggccgagaatctgatttatccctccgtgagttgggattggaggaaaaggaatttatacaatgacctctactcctggactcatatgtagggactgtctaacatgtca

SEQ ID NO: 116437 - DNA, 1005 bp, Homo sapiens
gcagattgcctgagctcaggagttcaagaccagcctgggcaacatggtgaaaccccatctctactaaaatataaaagaaattagccgggcatggcagcacgtgcctgtagtcccagctactctggaggctgaggcaggagaattgcttgaactcaggaagcggaggttgtggtgagccaagatggcgccactacactccaacactccagcactccagcctgcgtggtagagagtccatctctataaataaataaataaataaataaataaataaataaataaataaaataaatagtagagggaaaaccccaaatgagaatcctatttggctgatggaatcttgctgaggtttcttgatgacttttggccagttcttagaattttgatagctttctgtgttctgtgtggatcttctgtctttcagttccaaattctccacgtcttgggcctaaggtagaaactattgcgcaactaattatcattgccaatgatgatgcatttggaactcttcagctctcagcaccaattgtccgagtggcagaaaatcatgttggacccattatcaatgtgactagaacaggaggagcatttgcagatgtctctgtgaagtttaaagctgtgccaataactgcaatagctggtaagaaaagacatctaaaaagcagtacatacagagggatgtaagcacagagggacatgtatccttgattaacacagcctctcaaagttgcaattaggataatcaactagaaaactagaaatactcttgtatctttttcaagggacaaatctagagtctttttttttggggggggggatggagtctcgcttgattttacaatttttttatttttatttttattttattattattatactttaagttttagggtacatgtgcacaacgtgcaggttagttacatatgtatacatgtgccatgctggtgtgctgcacccattaactcatcatttggcattaggtatatctcctaaagctatccctcc

SEQ ID NO: 116438 - DNA, 1041 bp, Homo sapiens
ttgtcaaataattttatttaagataatgtgggaaataaagcatagtatattaacgctccattaaaatgtatatttcagattttttttaaaaaagttataggacgtaaaagtactattattgaaatggtaaacataaacagggatattaaaattgagtcacatgattatataacaatattaaggagtttaaacagcctgtatgtcttatatataactaggttctgttattaaatgttgatgatgggttattctgttacatgctgggtttgtaagtgtaattggggagttcttttagtccatttatatttcattccattttgttcttgtacttgtatgtatatgtttgatttttttcccttgaatcatttttattctaatttcagaactgtgatgctgttaaggaagttttcactgtatttttaggttatccaagtgcaactaactgatgcctctggtggaggtactattgggttagatcgaattgcaaatattattattcctgccaatgatgatccttatggtacagtagcctttgctcagatggtttatcgtgttcaagagcctctggaaagaagttcctgtgctaatataactgtcaggcgaaggtatatgagatagctacttgcctctgtgggagtgatgagaattgtggggtggtggggaaggatcccttgcacagttaaatcatttaggttttgtggttttttctatgccataaattattttataggttattttaatgtgttaactgaattatgcttattagtataaagggcctttcatttatcatacctattgttagtgaaatgggtaataaattttacatcactgagctctctaaccccagaaatgcattgctctaatctgtaatttgttacaattagtacttaaatataactggcttttaaattaaagagcatttgtatgatgtatgaaggagctgatttccaggtctgttttttttttctttttttgtgaggcagcattgggctcactgagctccttcagaaatagaaaacaggatcttgggaacttgtgaca

SEQ ID NO: 116439 - DNA, 1604 bp, Homo sapiens
ctatataaatagttgctatactggactggtttttaaagtttgtattttttaaatttttttttttctgaatatttttgatctgcggtcttgaatccacagatgtagaacctgtggatagggagggctgactgttactacatttcctcaaaatgtagtcatgtttgttatcattgttactttgtttcagttaagtaaagcaataaaaattaactttgtaattttgttttgaaaccctgaatttgcataccttggaaaatattttcatagcttggttaaaaataagtgttgtttgattgaaaattagcaaggtttcctcacaggagaaaacaaaatgttgggagacaagtgtaattaagaaacaggattgtgtttgtactatgactttaaacatttttttaaaaaactaaagaccacagtcagcattcctcttctctatttgtaattactttgagtgcttaacctgtcttttaattgtcactccacattttagcggagggcactttggtcggctgttgttgttctacagtacttccgacattgatgtagtggctctggcaatggaggaaggtcaagatttactgtcctactatgaatctccaattcaaggggtgcctgacccactttggagaacttggatgaatgtctctgccgtgggggagcccctgtatacctgtgccactttgtgccttaaggaacaagcttgctcagcgttttcatttttcagtgcttctgagggtccccagtgtttctggatgacatcatggatcagcccagctgtcaacaattcagacttctggacctacaggaaaaacatgaccagggtagcatctctttttagtggtcaggctgtggctgggagtgactatgagcctgtgacaaggcaatgggccataatgcaggaaggtgatgaattcgcaaatctcacagtgtctattcttcctgatgatttcccagagatggatgagagttttctaatttctctccttgaagttcacctcatgaacatttcagccagtttgaaaaatcagccaaccataggacagccaaatatttctacagttgtcatagcactaaatggtgatgcctttggagtgtttgtgatctacaatattagtcccaatacttccgaagatggcttatttgttgaagttcaggagcagccccaaaccttggtggagctgatgatacacaggacagggggcagcttaggtcaagtggcagtcgaatggcgtgttgttggtggaacagctactgaaggtttagattttataggtgctggagagattctgacctttgctgaaggtgagcaatggttctaaatgaatttccgttgccccagtaaagtcatcatagtccatttttatgataaaatttataagaattcttactgtgtacattcttgttaatatacagaaatgtagtttggctttagaaaaaaatagaagttaattggcttgttaatggttgacatgacatacatagactgacatgactgtacatatatatctttttagtttaaaaaatagattttccgggaatatgtgaattttatccctttatgtttgatagtagtgtctttgacaaagcacagaggaaactataag

SEQ ID NO: 116440 - DNA, 1031 bp, Homo sapiens
ttattctttacattcacaactatattgtatttctttccaaacattctatagaaactcacagtgtatataaatataatacattctgcttttacctttttgaccagattcttcattttgctgatggagaaaggtataaaaatgtcaatatcatgattcttgatgatgacattccagaaggagatgaaaaatttcagctgattttaacaaatccttctcctggactagagctagggaaaaatacaataggtaattaataatttcttataaacagcttcctctccttcatgctgggttccttaatatgggggaagatgtaaaggaatgagaaagtcttggtggttttctgtgcttaaaatgagaatgattttaagttagagcatttcagaattcctgtgtctgtgtaacagtgcctctcacgtgtgtatgttggtgtatatatgcatgtatgtaaaagacaaagtaggttgatactacagataatattatttcctcagttattgtaggattatttaatttgtagatgtctttcctttggaatttgaattttgttctggtttcctacttagcaatagaaggaattacaaaggtagtaattctacctttgtagaattactttgtacctttgtacaaaggagtaaaggaactcctttagtgtcatctactctgtagtatttccgcatagtgttgaggtatactgatacttcagacagattatgggagacgtaattcttggttggaacagtttgatattgttgctaagagtcatcctactccattgcttgataggtattgtgctgactgtttagagaaggtaagaaagagacaaaggagaaaactcgggaacatacagaacttgagggttggaagggctcttaaaaagtcacttccgttcattctgatgatagacaagccaaatgaatttcaaggattgaatgctgactgacccttcaaactcctgttttagtcagtggctgagctggttttttttaaaaaaaattttagtttgatgaatatttgcattcctgaattat

SEQ ID NO: 116441 - DNA, 1004 bp, Homo sapiens
taaagacaggctcccactatgttgccgggtctcgaacccctgggctcaagcaatcttcctgctttggcctcccaaagtgctaggattacagatgtgagccactgcacccagccttgctttgaactatcaaaagtatggtttcctgataacatttcaaaaacattggaagaatatactttaggagtcataaatttgttcatatcctttggcctaattaattaacttgaagaatttatcaagtgaagataattaacatgaataattctgtctctacttaatatttaataattaaatatacaataacaaatatcaaatgtagggaaattattaaatatattttgatcaaccatatatattatctatgcactgaaatcatagacttgaaaactgtgtagaaacagaaaactgtaatagtatggacatggtgtaatattgttaattaagagttttttgtatttatactgtttataactgtgtcaattatgaattcatatgaatgataactagaaaggaaaatgaagcatttcatgatgggattatgagtatgtttcactttttaaaatatcctaatatgctatctaataaatattaagatgaatataaaagagtttaaaattagtttcggttttagcagccagtaatttcttttttattaaatgggtatggaaacctcatcaagctggcttgatcattctaaagcacttaaaaaattattatttacgtccagttatttcagaaattgaagtatatttagttacctcagaaatcacaatggaactttgagattttggaagattttgctttggaaccgatgcagggagtgtgggaggtgacagtttatatctcactcaagttgttttttctttccttcctgcagcccacatacttcttattggccaagatatgtctgctctttactgctggaattcggagcgtaatcaattctcttttgttctggaagtaccttctgcttatgatgtggcttctgttacagtaaagtccct

SEQ ID NO: 116442 - DNA, 1008 bp, Homo sapiens
aagtaagtttactaccactttccaaattacattagtttgaatttccgtgtgtaaattgttttagtttggtgtgggtgtgtgtgtttgtgtttacacatatacacttttatatttatttacttatttgaaatacattttcagttatctttgggtagtcttgaaccttactgtgaatggcaatgttaggaacaagcctgtctagaaaaactatgtttaacattaggattattaaaatgtttctgtttcaaacattttaatgaaagcctttgtaatttgtgcatatttaatttcctatgtgactagaaatcagtgaatattcacttcctaatgaataatcatctttgaaatgaatattttactggcctagagatgcaggtagtatctggatccttgatcttgctttctcgaaacagtccccagtagcagcttgcctaatattgccaattctttcctcttgtagaagcagaatacagaatatatggttatattccttcccaggtaggaagagatggctgcctttctaggaaatgattttattcaaaggcagaatatgaatatgactttaaaaataaatatcttactgctgcatttaacctgattggcttcattgcctctatcaaaattctttggttatctagccatttttaaagttcataaaaaattgctttaggagttggtttataatgagtttatgggtaagttgtggaatacatcactattttgtgaacttcaatctgtacctggaaaaaatcatattacatttttgcattaagaaataaatgagacttggaattttttcagttcattgttttctgttagattcattatctttgggaattttggtcagtgtatatttatatttataatatacattgagtattatttagccatagctaatgtgagccctattaaattatattttaatatgcagaatttagcatagcttaagaaatatatttttgaaaataatgtttaagttgaaatcaaacattgaagacacattttcag

SEQ ID NO: 116443 - DNA, 1047 bp, Homo sapiens
ggattaggaaaatgtggcacatatacaccatggaatactatgcagccataaaaaggatgagttcatgtcctttgcagggacatggatgaagctggaaaccatcattctcagcaaactaacacaaggatggaaaaccaagcactgcattttctcacttataggtgggaattgaacaatgaaaacacttggacacagggcagggaacatcatacactggggcctattggggggtggggggctaggggagagataacattaggagaaatacctaatgtaaatgacgagttgatgggtgcagcaaaccaacatagtacatgtatacctatgtgtcaaacctgcacgttgtgcacatgtacccttgaacttaaagtataataataaataaaagatttcattctaagtgcaaataggatgccattagaaaatcgtaagccagagaacaatgtcaccagattgtcttttaaagcagctcatttaagtctagtgcaaggaaaatggattcaagaagctggtggggcagcataggagcaggaaggatggctaggaggctgtttatttccctctactctccatgtcaaagctgatggtggctcagacaaggtggtggaaataaagatggcgagaagtgggtatacattgatatttggaagaaaaattcattgggctagaagtagaggctgagggaaagacaggaatcaaggataactccttgaatttaagtttgagcagctggataatttgtagggttgtttactaagatgcagaagctcaaggagaaattaagagttctgttttgggcgtgttcttctgagatactactgacatcccaggggagggtggtcacataggcagggcagcatgcgactgtgtgttgtggggtggtcagggctgcagatgcaggtctggaagatgttgacacatggggaggtgtttgaacacgtggggcctaaggggcatatctggaaacaggaaggatatggtgctgagtcctgagcttccaccatttagagatcagaggaaggagaaccagcagagaagcttgagaag

SEQ ID NO: 116444 - DNA, 1057 bp, Homo sapiens
tccagagaggctactggatgtccaggatgcagaaataatggctgggaaaagtacatgtaaattagtccagtttacagagtatagcagccaacagtggtttataagtggaaacaatcttcctaccctaaaaaataaggtaatctttcattcaaaacacttatgtggttggaatctgatttatttctttagcaggcacacttggaatgcatttgtttgatcacagttttggtaagtgctacacatggtgaactactatgaaatgtgttccatctttatgaactatttgtagaaagtttagtttctaaatgagttggaaatatatccttcatgttttgagtaaaatacatattatatatgtggggaaagtaaaaaatatatagctttaactaatatactattacgtacttaacttttaatgaagtcatccagttagagtcaaagtgagtgttgtcagctgaagactgctgaatggctaaggcggggtagaaagggcacaatggaaaaccaatcagatgtcctgcatgcataagtgagctaaatactaacagtgaaagaaaacaaatgactgtagctactagaaaaatgaagtcaagttcagggtaagagactcagtcattacaccaattgtaaaacatcattatatgttctgtttttaacattctaggtattatctttgagtgtgaaaggtcagagttcacaactcctgactaatgacaatgaggttctctacaggatttatgctgctgagcctagaattattcctcagacatctctgtgtctcctttggaatcaggctgctgcaaggtacttattaataaaataaaaaaatcagaatttggtccttccccatttcggtaccactgagcctaatgttttgtactgagcatagatggtggccccagatgacattagactggaaaataacctccacaataaataagaggaagcagcataggaaatggtctagtattgttctgatggcaaatgcagcccagcatttcaatatgtgtgtaacacattatttacttcttcatttttactactttcacgggatgtg

SEQ ID NO: 116445 - DNA, 1044 bp, Homo sapiens
gaagtttaagttaaaagtcattgtggagaaaatagcacactttcttcctggtttgggcatccagtattgcaaagttgcctttaaaattcataactaacactattgtaattacagaactatttctagtagataaaaaaggggtaattaccaaacctgagttttggtaggaccagtcaaaattttatgactgaaaaatcctattcacatgcctgaatattgggcttaactggtaagtgtaaagatcttacttgtcatggaaaatggagtagattacaattgccatgtcatcttttccagaggtactgggcagaggcaggtggcagacctgacatgcctagctgcccccaaagattcttgctatgatgctgttagaatcttcatggattattaaaccatatgtggacttttttgttcctacaggtctttgcttggctgttctttcccatatcttctgtgccaggtactccatgtttgcagctaaacttctgactcacatgatggcagccagcttaggtacacaggtaggagagcgctggcatttttgatttatcgtgagatgtttgtgtttcttcttctttggttcttgaactgagtgtaaaagtaaagtttaatctcaacttagttgaaataaacttgtttagttttgcagtggaagagaatggggacaggagagtcatataaggagaatcaggcctaaaatgcttctttctacagagaagcaccttaatatcatcgcttacaaaaaaaaaaacttcttatcacaaagcatcttattgtcagctaatatatgctgaatgtatttgtaatttatatatacattaaaattaacattttattaatctgtttgaaatatgctgtgttataaattctttatgtttagggcattaagatgatataaacttttaaagcatctggacactatgtattgtttcttataatagtttgatagaacattttcttttgaaaaatcagttttctatggtagaagaaactgtgtgaaaaacaatgacttattagcacacaatttaaagtatctagtttaaa

SEQ ID NO: 116446 - DNA, 1009 bp, Homo sapiens
attactttttctcagcgaatttcatgttggatatacaaactaacaaagcagaacatacttatttcatttacaattttggtaaagttttattatgacacctcattttaggtgtcactcccattatcttgtttaatctgttaacatgcaataaagacaataataaatagaagggaataaattttatgagcagaaagtagtatttgagaattttctgtccatccatttagatagagatttaatagttctcttaaaggcattatttgtatgcccaaacttctgcttatagaccattgccattctttttttttttttttttaaatctagatctgtgcttctggtgtgtaaccatgaatataggtttgtatatcaaaacaaataaatatctacttgtacttgtatgagcaaaatcacccttgaaaatcctttacactttgcttgatacctcagagtttgttttgttttgctttttcatttgcttaggtttttaaaatttaaataaattgccacaatttaaaaatcagaaagtttcaacaaaaacagatttcaagtgcaaaaaaaaatttcgagatctctcaacaatgctacctgcatttctttgccgcaactatatgcttgtgctaaggagcatctgcctcttgacatgggaatgtgcttgctgctttgacacaattcatcactcacctacattacttgcctgggctttatagacatatgagtttgtgcttcttgtcttaaaggagaagcatagttggaatcaaagaggtaaaggcatagacttccacccagcaatgcttttcttttaaaagaaaataaaatatgtcccctaccccaaaatacaaagaataaaataacagtctttcatagtaccactacctagaataaatcattattaatattttggcatatttgttttcagattttttcccctgactaatcccatttttgtcctgtagaattttatttctatatgcaggggtgaatttcttctcaagaagtctccctcattctt

SEQ ID NO: 116447 - DNA, 1054 bp, Homo sapiens
ataaagacacagctctaaattctttagtaggttagtttgtaagtgttcataaatgtggagcatttcaagccagattcatcttagtcctgaccttacttggttagagagttgtcaggccaacttcaagccaatggaagtgagatatgagtataatcaagtaagcatccagaccaaagttgagaaattcagctgcccttcatgtgtggtatcatatccacagtcccaagtcacctctattgcccctaaacctttgtacccaagagctctcccattaagaatgaatgtgaatccatttgacttttgctccagctacttacataatgatcaacctctgatttgtaattcctgtgcatgttagcaattctatctcaggtgtttaggatgcaaataattttttaaaaattagtacttggcctcctttgcttgctcccaaaggagaatttaatacatagtatgactgtgacatatgtatttattaaagtataaaatattttttcagttaggtgaaatatagaactcaacagtttggtatatagttggtgttcaactgacgtcaacttcttcctttttaaaaatatgtactattctagcaatatcatggattaaatgggattctgatagcttcagtttgtgttttattctaagtgttctaagtgtgataggtcattgtaaagttttggttcctgggtagagggtagactgtagtgtgaatagtggcctcttgggatagtggaagcagagaggacagtttagaggcctttgcagaagtccaggtgaaagatggtgctgattttaactaggagattagtagtggggagacgaggtttcaaggttgccctgtattttgaaggtaaagctaacaggacttactgctagattggatgttatgtgtaaggaaaagaaaggagtcaaggaagatccctgggttgaatcattcaagctttattgatttctttcccttaagacaccaattatccacgttatttctacctttaagaaatcacctttgaaccattttctgttattaagtggcttctcattcctccttttctgt

SEQ ID NO: 116448 - DNA, 1537 bp, Homo sapiens
actaaagtggatctcctgattcctgagtccttgatcttttgaccattccaaaatgttgctattatgccttggtgctctctgcctgtttgatttctcctctacctttcttgtctgccctcctgtgacctatatgttgtaacgtttgcctggctgaagtctgaagactcagactcttggctggttagtatagctggcttactgtccagctgacccactccataggtgatattcccaaccagacaaattggagtcctggtctcttgcccagcttcttgttctgtcataacaaccaacttgcttggtatgaagggttcatttgtgggaatactaaaaactttgtgagaatacgcaaaaagaaaaaaaagagagagagagacagagagagagataaagctaggctgtggaaagatttgcaagaaaggttgaagtttatatttcgttctctaggccagtgaccttcaaagctcaagtttgcacctcaaaagtaggcaagatgatccatggggtatggacagaaattattatattataatgactggctcagtgtgtttctatctttaaaaagtttttttctaagaaatacagttatttaaaatacagaagaaacaaaaaaaccaaacatttaaaatataaaataaattaaaaatacaaatgtttaaattgtggattgacccaagtcaccccatgtgtcagttggtcacatatcaactttggtaacaggcttctggaggaaagagtatgaactccgcgtcctggaggcgctgacagcaggaccttactcatttattcactttcagcttgtttgaggtattgctgtttatgcgtgcctagatttgcagattgtgtttttagccttaagcaaaataacatttgtaaagtggtcaagtgcctttaaaagattcctgccaagagcctgcaggttgaagctactacttgtgacgcagtcacatggaggagctgatacttgtgctcctaatactagctttagccacacttagagcaaaaatcagtggtattttaatcagatataaccgaacttctaccaccaaaagttgataatttccaagaagactattagaaaagtgaatgtatccaaatgcctttgacaaagaacctcaccctaagtgtatattccactttgagataatgcacattgtgaatatagtattatgattagccagtcatttaaaaatcgtgtttatttcatttttatactcaacctttaaaatgcccacttttaatggacacttttagtgtctatgtttagttttatatatatatattatctatctatctatctatctatctatctatctatctatctatctatctatacacccgcacacacctgtatgtatttaattttgagaataaacatatatattatagataaatatttatattttgggcacatgatcaaaaagttttcaggggattattctgtggtcatctgattggaaatttttagagaatacaggtactcccagtgaggggtggtttctttaataacaagaaactgaaaactgactgaaaatct

SEQ ID NO: 116449 - DNA, 1091 bp, Homo sapiens
ttttaatcttaaagatttgttagaccagaggccgggcgtggtagctcacgcctgtaatcccagcactttgggaggcggagacaggctgatcacaaggtcaggagatcaagaccattctggtgaaaccccatctctagtaaaaatacaagaattagccaggcgtggtggcgcatgcctgtagtctcagctacccgggaggctgcggcaggagaatcacttgaacccaggaggcggaagttgcagtgagccaagatcacgccactgcactccagcctgggttacagaacaagactctgactcaaaaaaaaaaaaaaaaaaaaattattagatcagcgtgtctaacctttgcattacaggttacttttctccttaattcacaaagaatattcctaagtcattcccatacgaatttattctagcttataaaaattctatatcttacttcaattttaatataaggttataaactgatatattatttatactaaaatattgtatacttatatcatcattttaaagcatgccatttctctagaggtcataatagattgatggttgtatgaactaatggcccatctgttgggcagtggttacttcatagtattttgcttgtcttctaggctcttccctagaagaattttaaaattcttagctcattatggaagagctaagaatttttaaaaatgcctcaaggggaaaatctccaagtgtcttgttcacttctttctggaacgtgttttctcaagttctctttcctgccagccctgaagtctaatttttgtctccttagctctttgagattgccagataattcgctggctttcctgactctcagcatctttcctcatcctggattttcagtctccctttcttctccaagtattaataggcggataccctgaagggaaaagtggtatgctgaatgtagcgctgatttcaataagcttctcttctttacaagattggcctgtcaatgttggctgcctcaacagctttacagtgccttcaaacaaatggttttgtttggttgattttgctttaattttattttgtctgattattctagatggaattataaatcatgtacaagc

SEQ ID NO: 116450 - DNA, 1025 bp, Homo sapiens
gacattgtaatctttcactttgactcctgactttcttaaggatgaaatggtgaaatatagactggatatagttgagttgttttgtgattgctttaataaatgtacctaagtattgatttaatcatttgttgtgaattctaaagctaaagagaaatgctggaaaacactggggcttcagggggagaatggccatgatggttaggaggatgtcatatgccatcatggagagggtcacagatagaagcgagggggagggctcaagtgtgagaagtcctaggggagagagcatggctttcttcaaatgaataactgacatagccaaaaaggaggcctggagaatcgactgggagaggcaagcattgaatggaagttaactgaatgaactctgaagttcttccctcaatgttttataattttgttctcttttataaacctaaagtacagacatattttttaaattgttgttaaatgcaccacattcaaccctacactaaatttaagtggatattttgtatattttctcagaattcatcttaaactttatagcttctttatgctggtttcagagtaaatgctcaaaaaactatttggttggctgatttaagtttcttgttgctaaaatatcacctaagatatggcttgtaaaccaaaattaccttctcttaacagaaaaagacaacgtaagatacttatgtaaagaaatttaacagaattttaaaattatatcttaaaattgtatcataactttgtaaggcaacaaatccaatttgtttgctattgctgtgtatatatatatatatttttttgaagtgcagtggcgcaatcttggctcactgcaacctcgcctcctggattcaagcaattcttctgcctctgcctcccgagtagctgggactacaggcacacgccaccatgcccggctaatttcttttttgtattttagtagagacaggatttcactgtgttgcccaggctggtctattgctatttatgttgtgaaaaatctgcttatgctgcactctcct

SEQ ID NO: 116451 - DNA, 1052 bp, Homo sapiens
ccacaagaattgacacacatttcaaacatgacttactacaagcatggctttcaaaatggatatatgtgactcatgaagagccttgttcaatctactattgctaaactttcaattttgacatatttttcattaagaggtgctgttctgtcttgcaatactgattgaccagccgccaaaccacatgaactacatttggaccacaattggcagaatgtattctaatgtgaaagataatacagcaagtacttctttgtaattccatgttcaaaatgaaagtataaaataagcaccaaaaaaaaaatgataaattttccatttaaaatgtaccagtggatctgtgggggtctatgaaatgtcttttgctttcctatctgaaggagagctcaagttgtttatattgtgctgttacttcagcagtgagtcaggaacactttatcctcccgtggcatgaatacagggggtgattgcaggcaaaacaaccagtcagagcaattattacatgctctttggaactctgtgctgtgcctcttggtaaataggattttatgataaaagcatcaagatgtagacatgtcaccagtgatgtgaattgttgttaagtagagttataaggtacaaatgtatgtatgcccttggatgtgaatttacccccaggacaatgttttccagtgtgtggtttccaggtgacttgtatcactagaaaatttcgatttctagtctcctacagagattcttatttctcaggtctagtgtgggccctgggtgtcagcactttgaacaagtcctcagaggattctaatgcagattgaggtttgaaagctatggacctagaagaaaaagaatcacttccaatcagtcaacataactaaattgttaacagaaaactataattttatatattcagcagtataaagtatatatgatattctgaaagaatgtaaaacaaatatattatattgagagtattcataatctaccctactatgtttttaacaagtacatgctggatcttctatattcacttagaaaaagaaaatgatatacagagacct

SEQ ID NO: 116452 - DNA, 1028 bp, Homo sapiens
agattttcctgaatttttcattgttataaacagtagttcaatgaacacatttccatatacatatgtgcaaagtttctctggaacatgtaactagaaatgaaattgcttgacctcatgtagatatatcttaaatattagtagacattgacaaattactctgaaaaatggttgcaacaatttaaacataaccagccatgttgaaacatatccccacagcttcaccaacacatggtgtcttgctctttcaaatagttgtccaacaattttttgtaatcggttgtttattttttcttattgatttgtagaaattttatttatttcatgaatataatcatttgtcaattaaatacattgcaaatatctgcttctagttttccttgtcttttaaattccatatatcaaatgaagtattcaagtttgatacagtcatattaaccaatattttccttaactcttgattttaaaaaaatcacctacagtatttcaatgtcatactctcttacagtgttttctaaactatttaaagttttattttttacacttagatattctattcatctggaatgtattttgtgaatggtgtcaaagagggatctactttttaaaaataataaccaattgtctcaagagcatttattaagtaatatctttccccatttacttgtcatatactaaaattactattcacatgtgggtaagctctctcttctgttccatttgattatccctgcaccaacaccatactcttttaattgttgtatgatatttctcctttaatctgctaatgatgagattatattgatagatattcaaatattaaagtctttgaaatgcttagataaaccctttattttagtccactcttggattcaaattattatacttaattcagtttttgcatgtatattctaagtaaagcaggtttataatgattctttctcatatgtttttggtattttggtatctaaattatgataacataaaaaatgaagtggagagaaatggtacagtttttttaagatggagtt

SEQ ID NO: 116453 - DNA, 1038 bp, Homo sapiens
agagtaagactctgtctcaaaaaaaaaaaaaaaaaaattaaggaatagcaatgacagtgtggaagaggggagttgtagaatgagaagggtagacctaggttctgggttcagtaagtttagatggagcattgaacaaaatgcaagttgatttccttatctacaaagtggaaaagtagctacccaaggtcattttcaccactggaggtatgagcttatacatctttttttttttttcaagactgggtctctatcctcctgcctcagcctccagattagctagcaccagaggcatgtgccaccatgcccagctagtgttttatagagacaagagtcttgctttgttgcccaggttggcctcaaactcctggcctcaggtgatcctcccccttcagcctcccaaagcgttgttacacatcttttaagtaagaagataatgctgtaaataagttatattggacagtcaccacattgcttctaggactgtattagaatacttatagacgttgagttcaacgtccctcaggttacataagagcattaattatattctgtttttgcattaactcaactacactttgatcaaagtcctattgccattagttataatttgttgaatggctgaacttggtatatttatcaggacttctggttgtaggatagcgagaaattcagactagcttaagaaaaaactgaatatattaacttgtaattccaggaataaaatatattaaacacatctgaatccaggaatccaaataatgccccgaggacatactcttttagtgcttcatcttacccttttttatattggccttattctttcatattagccttactttttcatgttagatggaccaggaaagatgaccccttttatagttgaaggatgacataccacctagagtcccaaatcaccttttttttttggagtcaaggtctggctctgtcacccaggctggaggaaaatggtgcgatctctgctcattgcaacctccaccatctcacaggctcaaaccatcctcccacctcagcctccca

SEQ ID NO: 116454 - DNA, 1865 bp, Homo sapiens
attaatgagcaggaatacatacattgaggttatgaatagagagctcaatttgtacctttgctgtcttgctcaagcttggtatggcatgaaaactcgactttattccaaaagtaacttcaaaatttaaaatactagaacgtttgctgcgataaatcttttggatttttgtgtttttctaatgagaatactgtttttcattacctaaagaacaatttgctaaacatgagaaatcactcactttgattatgtatagattacataggaagaacaatcacatcagtaagttatagtttatattaaaggtaattttctgttggctcataacaaatataccagcattcatgatagcatttcagcattttccaaggtaccaagtgtacttattttgttgttgttgttgttgttgtattttagaaggaattcagctctgatgtttttaaagaaaaccagcatctctgatgttgcaacatacgtgtaaaatgggtgttacatctatcctgccatttaaccccacagttaataaagtggctgaaaataatagtagctctggcttggtgcttgacctggttaaatactgtcttaaagctcatacaaaacaaataggcttttccataagtggcctttaagaaaacatggaagacaattcatgtttgacaaatgctgacagggtgaagaaagcccagtgtaaaaatgaatcgcgttttaagtgattcggttaaagagtttgggctcccgtagcaaactaatactagataataaggaaatgggggtgaaatatttttttattgttgaatcattttgtgaatgtccccctcaaaaaaagctaatggaatatttggcataaagggcatttggtggttttatttttgtttgagggggattgtcagaaaatcccttttctctcttacgtctaactgactagggaacaattgttgatatgcatagcattggaatacttgtcattatatactcttacaaataacacatgaagcaagaatgaccaatattctgataattggcactggatcacaaaatgtgataaaactttaaatgtataaaactttatcaaataaagttttattttcccctttaaaatgtatttctttagaggcattacttttttaaaaatattggtcaattcctgacataagatgtgaggttcacagttgtattccagtattcaagatagattcctgatttttcaattaggaaaagtaaaatccaaaatgttagcaaaacaaagtgcaatattaaatgtttgctttatagattatattctatggctgtttgtaatttctctttttttccttttttatttggtgctgaatatgtccttgtaggctctgttttaagaaaacaatatgtgggaaatgatttaatttttcctattgctcttccttgtggaaaataaagtgttttgtttttttctgttttgtataattgtttggagatttatttgaatcttgatcatattagtaactcaccatacatgcaaacacattaaattaaactattaaactctattttaagccattctgggtaagaattgtatctaggtctgtactaaagaaaattactgaccaactcctaggctaaagtagtcctcctgtctcaacctccgaagtagctaggactacaggtgcacaccaccacacccacctaattttctaatttttttgtagtcgtggtctcactatgttacccaagctgatctcaaactcgggcctcaagcgatcctcccaacttggcttcacaaagcactgggattacaggcgtgagacaccatgtccagactctaaatttcaatcttaaatatgaagcaaacttaaccaggtaaaataattcactttcaggcaccaattcct

SEQ ID NO: 116455 - DNA, 1940 bp, Homo sapiens
gattatatgtcttcatagttttgatcaccaaacaataattattttaccttgacgttgctttttaatacctactattctgtgtattttgacatgcataagaacatgctgttcgaattgcgtgtatctttttccttcagcaccacccagctatgcagaagtggtaacagaggaacaaaggcggaacaatcttgcaccagtgagtgcttgtgatgactttgagagagcccttcaaggaccactgtttgcatatatccaggagtttcgattcttgcctccacctctttattcagaggtaagtacctactccttaagtatgaaatgaactggctatcttgggaaatagcattgcaggcatttttttttcttaatgttattagatcttgattatcatgttaacagaacaaataatttaaaacaacagattaaaagttaatattaggttcatcaatatttactaagtttgatgcagaggtaggactgttcacttattagggaattaagataatgatctaacctcatgttgaattactaatttttttttctcttaaacttttatcttgagacacattttttgaaggaagaattttgtatatccaagcatcaataggaagaactagcattttgcaaacactgattaaatagtagaatttatcttattcatgatgcttttccaattgcatattttgacattctcagtcataagaaataatgtatttgtgataacatcttaaaacaacattcccacatggttagactattttcgttcatctcatattgatggcagctaagcacttaaatgtaaataaaacatggcccttaggagaaacccacagattactgaggaaaacaagctaagaagcaaaatattatgtaataatgtgataaaatgcacagctcatttgagaagcagcttattaggtcttgggcatcaggtggggcttcttgaaaaggtgactattaagctgaattttgaagaatgagtagtcctcaaaaggcaggaagaacagtgtatgtaaagacaaggagtgagtaggtggggtgtccagtaatttcaggatatttcagagtgactttagccactagtacacatttttaaggggttttggagttggttttgataccaaaataattctgtaaattactagaatcagctttttcttttggttactgtaatttacatagctgttttactctgaaatattactcccaaattaaacattaggggattgttcatcatatttctctttttttttattaacaccataactggaagggtcagttttcctttggttgtgatgatatgagatcttcttcattcattgattatagaatattcagaattattgatgagacataattttttctatttattttctaatacatacaatttctattagatgctaaaagtgttctgccacttgttacagattttgtcattacatttttacttggacatttctgtcttgcttattaagtcagtcatttctggcttgatttgaggcttcctggctgtccaaggaggcattttaaaaagaatgacaatctaagtatagttcacttttaagcaatttgtgggaaaattctgcctccttttaaaaagcactaaagataatttacaacttttaaaaccctaaaatatgttcagggtgtgatttaactaaaagttatttggcttttttccttcaaaaatgtgttttacctaaagcttctgaggcaatttgggttgttccacatttagatgcaagtggatggggtctcgtccaaaagctctttcagtaaaaaatatattaaacccaacaatttgcttttctatgaccattctctttgtacttgagaagcaacttttcattaaaaatatgtgcatataaaagtcactctgaagataaagaaggtgggaggaaacctcttgagtgttttgggttcagcagttttatttcctg

SEQ ID NO: 116456 - DNA, 1235 bp, Homo sapiens
atccatacactgacctttttctcttaatttttttcttacagtcaccccaagcaggcacaaaagaaaagacactctgttgctggttctgtacctcaggcccaatatccttaagtgccaaaattgaaaggaagggctataccccaggtatgtaagaggtagattcccacaaaaaacttttcttcacttagcttttgtgtttaaatttataatatgactactaaatataaacataatatagtattcttttgtgaaataacaaattgtgcttatccatttgtttttttcacaaagtagaatgtagtttcctttttcaaatagctactgattagttcatttctatgactcaagttatttgcagttcctgggacatcttttcatgtatgttagttgcactttcttactttagctttaagaatcttgacttcttttgttgtttttttctaacagtagatatgtatatatttttccctctctaggtgaatcaattcagatatttgctgagattgagaactgctcttcccgaatggtggtgccaaaggcagccatttaccaaacacaggccttctatgccaaagggaaaatgaaggaagtaaaacagcttgtggctaacttgcgtggggaatccttatcatctggaaagacagagacgtggaatggcaagttgctgaaaattccaccagtttctccctctatcctcgactgtagtataatccgcgtggaatattcactaatggtatgtacacatttaagaggttttttcctttcttttttcttttttgaaacacctgtcacccaggctggaatgcagtggcacagtctcagctccgctacagcctctgctttctgggctccagtgatcctcccacctcagctcccaagtagttgggactacaggtgtgcctatagccatgcctggataatttttgtattttttgtagtgatggagtttgaccatgtcgcccaggttggtcttgaactcctgggctcaagtgatccatccaccatggcctcccaaaatgttggaattataggcatgagccacagtgcctggcccaagaggtttttggtgtttttttttgttttgtttttaagtcttaaagttatgacatagttttgtcttacatccaggatttgatttttttaaattccatatatagtgacatataaaatacataactctttatatagtttgacttacaattataccttatatgtaaatgtactatacagaatta

SEQ ID NO: 116457 - DNA, 1075 bp, Homo sapiens
cattctcaactttgtgtttgaattcttggccttttcaaaaaatgcccattaaactttcatgattttgccaccatcattaaaagtagcctcctcttagtttaaatggattgtattcttctggctttttaaagcaaaattttaaagatatttattgtttattcttagttggaaataggaagttttttccccagtgacttatccctttggaaattttttaaattatatgtttgatacctcattggaacataaacaatacaatatattaacacttctattctgacctactgtgtaattgttagaaagaggtataaaattaatatattgacctttatattctgcacagaccactcgctacctcattcgaaggccgacatggcagtgtgcgctattgggtgaaagccgaattgcacaggccttggctactaccagtaaaattaaagaaggaatttacagtctttgagcatatagatatcaacactccttcattactggtaagaattgactgaattatttattctttgtttttggcatataaatattaaagaataatcaatcacctaaactatgcagttgtcataatttaaaaatactggttttcttttaaaatttcataaatatacattttcttaaatacagtcaagaacactgaaattaatgaaaaatatgctcatatttttgacattgtagtatacctttaagtaaatataaaactaagaccagtatatgatatgaagtatctcttactcagagtatgacagccataacaaaaaacagatctggtccttggatgatttgagtggaagaagagcagtagtatcttttattataatacaatatcacttacttgacaatatcataatctaaaatttgtactatactttgttattccaatagagggatagttgtcaaataatggggaatcattagtttcattaaaaaactccttttttaaagaaatctatttttaattgcatttgtctgaaaataattcaaatttgacttaaaactttatttgatttaaacaaatggtaacatctttaaagcacataagaaatgggcattttccttttttaca

SEQ ID NO: 116458 - DNA, 1863 bp, Homo sapiens
cgcggcctgcgcctgcgcactggggttgtttttcacaaagctgctcttaaagtgagctggcagcttttagccgcccgtctttgtaaggagaccactgagacgagcgggagcgcggagcagcagcctctgctgccctgactttttaagaaatctcaatgaactatttgtagagaatcactgatccggcctgcaagcattttgcacggcaaaaatatcgatcagtgttaagtgaagatcacattttatatgcgatcttgacttttttgtcttacattatatttttatagattttgttataaacatggtgctgggaaaggtgaagagtttgacaataagctttgactgtcttaatgacagcaatgtccctgtgtattctagtggggataccgtctcaggaagggtaaatttagaagttactggggaaatcagagtaaaatctcttaaaattcatgcaagaggacatgcgaaagtacgctggactgaatctagaaacgccggctccaatactgcctatacacagaattacactgaagaagtagagtatttcaaccataaagacatcttaattgggcacgaaagaggtaagtttttgttattcataagtcattggactcattttctttggaaacgtaccttttcagttttctgaattaacgtgattctactcctagcataactaagcagtttgagaaaggttagcaaagttggaaggtttggattctccttgacgttcatcgtgtgttaagccgtaatgcatgcaggcatctgcaaagtgactgcaaactacacttattcagctacctctgtacccggctcggtctgtgccacacgcacttgtagtccatttgcaccttacttataaattctgtttgaatccaattcagtcgttttactaatatattttcaaatgaattggtaaaagctgcagtcttagatttttgcccttttacttgcaacctaagatgtaaaaactgaacttcgatcaagaaatgtaataacatttttaagagacttaatgggtgtgtttcatttttaatattggaatgcaaaagactttaaataattgatgactgttctttcataaaagatttctgtggcttattttgacatatggtatcaacaccccacgtgttttttctctattctttaccattcctttaaaaatttacacccagcattccttattttaaaggaatgactatctgtcattatgataggtatcgagtcaggtttagaagccatttaggatcagtaattttcttttccgagcatcatgtctaactttggaacgtgcattcaatgaaacccatgccagtcaaatggaattgaaaagtatagggcacactggatttgatttttggttagaagagagagataaagggttgtcaaaaggagaaggagtcctgagatttccaatctattgtttaaatggttacattgtggaaatataggagactctaggcttgtttttctaagtttccaccctttgttagaagcggttcaatcctgtttcggaccagttctggggggtggtgaggaggggcgcttgttctgctctcagcagattggttacacgcgtcaggtggtggcgatgacttaattcctagcccaagaagaatataatgttaaaactggttatgtaatttttgtgcctctcctttttaatgcagtatttagttcagatgttggcgatttttcagaaaaaaaattagagacatattttaccttattttttatattaaaaacgtacatcctggagaagtgctgatgactaaggcaagtgagaaatgaaggatgctttgagggacagtattaatgcattatttttgaaactattaaggtgaactcagttctttagcagga

SEQ ID NO: 116459 - DNA, 1104 bp, Homo sapiens
ataccccaatttcaaatccaattaaaatgatatccattactaaattaacccatgtacactcaaatcttgatataaaatgacatagtctcaagacactgattaattaatcaaacatgcaaaaatatttcaagaaaattattaatccacctgtttcgatgttatatctcaaaggtcttcaagctcctcatatattagaagtattatatactacattcattcttcttcacttcatttaaaagataacactgaaaaatatttcaccatatgctcgtttaaatgcagtgataaatatgttcttttcaaagcatatggtgatattattaggtgtctctgaatatagcaaggttgaaatgagacaatctgaactaaatggaaattatttgctgctctcatgtccatacatcagtatcatctctggattattattgttttaataaagaaaaactaaccacttgaagattagaaacatctgttgtcacctaccatagctatagtgggtagaattccaggactacttttcctttgactgtgtaagcctacttgactcattttcccagactctggcactgagaacttttgctatcaattaatcactgttgacatttgtgtaatgctccatagcaaggagtctactttcatatgtggcttagccaccttgcttcatgccacgccatgggattgtcttctactaatggtgaggggccttgagattcttctccaataaaagagtttgtttccaacatttcttcctgttctgatgtactcaatctttgaggaaaagaaaaaacttgtagattctatgtggaatgatgataaagactgattatttgttatgagaaatataaatctaaaaattaatgtattgaaatctgggaaaagagaggtttggtcatgatattctatacaattttttcttcatttattcaatgaattagaatgtatacacatttaatagtgtattaaggacttctcacattttaaataagttcatgagtatatttgaataataaacctttcattttataacatcagtgccttatagttcattgatagccatagtctggattttactttatttttctttaaagtgtctgactggaatgg

SEQ ID NO: 116460 - DNA, 1048 bp, Homo sapiens
actcttttaggatcagatctgtgagcacgttggcgaggaaaaacaaaacaaacaaaaaaaagaaccttgtgtctgtctggtgaaaaaaagaaaaacaaattggaagagaggaccatgagaattttaataaaacagaaggaaactaatggaccttccaggatttattgtggacggatgtggatatattctgtacaggaacaacacatatggaagtggactgaagcctatgtagaaacacacacacactgaacattgttattcattttgtaaaatactagtctttattttcattttttgtaaaatttaaacatcgtatgcgcataaagaaaaaggaaacaagaattaggggaaaataacattttccaaataattataaaaaattgtcctgtgtctatgtatctatatctgttttgtatttttttctggttccaaaccagatttcctgtgattctatactaataatttttgatataaccctttgcttcttataatgagtgcgatatatgttgtcgaggctgttcttcaagaattaaaattgaagtgaaaatttaaacaaaaataaaagaatttagcaaaacccatgtgtctggttgcttgatagatgttatccgtggaagagaactccttggttaatttccacctcaactattattagaattgaaggttttggtgtgtaaaaggggagacttttaaagtctactacaaagttggttagattcatttccaaaaaccaagctgctaccttggttttgtaaatgcggagggccaggctctacatgggctggggtccgcggggaggcagggcgccttggtcgctgacttcagccgttgagacctggtgggctgcgggcggtcccgtgctcagttgggccagggagtggtgtaggcagggtcgcgcgcccggtaagtctccaggcaccaagcaccgggggcgcagccggcttcagtgtctggcggcggcaaccggggctttaccgcatgtgggaacttgctgagctggagaagctacagagggacatggagagcgggacgtgggggtgacgggagt

SEQ ID NO: 116461 - DNA, 1048 bp, Homo sapiens
acttggcagaaaaggagctagaggaaaggataggttgtgccagaagccacaaatgatgcaaagtgtctgctgctgattttgtgtctttcttttagcctattatctctggtcaaacttgacttcttgcctttacagtctcaatacaatctcaactttaaagggcttgcaactgtgttagcaatggaaagagaacttgcttgtatcttatgcaggtaattcaacaaggcattgtaacatgttttctgagctgcacttggcattttccttacacaatctccgtgcacaccccatcacgccccattcactactcccagtgtggccggctcatacttgtcccttctaactgggaggatttccaatagaagcccttctttgtgcaaatattagtaactgtatatttcattttttcaaaaaggatattgttcttagaagctctagaattcatttttaaatgaattttagtagttatattttatttctttttagaaggcacattatttttcagtgttctgatatttctctgattctttatagctttctaaaaataactgctggtaagctcgtaagttcattagttaatcccaatgggactcaataacgcatattacagatctcctgattgttatatattagattttctcaagaattcccttacctgttattatcaacatagctatattgacagggtcttcattacttcctaattgcccatactcctttttcttgttaaagatcaatttttaaaatcaagccttgtcattttggaaatatcatagacatattatcctgttaatattaatgtgtttcatatctttctagtttcctgcctcctttatcatagtaatttacaaagtttattcattacctttttctttaaaaatgtattattttgtggggggcagggtgagagggtaggggcacatgtttgggttttttctccctggaacaaagatataaaagatgatctttcatattcaaaggtgaacaattgatattccctattctaagccagaccctaggaagtaaattatgtgtagattgttaaaat

SEQ ID NO: 116462 - DNA, 1066 bp, Homo sapiens
actcagtactttaggaaatgcatggccttcaggtccctctagtctgacttgacttcctgacttttcagccacaatcatccaccggtctcttggtgtcacacatttaaatttttaagaaaattattttttctcatctttttcctctagagcaagcttttccaacctgcagcccaggatggctttgaacgtggtccaacacaaattcgtaaactttttaaaaacattatgagagttttttgtgattttttttttttagctgatcagctaccattagtgttagcctattttatgtgtggcccaagacaatttttcttcttccagtgtggcacagggaagccaaaagattggacacccctgataggtgatgactctctgaataggctatacttagttttgtgtcccttcctggtttcaacagctgtgcataggaggtgtagggtaatgtgaaacaaaagatgaccccttactcctgtccctgaaacaggtcataagcaatgtagcttcactaaaaggagtgattggtgagcaggtactatgattcatacttctcatatataatctaccttaaacaaattactatccctagtttggggcaccaaaccattaacatgacccattgcttaaatgttaacttcctcgaagaagtcccagactacccgctgtatatgctgctagcatatgctcccatagtactctgtatttctacgagcataaagctcatcagtgttatcttactacttatgcaatgcctttcttctctcacaaactctcgaggcctgtgaaaacaggggccatgtctttcccattcaccattctgtcacctgtacctgacctagtgcttggctcatcatcagtgtccaaacatttgttaagttatttagttattaagtgccttaaccctataggaatcaactgttttaaattataggcttaataatcttccaaaacccagctctccctctagaacatttccacttctgacactgatattatcagtacccctcagacagggcagactctgactaatctctttccagcatcaaggcagtcgtcatgttttattggt

SEQ ID NO: 116463 - DNA, 2048 bp, Homo sapiens
cacagtcctaggccctgagttacagagaaaaagagtttgacacggtcattgctatcatggcttacaccttccagagcctctaatagaggttttgtaaaaagggagaaagtatgcacgtattaatgcaagtactagacataattaaagtaattaataacattgacaagaattactaaactattgaaatataatacagtttctttaaaaatacatactgtatattcagaaagggtaatgttatttttacatcttaaaaagaattcattttcatctctggttcaaaatatatatctttaaaaaaaaaactttttgcctggtgtgattccgtcctgcgcggctgttctctgcagcagcgttgttttatctccgtccgccttctctcctacctaagtgcgtgccgccacccgatggaagattcgatggacatggacatgagccccctgaggccccagaactatcttttcggttgtgaactaaaggccgacaaagatgatcactttaaggtggataatgatgaaaatgagcgccagttatccttaagaacggccagtttagggctggtgcaaaggatgaactgcacattgttgaagcagaggccatgaattacgaaggcagtccaattaaagtaacactggcaactttgaaaatgtctgtacagccaacagtttcccttgggggctttgaaataacaccaccagtggtcttaaggttgaagtgtggttcagggccagtgcatattagtggacagcacttagtagctgtggaggaagatgcagagtcagaagatgaagaggaggaggatgtgaaactctgaagtatatctggaaagcggtctgcccctggaggtggtagcaaggttccacagaaaaaagtaaaacttgctgctgatgaagatgatgacgatgatgatgaagaggatgatgatgaagatgatgatgatgatgattttgatgatgaggaagctgaagaaaaagcgccagtgaagaaatctatacgagatactccagccaaaaatgcacaaaagtcaaatcagaatggaaaagactcaaaaccatcaacaccaagatcaaaaggacaagaatccttcaaaaaacaggaaaaaactcctaaaacaccaaaaggacctagttctgtagaagacattaaagcaaaaatgcaagcaagtatagaaaaaggtggttctcttcccaaagtggaagccaaattcatcaattatgtgaagaattgcttccggatgactaaccaagaggctattcaagatctctggcagtggaggaagtctctttaagaaaatagtttaaacaatttgttaaaaattttccgtcttatttcatttctgttaacagttgatatctggctgtcctttttataatgcagagtgagaactttctctaccgtgtttgataaatgttgtccaggttctattgccaagaatgtgttgtccaaaatgcctgtttagtttttaaagatcaactccaccctttgcttggttttaagtatgtatggaatgttatgataggacatagtactagcggtggtcagacatggaaatggtggggagacaaaaatatacatgtgaaataaaactcagtattttaataaagtaaaaaaaaaaaaaaaactttttgcctaatcaaaatttattcaagagctgttcctttctttcagttactagaaaaagagaaattcagggaaattttatatctaaaaactgggactttttacaaggtgggaagtcaccaagaccttgtgttatctgaagttaaattttatccaaatttcaggactaatattgcaatgacaaatattagtaagccacacacattttttccagtgggcaagatcaaatggcttgtgagaaatgttttttttttttttttttaagttagactgtatcctaaaattaagggacaaactatttagtactttgatgttttgccaaatttattaattataacaggtaatattttagagtatttgttactgaatcatcctcctaatttaaaccttctgcattgggataaaaatctcattttgaattaaagcta

SEQ ID NO: 116464 - DNA, 1781 bp, Homo sapiens
ctaacttaaaaaaaaaaaaaaaaaacatttctcacaagccatttgatcttgcccactggaaaaaatgtgtgtggcttactaatatttgtcattgcaatattagtcctgaaatttggataaaatttaacttcagataacacaaggtcttggtgacttcccaccttgtaaaaagtcccagtttttagatataaaatttccctgaatttctctttttctagtaactgaaagaaaggaacagctcttgaataaattttgattaggcaaaaagttttttttttttttttactttattaaaatactgagttttatttcacatgtatatttttgtctccccaccatttccatgtctgaccaccgctagtactatgtcctatcataacattccatacatacttaaaaccaagcaaagggtggagttgatctttaaaaactaaacaggcattttggacaacacattcttggcaatagaacctggacaacatttatcaaacacggtagagaaagttctcactctgcattataaaaaggacagccagatatcaactgttaacagaaatgaaataagacggaaaatttttaacaaattgtttaaactattttcttaaagagacttcctccactgccagagatcttgaatagcctcttggttagtcatccggaagcaattcttcacataattgatgaatttggcttccactttgggaagagaaccacctttttctatacttgcttgcatttttgctttaatgtcttctacagaactaggtccttttggtgttttaggagttttttcctgttttttgaaggattcttgtccttttgatcttggtgttgatggttttgagtcttttccattctgatttgacttttgtgcatttttggctggagtatctcgtatagatttcttcactggcgctttttcttcagcttcctcatcatcaaaatcatcatcatcatcatcttcatcatcatcctcttcatcatcatcgtcatcatcttcatcagcagcaagttttacttttttctgtggaaccttgctaccacctccaggggcagaccgctttccagatatacttcagagtttcacatcctcctcctcttcatcttctgactctgcatcttcctccacagctactaagtgctgtccactaatatgcactggccctgaaccacacttcaaccttaagaccactggtggtgttatttcaaagcccccaagggaaactgttggctgtacagacattttcaaagttgccagtgttactttaattggactgccttcgtaattcatggcctctgcttcaacaatgtgcagttcatcctttgcaccagccctaaactggccgttcttaaggataactggcgctcattttcatcattatccaccttaaagtgatcatctttgtcggcctttagttcacaaccgaaaagatagttctggggcctcagggggctcatgtccatgtccatcgaatcttccatcgggtggcggcacgcacttaggtaggagagaaggcggacggagataaaacaacgctgctgcagagaacagccgcgcaggacggaatcacaccaggcaaaaagttttttttttaaagatatatattttgaaccagagatgaaaatgaattctttttaagatgtaaaaataacattaccctttctgaatatacagtatgtatttttaaagaaactgtattatatttcaatagtttagtaattcttgtcaatgttattaattactttaattatgtctagtacttgcattaatacgtgcatac

SEQ ID NO: 116465 - DNA, 1343 bp, Homo sapiens
gccaaagtccctgcacatttgcaagttataccttggtgcttttccagaaggactatatgggagtgattgtggtagaaatgaaataagcagctgataaatgggtcatttttaattttcattttttatttaaactatcgatctttttattgcaataaaatgtcacaagtaaaaataaagaatttatgacagttttaacgtggtggaaggtagagcaaacaaatggagaaaaaatccaggtgaaggattaataattaaataatgaaactcttaaacttgaaaatatctgtgaactttaacaaaaatatgtataatagatatggatgcaaattccctttgatgcttacatctgagaacccagggaagtgaaaggaacatattaagaaggagacttcatagcaacactggactgagagttaagagaatcaagcccacttcacccctacccaacccaacccttccattagtggatctggctccttctttccttcatttattcagaaatgcttattgagccccctgtatgtcagatacttttctgaatactagggatttggctatgaaaaggataagcaaaattccttttcatagccaaatgtaagctctgttgcatagagcttacatttcagaagagaaaatagatactaggtagacaaatcgacatataaagtttatgttttagatagtgatgttaggataaaaattcagtaggctaagtggtgagagagtacctgatggggcccagtggtatgttttatatagcgtggtcaggagaggcctcagtgaggagctccttgtgttgtctgtaccttttaggaccttagtctcttcatacataaaatgagagcattgctaggtgatcactaaatggctgcaaaattctgttcttcctttaagggacatatcttcggatcagataatcttttgtatgtataagttacggtctttactgtcaactgatctcaaaatgtaataagaatgttcattgattcccaaggttaattccatttttacatttggggaatttaaactgagaataaaatgccttcccaaagattgcataatagtaaaagaaggattaaagctctcaattcctgccactcttagtctgaaaacgtcaccccaccatgtgctataatgagaagttgaattgaaatgtcagggcagttcaaagtagattaaagatgtgtaagctgtgatggactacatatttacaaataaggaattggataagtatatcccactgcactcatttacggcaggcaagtaagccatgtgatatgctttaagccagtaaaatagcaaattccccccaaaagatctataattttaatcaaaagtttgtt

SEQ ID NO: 116466 - DNA, 1049 bp, Homo sapiens
aagggcattatacgttaagaacttccaatccccaaacccccatttaaaaatttagcaagtaatctcaaatacaatgttatttgagttgaaatttctcttttgacattactaatcatttctctgcaagcttaattgagttttcagtgaagggcatttactctatgctctctgaccaatagttgcttaattgaagtgtatgtggaggactggtaaccagaatttgagcttttgaatacacatatacaaagtctttatacatatatatatatatatacacacacacacacacacacacacacacacacacacacacacattttttcccaattttttcttcagttaaagaggacaaatgctttaccctacaatttagaagcataatgtcaggaagtttcagaccttaatctgatgcgccttaaaatagttataaattagggaggtgttcttctcaataactatgttttaaatttgccagtgtgtccctgaaaaaagatcaacaaatctccgttaaaatctgtgccaaaatacttctcaagaactgctagccctctatatttaaaatgtttgcaccattaaaatttcaggaagtttgagaatttcttaagacattaaaatattggaccttttaaaatactaagtgaattacatatatgccttgagattttggcctatggttaactttccccatggagctgaaatattttgtgcttggaattaagccaaatctcccacttgcatgcatttaacttatgttgcatgcatccaagtcctggcatttgaatggtcttttttctttatctgaatgctttctaacttgagggaaaatgatactttccttttaaaacttgcctctctcctctccttcccctctttacccaaagcagatgtctttatactatgtacctacagtcctgtgaggaaagcaggcatcttgatattttccaacacgagaggattgattgcccttgaatacccccaaggcctgggggatttatggatgagctgtagtgagttatatgaaccctttgaaattctgtgtcgaattggta

SEQ ID NO: 116467 - DNA, 1129 bp, Homo sapiens
gatttttttaatagaatctttaggattttctacatacaggaccataacatctatgactaaaaccgtgtacatcttccttcttaatatatatgccattaagttcttttcttgccttactgtactggctgcaacctcatgtacaatgttgaacaggaataatgagagcaactgtagattctgattcatttgccttgaggatctttgttgctgcttctggtcttttgttttcttctgtttttagaaacttacctggacttaatctgcagactcccctcttcaaaatgtagatgttgatagcttggtgggttttttgttttgttttgttttgttttcaattttaattttattttaggtcagctcctagataataacctctttgcctacatagcctaatggtcagagtttttgttcaatcaccccaagctagtaagactctgtggatggatccgtgtttgagttacagagcctattcaaagtttccaagtctgccctagctttccttctctaccaggctatcctgggacttccgtcccagcactcatcctctcagtcagctaggaatgtgcgggagttcatctagtctctcagcctctcactcatttccagaatctccctgttgaatttctagctagtctactggtctaccgctcgccccaagcaagaccacaacctcagactagcagggccggggcttttgtggttggtttcccactgaatttgctttacttgaggataacatgattgggcatgggtttctgtccttctactgtaaatcaagtcagccccttctagcagcgaagctgcaggttttcacagccaatcatgctctggaagcactgctgtgctaccgagctgctcgccacagattgccactgtccttacctgtaatacagcagatttccttgaataaacatttctcagtttgtttttttgcttttggttgatttctggagtgctgaaatggttgtacttgacaattttgccacctttttagttgttcagtggaagaggatttgccaacttcttcacttgccatcttcggaagtcctgcctgggttcatttttgtacatccccaaaccctttatggaacaagatgaaagagcaaacaaataaaataaaacagaaaag

SEQ ID NO: 116468 - DNA, 1020 bp, Homo sapiens
tgttatgacaaaatttaacaagatgacttaaggggactgcatcagaatgcagttgtgtatttgtaataaattttaaattaataaagagtcttaaaggtgctttaaaaaaatttagctatagtttttgcttaagttctatccgtaagtgctaaatactcacgtactactttttcctgtttgctgtcctcacgtttgtacttttctctgaaatcctcttttgattatatatacattttagaaaaaaagtgtatttgtagatttttttcacaaaagtagttgtaatgtacatataagtagagtacaatcctcttgtttcacttttatagatagtaaaagttaattaagggaggaatggaatttctttataattaaatggaatattgtggatatataggcaagaacctaaattttttatgtaaaacaggaattcttgatgcagggatctgatgtgccatatgggaaattaatatgtaagatgattttactgtctatagttggtgtaactccggtgcagtgatatgactaatggggtaaagaaccataaagattgaataatgtacttatcaagactagatcttcaaagtcatatttattgggaaagctccaataggaatattctcctgtgtaagagttgcaggtgaccaggagactatgtggagccataagccatagcccttattggtgggtctcagtaccagcaattttacctgaaatttcatgccttgtaaaaattctgaagggtagaatcttaatgcactccagtgacacacattagaaacaatcaccctgtgtggaattaacttaaaatgaggggaaggagaaggttcaaactaaaaatcatctataattttttttaatctaagatcactttctaataagtaatgtgaatatgtgattatgcagtgtagttcatctgcgcttacagtgagcttaaaaattgcatgtaaagaaatggatttgtagaagggaggctttcagagtttctgaagtgttgggaagcatatttgcacctggcagcac

SEQ ID NO: 116469 - DNA, 1038 bp, Homo sapiens
aaaaaaaaatatgcctctgaatggctgattatactatgcacattgaatcagaatgtcagaatcttctaaataaattgttattatggaataaggcagaacttcaactctgaatttatataattcattccattgtagattttttttcaattgaagaatacatttctcagccataaattgtactgagtatgaacagcagagtcatttgaggttgattgaaaatataggagaacatcatgtttcctgtccttttgttaaacttggcatattgatttttttttttttttttttttttttgcacagcttatagtacagaaatgtgatatacagctatggcaagacaaactaaccacatgtgaatttgttaagtactgctggtttagcagaaattgtctgactgtgcaaatagcaagatttgacttttccaggaactctttatgacttaatcaattaaaataacaagttttgattttattgctcagaataaatcattagcaaaactcattttctcttgatcactcatttgtaggatgtttacattcattttgcttctgtatttcaagcaaagtaataaatatgtagaacttgaaccaaaagttcaaagtcaaatacaggaagataaagatgtaataaatgttatctcttaatagtagtttataaattttgctgagaagaatattctagatttttatttaaatttgccattgctattctttcttattctctttagtgttcatgattttgttctctttagactcaaaggtagcaagatttatacgtggctaatacatctttctgcatttaaatatagaatcttgtagagggtctctgaagtaggactagtttgctcttctcttcaccttattaaacctccttcgtaaatacatctattatatagtttaccttgcccagcttcaaagagtagagatggagaaatgatgagctatcactcagcagagagggttcccatggtttcttagaaatgctaatgtgttacctatcatgtttataaagttctctgaagcagataagccattgtgt

SEQ ID NO: 116470 - DNA, 1208 bp, Homo sapiens
cctactccaaagtgcttagaaaagtaagcataaggaaaatgagaaaagaagctcaacaaattttcggagtgctgaaatagaaaccaaaggattttctatctgtattacttaaaggaagggaaccaaacagataggaaacatgagatgctaaaattttaggttttggagatagatagtagatggatatttggaaatgttcattttgacttaataagcagtttctgcaaggaaataatgtgatcacagcagcttgtaagcataagagcctagcacacatgttttaacaggcagataagaaagggagaatcagagaatcatcaccttgagatgtggtgaaaaagtgcatggaagatataatagtaaaaatagaaggaatatgctggctggaagtggtagaaatgttatctgtggcaaatttaattgattgttctccccagttctgttttgaggagcataataattgcagaggactaaaaaagcacatggtgagtgcaaaaagatgagaatgactaacctatatgtggcttcgggccagttgaacgtctctggatctgtaatcttttaaatattagatggttaggtagatgatttctatactttccagctctaagattcttttctaatgctttaattcagacagaattaaataagcaccctatagcctaggagctcaaacagatcaaatgtttcagcttgtaacagctggtttattttggcctacagacaacagccatggtagaaaactcaggataattttatgaaggttttgacattttaaggaatataaaagttatggagaaatctcctgtgtgggcaggcaagaagtgaggatatccagtgatgctgcaaaaatgaaggagtgctagaaaaagttaagatgagctccacccattgagtttaaagaaatgataggatgtctacagaagacatccaagagagagctgtcagtgttgcctaaagaatggaaatcaggcatctgcatcaggagtgaatcagtaggtttgatttattggcagtaaagtgatagggaaatctcattaatagatggtttccagtgaaatagaaagaggtactaccaaagaacctttagagagatgagaaaaaagctaggaaacattaaataaataaaggtagaaaaataatctgaatcactctttagccaaaaatcagtaacatgttaaggtatgacttctcattaggaagccact

SEQ ID NO: 116471 - DNA, 1033 bp, Homo sapiens
ttttagtgtcttagctttgatgtctataaaagacccattcaaaactggaggtaggtgctcctcatgtgcacaacagaatttggctgaagttatttgaagctattagagataacctttctctacatgtcttttgggagaaaaactggtgccaacaataccagttaagctgtaattagtgtaactaacaactaatatgaaagagcagactagaggtcagtcttaagaatttaaaggtattaacaggttaaggttgtagggcatcctatcccccagcttaatctgttgccttagctggtgagatttgttgaagtcatcagtgccctctaaccttgaggtgttgctctctcataatttgttggtcacatgccaagttcctccttcctgtctactgagatgactttgggaatggcaaattcatttgaaagctcttgtcacaaatgactacagatttttaacctctaaatgtaaatgaaagattatggtttaatttgctttaatattcttgtcctaccagccttagactacattgaaattgtcattttactgcattatagaatatgatttgttgagaacatttaacatgtattgtaagaggaacgcttaaaatctaactattaaatcagatgttgtgtaactgattgttatacatgctgaatattccagtttttatgggctacttcttcaaatttaattgcccaccggtggcttttgtttatgtttacagtcaattctaatgcagttaaaggataagaatgtaacagaggaataacctctcgcttccatgaggtgtagttaacccctttcttctagtatctggctttggcttccttctcttatgtgataccaacacataaacaagaggaatgccccagaactttaatcactctttttcttttcccattaaagtaatatatgtaatgttgttcctgtagttagtttctacctagaaaagctagaaagctttttttcttttaaagcaacaggcagcaagatagcactattgagaaaaagtcaaaaggaaactttttccctt

SEQ ID NO: 116472 - DNA, 1046 bp, Homo sapiens
gccacaattagatctcaggtttctgatacagagaaaagagaaagtgtaggatattgcacataggaagatccaatattataaacactagaactgatccatcacttgactgatgttcgaatctatgattctgaaatagacctcaatgttagcacagtgccccaagtcatttttgctgtatcaaccaattaccacataaagcctgaggcctgctatgtggagggccttcttgcagtactgttcatttcattcagaacctgtaatctctgacatgagcccccttatccacctacctatatcctaagatagcttactggcattggtaccacagaccaggaggacatgtaagcatacggagacttagtctgttagttcttcatattaatcctattttatcttctggtacaaccaatttaatctttttaagggagagctgctaatattttggggttattcttaccagtatttaatttctgtcttgatcatactttcatttggtatctatctttttaacaagtaacagtagattgtaataatctgttttatagaaattctttgggattagcaaggtccttgcatttgtcatctcatttgttcctaagcttcaggcaaaggaatccctaaaatctcattgataaacatgttttattttgaaattgcagtgaaaaataaatatccagaacctagattgttatgcataaattatgtttatatctaattaaattcttacaatgctcttgtttttgttcttttccgcagttctgattttctgtttttcatttctgaaataactttgttgcttatgattttcttgtagtctgccttaaatccctagtggaaagagataggggtattaattcgtccataaattagtcaagcaaactaaaatcactataccagctactgttcttcctcttatatcctcagagaaggtagaaaatatacggttaatgttctttcagtgctttatgtagagcaaacttatttaatacagtagttccccccttatttgcagttttgctttccacaggttcagttacttacagtca

SEQ ID NO: 116473 - DNA, 1079 bp, Homo sapiens
agttatcagttcctctattcattgttgtatgctaccttataattattagttaacgtaagggataagtattgtaaaagttgaccaccaggaactctgtgttttcagtttatcattcataataaatagttgaaatcaggaactctcagaaagttattaattaaagaatcatttaagataacttatctaaatataaaatcttcatttatatagatcactagtatatataatcatttgccctgagtatatatatttcatcaggtcgaatattatcctgtgattttgactttttcagttttccagtaattccaatgaatataagtagtctcactccaaaaatctcacttaaaaaaaattaaaaatagccaccatgttttttacagttttctgaaccaatttgtgaaaactccttcgaagaatttggcagtaaaggtggcaactctcctttcctgagctaactcttttctttaaagataaaaaatttttttaactaattatttttggaatgcttttagataaataactgaataataagaatttgtatttgtacttaaaattataagttttgagttaatatggaaacactattccttttactgcccccataggaatagcttcatggcttttaatgctctgtctgtaattgttggaaaaaataagtcagggaccagtggtacctaagacacacattttcatcccttttatcatatgttaagtcttgatctcccttcctatggctgtctttacttcgcttgccctctgttagctctatctggttcactgcccttggtgggtctctctatgtctgtttattgactctgggtctctttctcatctggcttagcctctatgccatgtctttatggcttccagtttccccgacctgaagactctgtccttccagccatggaatcacatccccccagcccaaatgtttctgtcttctcctgcctgactgtggtgtgcctgggctcacttgcccttcacttccctttgatgtgggctttgtgtctctctcaagccacaagctcactgtctgctctcccctacacattctgtgtgcccccatgtaaaccctctca

SEQ ID NO: 116474 - DNA, 1022 bp, Homo sapiens
agatctttcataggatatgtgtctctgagttccaactcaatgatatgacaggcagtcaaggatgttgtgtgtcctagagaccttagaaaaaaatacttcatgcaaagattttagttggttcttgtgttagatagactctggactgtgggaaaacatgcaagatggcatcctgtgcaaaggagacagagcaatttaaggagcaacagcaggaatggatctgaagatgttcacagggaacaaaggcaagactggactgcctattgaaagggaagaggtgaagagatgagcaggttaggagcagttgggctctaggaagtttaaggatagcactgatttccagcctaaaggctttgtatttgagtcactaggtaagaagagagagtgacatttgttagctttctggttttgactttcacagttctcagccaagtgagcagtggcatctcgttataactgatagcagaaatgggtttgctgtggccatgggtgctggagaatgggtaaaagtttggaacacaaactactttatgttaacaatcacaagtgatagctaatcactgagtacttaaagttgaaaatatgtgtacatatttgaagaaaataatttggagaatagttcagattctaggtatagaactattgttataattaaacgtcactgtcattaatacctaaacttcaactgagcttcactatcattacagctgaattttataagtctataagccagggttcaaccacagagacagaaccactagaagatgtatatgctactatacacacacacagagacagacatatacacacatatactcatgcacatatgtatatatgtgtgtgttcctaaatattatacaattgattttcattatttatgctagttatataatgtgaagtcactgaaaacactgaattagcaaataatcattgctcctagatgaaatacaaggccaggttcctgtgagcttctggtcacatttttgtcagccaatcaatatgtaaacttggtttatgtgtgtttc

SEQ ID NO: 116475 - DNA, 1050 bp, Homo sapiens
tttttcaaacagtcgccttcccctccccacccccaaccacatcacgtattttgtagagcatgtgtcttctttctcaactcccagattgtcaatcacttaatgtttgcttttttttttccttttctttttcttttaaacctatcttacacatgctttttttgttgttgagggagcttgcacgtggcagcatggtctaggcaggaaaggaaaaggaagttattactgctctcttctggccgcctgcaataataaatcataacttgcctttccctaactggtggctggagacttgtcttcataaacgcatgtgacccaagaagtttcagtttacataccctatcccttggtgttcttgcctatggagagccttttccttcctgaaattaaacaaagattgcaagaattgaagctagggcttcaaagcacaggaaaagagaatgttgtcttatcctgttgctacagtggagatccagctggccatgtttacctaaccagggtgtgagactgcttgtccatctgtgaggggctcagcacagtgctaaggcttgctcttaaattttgaacttagaaaccttttgaaatacctcttgtgtgttttcctacatagttatttttagacagtttatacgtttggggtatatgctgaaattgctaagcattgaacagaaggaaactttataagccttacctgtttgccagggtagcattcaacatcgtgttatatatacgatgatcaaattatttcccattcaagccagagcactgtaacagggaaaggagactctattattaattatgccagtttaatagtcataagccaagactgttctgggcaaactggaatctatagtcatcttatttgtacttgattatttcctttacaatatttaatcgaaaccaaatcactttacaaaatcagggaagtaggggtggagatgggagtagaagctgtatgatacttcaaaactggtatcctatcagtatgaattttgatgtcactgaagagcacatagataccacatctaaaaggaaggttacattttagaaatt

SEQ ID NO: 116476 - DNA, 1062 bp, Homo sapiens
caaggttttttcttgcattgattggcctgtccaaggcagcctgatgtgttcttgcattgatcactttgtcttttcttggaagacagtgttacactgagttcatctcaaacattctagggagaaggtaaaactttactgcagatgtctcaattttattcagatgtttcttttgagtataggccctttttgcaaggataagtattgcttttttttccccctaatttggatgtttctgcagtttgagtgcactgaagactagattatatttgaaaaagctacgttaaagaaaattgctagagtatatgccagttatcttgtactatttttgtttttaaaacagtgtatcttgcttccagcttgaaaccattttctttaaagatgatctcttaaacgtagatgtaaactaaaatttactggtgtttgcaataggttaccacttgtctttactaactttatatacattatagattccttagtttcagtgggacatgcattgctttatgtgtttaagaaaatgaggagtttgattagtttcactatgaaacagtggtccaggatgattttcctggtgctattcattattataagtaatactaatatgaatagtacaaatttgtcaaatatggaaatgattaagcagctatatatcaattataggtgaaatatatttcgtaccataaaatagtagtctgttacttggtgacaatggaaatctgaacttgagcatttttcaaccaaatctgtgggaaattgagcaatgaatgttttacagcttagcactctttattggctggtccttaaatcaacatttatatgatctgccaaaaaacatatttgcctacacagctaattatcaagaaaatgcccattacctccaacctattagctatgcatttagtgaggaactggtaagacaaatgtaggattctgtcaagatgtaggacaatatcctcctccagaccagttttctgtttcatcaaagcctatgtgaatttacaaaaaggttacttttggcaaagatttagaaatgtgtcatggctgaatttgattattgtgtggttg

SEQ ID NO: 116477 - DNA, 1105 bp, Homo sapiens
atgcccggctaatttttgtatttttagtagagacggggtttcaccgtgttagccaggatggtctcgatctcctgacctcgtgatccgcccgtctcggcctcccaaagtgctgggattacaggcgtgagccaccgcgcccggccaagtttaaaccttaactcttttactaactaaatttgttaattctccctactctgcatttaaatattgactgatttgggaattctacctaatcagttactccacattagacagtattacttttttcgttcaggtgtaagacttttataggctccttgttgctggcatgcccagctctcagtctgactgaaaagattgcttctgtatgacacacccttgtaggtatagtcttttcaataaaataagaaaatgactaaactaaattataatataactaaattatcatcataataatatccttacaatgttatatggcagtctatgaaataagtctagaaaactttccatttcatccccaatcggttcagcttcaccttttatttaataattagcttacgttcgcttgtttgcattttttaaacttttttatttctgagataaattttacatacttttatcaagatataatggagatttattaagatttattgaaatatgacttacatgccataaaattcatcctttaaataaaatatacagttcaaagtctttttgcatatttgcagacttgtacaactatcattactatctaattttacaacatttttatcaccccaaaagaaattccatacccattacccatttctccccatacttacaatcctgccagcagtgtatgagggttccactttctgcacatcctcatcagcacttattattatctgtctttttttatattagctatcctagtgggtgtgaagtggcatctcactgtagttttttttttttctttttcatttctctgatgaataatgatgttgagcctctttttatgtgctgttggccatttgtattttttggagaaatgtctactcaaatcctttgctcaattttaattgggttatcatttttatttttgatttttcataggtctttatatattggtacaaatctcttattgata

SEQ ID NO: 116478 - DNA, 1076 bp, Homo sapiens
gggtggcggaagcggggagggatagctttaggagatatacctaatgctaaatgacgagttaatgggtgcagcacaccagcatggcacatgtatacatgtgtaactaacctgcacattgtgcacatgtaccctaaaacttaaagtataataataataaaataaagtaaaaatacatgcaatgttacgtatgctgctgttcatatctctatgagaactgaaatttcaaccaacaaaattactacaatgaccagcaagatataatggataagtcatatcatacctcttgggccaggttttttcctctgtaaaatacataggaatgcaaataggcaggaggccatgatttctaaacttctgtcattccctgaaataatgaaataatttttatttaaatattcattcttctattcttaaaatgagctactttgctaagcattttcactcgttttaataaaggaaaaggaataccaggtttcattttatctgtcagtctgtctataacagtccctgaaatataaaaatacttaactgggtccatctgacaaaatgaatgaattccactttgcccttagtgttaatcttagagaacacactctcagaggggaaaaaaataaaaagaagaagaaccaatcaatgactaagaatccctaatatttaatgtaaacatacttaatagaaaatatactgatttaattttaaaaatttgcttgtaaatattggagattaaatttatttaagtaggatatttcataccacagtacagttgccttcacaaaacatatctagagggaatattttgctgagttagttacagtatgaaaaaatgttcatattgactccaaatgttaaatatatatggtattaatcttgcccattctgctacttgcaaataacagccattagatatgatttcaaaaagagtctaaattttaatttctagaacatgttcatcacaagtttgatggcgagttccagaaatacaccattacatccctgtaatgtagttaagaataaaaaaacttcactgctcacaggcaaccatagagcagaggacttagtgacattctctaatcagc

SEQ ID NO: 116479 - DNA, 1017 bp, Homo sapiens
cacgttataagtgcctagctgaaatgccacctcttcctctcactataaccgatgacccctccttactgagactcatggaatgtataatgattagctaatttacatggaatttaccaggtactgtcttgatatgtctcttgtatttttgtctaataatttaattaatattaccaattattttcatgcctctccactagatctccccataatcctttagatctttgagcgtgctttatatgttttggcattgcatgtcaatccttaaaagcagatatgtgctgctttttgcattagtacagagcatattatgagggagtcaggaactgatactagaatttaatcccttggatggagaacaaaacaacaagattaggcctaagtgatacctagataaaggaacctgcagcataggaatgaaggttattctgttatcaaactggagcataagaggacaactaaatcaaggaaggtcagttaatagaattttagagactatgtgtagagtataggcaaaagtgacttgatgctgatctgtctaatgttgggttggaagtgcttgaacatctctttcctaaagtgagacttatttgtagactctactgatgggaagtaaaggagaagaattagacccagcctctgaaagaaagcaaaaacagatgctaaggatagaggggaagagaattacatggacacaaaacgaaaagtccaaatgttaaagaaacatttacagaatagaaatcttagcaaagcctggaattgcacatagagatgcttaaatatttatcaattatttgttgacatccgtcaaaaatcttattctttaatatgtaagatagttggtgttgcctagttttctgattgatttttttcagcattcatgtgaatttttgcaatagtttagaaacagccaactctgataaactaaagctttctttccaaaaatatgtttttgatgttctgactggggtatgttcacagttctgaatctcttctgtgcaaatgccattgaagtcattt

SEQ ID NO: 116480 - DNA, 1050 bp, Homo sapiens
gattacttgtagattttcttagaatgggctcatacaggaatgaaggctaaacaaagacagcaagatatgtgaagttaaacagtgggcaaaaaggactatgtgcttccttttcacggtaaatcttataagtattcaaccaaactctactccataaagtcgtctgaagaaaaactcactctctcctaatcccagtcttaaaacaaaagacaaggtccattattacttcaacagcatagagaaaaggaaatgagaaggggacaagggttgctacagtttgacatggggcaattaatcttccagtaagcgttgtcaggcagaaatgaacacaaatggatcactcacattaaccagaggagtgtaggtagggattttaacaagcatttacgagagtccattttctcactaatgaagaggggaataaacgaaccagtgtaagctagcattatgtacttaaagttgtgtccttttggctaaagacgcctcttcacattcttgacatttctagtagagcctgtatgatctaagccagggctggaagggttgaaattctaaggttggcttagaactatgcatggcttacttcagagccctgtgtcactgtgttcattagtttaaaatccccattaacccttcccttccacataacaactatcttcaatattatttcacatcagaactgagatgggcatacagctttttttctactttaaacatttctaaaaaggaaatttaaaatagaattttaaaattaggattacctaatcattgtgtgtttttaaaagaccacatgtcaaaattgtctattcattaatttttgcccatgatagattattaatgaaaagaacattattaagtgcacatgaaagtaattctgttgctgctggctgatactagatgaacatatttttataatttacgtggtaaataatgtatttgatgtttaaattgcttaagagatagaaaaacatgatcattaggaagctagtttcctggctaaatagcacagatttaataattatcccatttgtttttaaactaaaaatatttcta

SEQ ID NO: 116481 - DNA, 1469 bp, Homo sapiens
acagaggaagtatgctaagtaatctgctaaggactcttaagagccaaatttctatcagtttctcaagagacattttgtgggactaagtctttaattcataaagttaattcagtaaattttgcaacagttgtatattgctgagcagtgaaacaaacccaaagagattttgcaagtgttgagagggaaagggatgaggtaacaatctatttcaaataggaaattcaagtcactcaactaagtatggttgaatatcacatattttaaatagactagctgacacagtggtgtgtggttttcccccccccagaggtagtatagaacttctaattggcatgttaagaacagatatagtaaaaattagttgaaactacttttaaggagtcatagtttatgctaagaagaatcttataaaaagaaattgtattaaagtgttgtttgcaagtgaattaaaagtgaaattgtagttttacttttgtgtgaaaagtattctttttgtattctcttttgtatgcatccatagagtgaactctgcatctcatatagggcttctatttaatagtgcttgccaagtctttatcactatagatctaaagcagttcggagcattgtttgatttgaagcagttccctgtgtataattgcactttgagtctttgcctctctttggctgaaaacctagcttattgcagctaagagaatctcacacaaaaaatgcaagttgtccttgtgcataaaagcagattctgcacttcaacaccttttcaaattaatatttgtgatgggtctattctctgcctctgagtttctgttctcttgctttgttcctgtgtttgatgtaatgtaagcaaggacaaaaaggagagctgggagagtgtgtgaaaatggtagttaagtgggcttaaggggtgcttcagcactttctgaaaggattcatgagtgaataggccttcagagtgcttagctgtagtgctgtaaatagacaggtccagcacaaagctgcagatgaaatgagcacatgcatatcaccccttgtgacatctggccaaccctggaatataatttcacttcttcagcctcaaccaaacatttcccgaatgctctggcggttaaaatcttttgtttggttaattgcaatgagtataatatacaagtctcttggaggtctgctgtggacgattggacaattgaaagatttaatgagatactgccagttactcataataaggtttcttttctgcttggtagtttctgaggttttgtgataacataaaactccttaatgttccagcaaaaagacaaaatgagaattggagtatacatttgtctggtgatatctttttgcttatttcaatcaagaaaagtgttgtagtttttttgatgatgttgctgctgttatgagttgtatattattgttgaggttctagttttttaaattttggagcctggaagatggtctttatgattatgtga

SEQ ID NO: 116482 - DNA, 1058 bp, Homo sapiens
ggagtaagctctgggtcacaaaaagcatggcaggagtagtttaatgaaaattataactttttgtttgttttgatccgggatattttggacactcctgcctagtgatatttgggaggaaatcaagtgatttcatttgagttatatggcttgcttttatacactaaattatcctactgtttatatgccaacctatactttccctttatgtattaggaacttgatgtaagatggaaaaagctttaaagtatgcaagcgctgatagactgaaaatctgatgctctaatcacttcttggaattttatttaattaatattgtgcggaatatggaagtttatactttctaaggaaaatgttaatgtattttttaatcatttattgtattgttcaatttaagagggaaaaaatgagcatatgtcgcagtagttgcaaaaacttgcaaacagtattaacccttgggctcacgtgtcattttgtattgggaaccataaaatagttgggattttacttttgaagaaaatgttaaaatgtaaactcattttagtcattgaaatgctagttaattccattttccttccttttaacatgaattaccttttttgaaattattagtattcctattagacttagcattcatctaacatgtttcaggttgtcttttgtccacaatgcttagtaccagaagtgttttggtttttggattttttcagattttgcagtatttgcatatacataatgagttttcttggggatgggacccaagtctaaacacaaaattcatttacatttcacatacaccttatacacatggcctgaaagtaactttatacagtgtttttagtaattttgtacatgaaataaagtttggacccatcacatgaagtcaggtgtggaaatctgcacttggggaattgtgcagtccacaaaagtctgtcatgtcagtactcaaaaagtttaggattttggagcattacggatttcagatttttggattagggatgctcaatctgtagtatctcttttgcttccaacttgatagttatgacaatggattttttatt

SEQ ID NO: 116483 - DNA, 1080 bp, Homo sapiens
aggcttttttaaaagtgtgcagatttcttggattttatttctgtaactcataatgtcttaaaattgtcataatgtcttatgagttacagaaacaaaattaatcattcactggagtatctcttattaggattattttcacagcagggacttatacagaagacccctactttattactctgactctttggctgactctcagaatcattggcagagtcaacgtcaagcagcagattgtgtgcctttaccatacacagtagcatcccaaaccatactttaaatttgaggttacccttacatgtgtgcatgcatgctcatatatctatataaaatacgtagacagcaagagagtaagcacctaaaatcttttgaaataaagtgttactatttgctaatactaatgtcaagggcagcaagggagaattatgcagcataagtacttggggagacaaggtagagcacttcacaggtcttcttttcttgtgtactgaagattcatttttcctcaaaaattttgctccgattcctggcttactaaaaatgctttaatcaattagcaaacttagcagagtctttttggggttagcagaaagtagggtaccagattatcttttcagttattgcatgtctaatgtaagtaagtcttaatgcactgaacatgtaaataattgtaagactttatttacatgttagcttaacattagcatatactaagaatttttttctgtcattttgaaaattttgcctcttaggcaaaattaggataaaaacaaatgttttatttgtgacactcaatatttgtgacactcaatatttttacaaattgctgtacatttttccacttttttttgaggcagagaaggcagtagttattatccccattatacagatgtggaaattcagacctcgagtattttaagggatttgcccaagatgtcataaatagtaaatggccaagatgaaagtttaaaccaaattttctgaattcaaatttagttcatactctttcaaccatctcatagcctctcctttttatgctggcaattaaaaaaaaatcactgatggtttatttgtcaaaaatat

SEQ ID NO: 116484 - DNA, 3611 bp, Homo sapiens
ttctgaacattttgggagcaagcaaattatgataaaatatcaaaattgatgagtttactgcagagtgtgaagaaccagagtaaattagaattctgctcactaagtgcctcagagcttattccaactgactcatcaaatgaaaaattcatcaattaatcctctgacaataacgatatatacacaaaaatcaatctagaattgatttttttagtctgaacatgaaaactaagctctgacttatacataatgtgaaatttctcttcatttcgactttattattgagtataacagctgaagtgttcatataattatttgttctgtgtcaactacaaaagtgtgattgtttgagaaagagtatatgtgctgtggagatgttctgaagcacaatccgagtgagctaataaagttgtcagatgcatgtaagaatacagctgataggaatccctagaaggcagccaatagagagggacactgatcactaagccctgatgggagaccacccaggacagttaacagtgagctgagtactgaggaagatcaaagaaagagaagtgtaacatacaatcactcagatctcagacacggattaaaaagaacattgtaggagtgtgatttctatgaaatgtgtttgtgtgtatgtgtgtgtgtgtgtgtgtgtgtgtggtgactaatgccacaaacaacatgaactgtagaaaggtgaaccttttcctattttgtctcatctacttgctagatataaatgctttagaatgcactaagcattgaaatgatcttcttgctttaattcaataattctgtgtacttcttcatagatttccaaagaagccttctttcaagcttttttctagttgttaagtttctttcttccatgtaacatatgtgaatatctcaagagaataatccaagacaaatattagtgggttttggtttcgattaaagaaatcttgacaaaatgtattccgatatattactacaaaggaaaacaatcgcaagggtctaattgaaatttacagtattctgagtctttttacctacaaatttagtggtttcaaaacctatattattgctgctagattcttaatttccataatatagattctactttgaattttttcagactgtattagaaagttctctgtattcctaaagagaacttaatattgctctaaatgctgtaagtcagcacactgtaacaaaaagaaacgtactcttccagtatacagtaatgttaaacaacaatgagaggattcaggggaaatgttaagctagagaacgctgtcagtattacttatcttacatgtagtaaattttgatgactctcttctgaatgtgaattcttgtaggaaatgaacattaaactgtttttatgttttatagatgttcaaaaaaaagctgaatacatatgattctgaagctattagaattttttcccctgtcacaatagcagtaagaaaattgcaatataaatgtcttcttgagtgcatagcatatgaaataatgtgttttttccctgtagtttaaaatgttaactgtattttaggtctcattctttgtatatgccttgacaattatgattgcttgattaaagaaagagcttttgtgctagttatgtgtcacaataccacatatattatatctgaacagtatttatcatgttctatttcggatcaggtcagatatgtcttgtgaagaactaaagtagtatagtatgtattgttaaaatcttttgttactaaaatatttatggcatgtttcttgctgtcttttttaagcaatgtggaaaatgcttattttacctaagtagtttacccaataaaatactctacatatttgtttaaagcaccttaaatagtttagatttttttctgaacatttttagaatcatactgtaaaaggacatatgttactgcatttaaaaaaatgttcatctatacttttttcagcattttggtctttatattcttttgtatcagatgtgtttttcaaggctttaagaagatcatatagttatataattgcccccccatggaaatatactttatcagagaataggtaataaagagtaatgtgtaaataagtatatcagtacatgtaagtttattttctgccctgtatgtctactacaaagttgtattttgttttgtcatttaattttattgtgataaatatataataaatgaatgaagtcagtgatatatatatatatggctagtatagaatagatgcacctgtattagcagacagctatgtcaatgtagttacaaatgtttgaatatatttaaaagtaaggaagttagatttttttataattcctatagttaatacttattctgtttatgtgcaatctttttcatcacaataaatttgtatagctaagaattagtcattttgttaataatagataattatctttctctgcaaaaatttttaaaaccctctttaagacttaaaatattgttatatacaattatataatatccagtagaaaaagaattacattggttttgttctttattctatattttaatttaagtaggggggctttcatattttcaacaaaaaaactgaaaattttaataggaaaaggaaaccttaatttttttcaagaggattattttaggcttttgaaaatagtaaattagttttatattatacctcctatagtttttacttaccaattctatttttaaatgttagactataactaatttatgggcagcagggggcagaggtgatcatggggaaataaaaaggtttgttttaggatagagcatgagagcttgattttagggaacatgagtttaatgctctgtagatataatacgtttgtagagatcaataacatttttttttcatttttcaagattgtccatttttacctttgttaattctggttcattcataaaataaaaataattgacaagttaatcatacatctcaattcaatttcatttattcagcggtgctattacttaagagttaactgttttgtacatactttgacattaattatctcttaaaattactaactgttattctccactgaagtgcacattaggaaagggaaacttattcatatgtccattaaatattttccatagcaaataacttcttgtgatatgtcattaagtaatgatttttcttaatattcaattattttgctatataattaaaatatatttgaaaatttataggtatacttcttattcacaatttctctatcagtgtggctttcttttatgaaggcctttcaaaaagcttttgttattttgtcagaaaaaaatttcagattctgaagtttgaaatgtaagacgtctcgttcattctagcagcattcttagaagataaattcccaacttcttcactcctaatttctttatacaatagctcttacattttttttaaacatggaggaaagtttggtttttagaaggacaattctgtaaagtttgaaaatgatgcttttaagtgaaataacacctcacattcattagaattctcctacttttgttttaataatctctttacctaaaaatggaatttattaggtaacataccctcaccttattagttttcagttgaaagtaacctttgtagaaattgtaaaa

SEQ ID NO: 116485 - DNA, 1010 bp, Homo sapiens
tggttagtgctcaaataatctagacttttttttatccttttctaaggaagtaagcaataggacagcaaaactgactggaaatcagtttttcattcggctcatgctccaagctgttctcttgtatagatgctatcgttattggctctagtatccgaggaggacaaagtaatgaaggaaagtgacaaggtcatagaggtagaaaaggggacgcttgcaagaatagagaagtaggaggttatatgagtcttagctgaacatgaccccttgctccctgtccttgatgctgatagttctgtgaagacagttcacagcactgggagagtaagagcatcaaaactgacttttctcctggccgacagaaaatcttgttgattagtttaaacacagaaggaggcttttccagcccctttgactatagaaactctacatatgggacccttttaggaagattaagtgtggggaatcagagcaatatgccacatctgctctcaccagccttagaattagggcaaggacttagcaccagaagtacagagaaaaaggagactatggggaaaataataaacgtaaagatgttattgaaaagaataacctaaaagcaaactccagagggagaagaaattatctctgaaagaactttgatacagttagttatgacagttgtttattaacttaaattttccaaagtaatatgtatgctaaatttttttttaaaaaaatggtcttcctttacatgaaaaataaatgcatagaagatcttagaggtgtggcagattacctttggaaaacacagctatattctaagatgttgtgttcagtaaggaatatgaagaagaaaaagaaatatgaagaattatttgcttgtctttattcttgtgaggcacttgaaagtatactatgaaattttaaattttttagcaagtatggtatttgggcaataaaatgcatttaatatttcttagaaaatatttaggatttttaagttttttttgtttatcatgggaatatgc

SEQ ID NO: 116486 - DNA, 1035 bp, Homo sapiens
taatagattaagacattacattttataacaatttaaactgtattattctatggggggaaatgctaagtgttcttttttttaatgaccataccttttgaaaattttgaaaattttcagttattgctaatgtaagattgatcaccttaatgaggtggtagttagtcaggagaaacattcagagcgattttacatttgacagtatccaaggtctacatttattttatactccttgagagcacagaatagagtctgtgcatgagtgatgattaagttatttctttcagtaagctaaagtggactaagaaaaagcagaggtcttctcagaagcctatattatgtaatactttaacaatgttgcatgcccagctatttttgaattacatattccctccccctgaccctccagctaaatcctccgggtagttactgaacaagtcattcaacactttagagttttgtggatctactcttatttgtttcttatttgctgtttgtttcctattcactacttggttctcctggctcttggttttctttctctatatcttctgccatcctgaaaacatttgttggtaatatatattggcaaatgagacaattattggttatgggataccctagctcttttggtgatattaagagctttttcagtggttacaaattggcactctctctgccattctctgtcttacaagtaggaatccaaatgacccatataccagtcttcattaagaatattcacttccatttatctggttatccattcagtatacatttcctgagggattgcaggaagcagtggcatatggtagttaaaacttgggcattaaatcatggatttaataccagtttctgtatgaaacatgccagttatttaacctttttttcttttgcttccttgctcccttcttcacacccttttgttttttcactttttcccttaagggtttgttagtggtttcaaaaatgatctatgaaagcatgttaatttttcatcgtgtagctacaagtagaataatcgaggttctctgaaga

SEQ ID NO: 116487 - DNA, 1022 bp, Homo sapiens
cgtattatcaagcatatttataatcgcctttgaaatgattttgaattccatgaaaatgcagtagtgggaaatttcacatcccctttccagtaagagatcttggatacatacactttatgagtaactggtggtcagctgtgattctagagataaagtattgatatgtttctagacctctgaatttgagactaattaaaaagtccaaaatcaatttgaatgtagattgcgctgaagtgagtgtcatttcttgtctggtcatgtaagcatcataaccctgctgattagtgaagatcaggttgagactgcagctgtctctgacaatgtgatgtttttacttgcaatacttgctagtctgtttatgaacactcttcaactgatatactcatgcctaggttaagaatgtatgtcaagtgacataactgctgactaccagtttgaatagaataattttgaatttatgtagttgataaattcatttcttttctgtttgattttgtcttgggaatgcttctgagaatttgtacctaaaagagtttatttctgaaagggtccagtttaagttttatttcctccagttttacaacaggtttaactttacatttatttttttttctgagttgtaagaaaaatgaaattttatgttgctttactttttttgtgagtaaatttcttttagcaatgttttttacttttctctagcatgaataagccaataattatactttcctaaagcaacttgctgcccttatacactctatgattctgttgttggcacacttgttttttctagtctcttgcatgcagaattttagatttttacagtataaaattataggcaagtagccagctgtcacattcttgaggtcagatacaactaccatatatgagatacactgttttggcttcatactacttgccagattgctaagcagatgttctaggctataattcaggaaactgggacctcttgaaacattccctgagagtcgcttttgacatctctgaatcatttatttaaaggt

SEQ ID NO: 116488 - DNA, 1046 bp, Homo sapiens
agtaatgccatctagctgcttatgaaaaattaatatttatgtagtctaaacagagtgtggagtatggcaaaagattcttgtttaagggctcagagaaaaaatatgaaaattacttggcacttttaaatatacctttgttcaaatgacttacagactttgatgctttttttgatagtcattgaaagtatttgtgaaaattaaagagatacttattaaaacaagctaccatttttcaacatatcagattggcaaattataaattacttgttaataaattgataatatcatatttaaatattagtgaaaatgtaaattggagtaatcattttagatggcaggttagtaatatcttccaaaatttaacatgtacactaatctttgaccttaaatttcattcgtaagaatttacaccagagcagtgcatgaagtatacatagggatgctcataacagcagtttataataacacaaaacattctaaccaactaaacatccaccagtagggaacattttattttatgatggcatattcatatcatggaagactatgtagttattaaaaataacaagttgtatgtgtatatatgtgtgttcataaatctggaatgatgtctaagagttaccagataaaaacagaaaaatgagctaatttgtttaaaaagtacacttacacatgtacacatctacagctacatacatacatggatacacattaatgttcctggaagtttatgcaagaaaccacgaagtttcttcttttagatttcattttcagtttttctctttatttttgttttattttttctttgagtaggttttactttaatatttaaaaagatattacttttataattaatatattttaaatagtcatgaaatatgattattgtgatcttgtagttattgacttaactatttctaagtgaacttaacatgtaataaatgtttgagtataaaactgcaagcagctcctttgaatgattattgggtttttttttcccttaaagagtggttgaatttaagccactgaaatttatatttcaaaaa

SEQ ID NO: 116489 - DNA, 1018 bp, Homo sapiens
cagcccagctcctaaaaaacattttggttaatagattttgaaacccttaaaatgctaaaagtagaatttcttaggttaactatatgtttttttttcccactttttgtggataggcaaagaatggaaagatactacttttgatctggttgctaatttcgacagtgtatattttagtagaattgaagtaacaaaaataaattgaagtttagactaaattaactcacataaaatattatgtttaaactgtttcggatttcaggttttaaatagtgaaatgaactttctctctgacacatttgtttgtagttagaacagatcctgtctatgtattttcggaagaacattatatgtaaaatgtgttcacaatttgatgaatatttgaaaatataacttagtaaagaaaatcggatgctttcaacatgcagtgctaggtgaaatattttatgtagttatgttgtccctgctatagatcacctaagcctttcctattctggaatattttattgttgtgtaaagatttcgcagggaaagtctatatggaaaaccatgccaaacatgtttgtttgaacaaactttgtggtgatatcccaaacaggagggaggaagtttgtcagtaacattacaatagtaagtcattttgttcttataagtaggaatagtgttttggggataacagcatttcactgtcttgatttttttcttcttaaaaaaatggcaattcatgattccttgaaaagaagcagctgatttctaagcatgcagcacacgtaaaaattttagtttatgtatttaattctccttatttcttaaaaaaatgaatatgaacattattatggtaattttcttcctggtgatttagaaacagatcacttttaaatctggataaagtgattttactactttgactttaccttttcatagtgttttcttcaagggttgctctgtggatggggaggtgttggttgagggaaagatgatggtattttaagatgcaggcagaggaagactaataaacagg

SEQ ID NO: 116490 - DNA, 1063 bp, Homo sapiens
ctccctaagcctcaatttcttcatctataaatcaatataataatagtaccacctaaatgggttgttattgaatgagataatgtttttacaacaggtagcatagcagctagactataggaggcactaaaaaagtagttatttttatttacaatgataatataatactaaatatacaataataatgaagagaaacatattaccaatattttttgtatttttatatttaaattactatcatgtcttgtcccatccaactaatatataattgttaacctctactgaatattttaattttgtgttaaaattgttttttacttctataattctatagtaaccatttaatactttgtaacagccattagttgttttttcatttatgtgtatgcctgatcagaagacatttatttattatttaattttatttaattacaggtagatgccactgagagtgaaccaaagagttttatctttatgagtgaggatgctttgacaaatccacagaaactgatggttttaattcatggtagtggtgttgtcagggcagggcagtgggctagaagacttattataaatgaagatctggacagtggcacacagataccgtttattaaaagagctgtggctgtaagtacaatttcctgggtttttttttttggcattttatagtactgttttattatatgtttttatgtttcttcaaaaagtatatcctaagcataatcttatctttgggttgttattatttattttacttgtatgaaagattattctgcattattttgcagttacaaagaaacacaaagtggcatcttgagcatacaaagatttaaataatgtcttttgagtgaattatttttctaaaatatttttaatcctgtgaaatatgacagggttaatattttctaaaaatatttttaatcctgtgaaatatcaattatcaaactatcaaatatttatcaacattattgaaaataacttctgacaaaaatatcatgactgcttttgtaaacctttgcctacctaatttggtaaagttagaaactaaaggagatctgctactttg

SEQ ID NO: 116491 - DNA, 1020 bp, Homo sapiens
gacattctacctgtatttgaagacctagttgagaaatctcactgaaaccttctaaacctcttctagcccacagatagttttcatgtttccaaaatcattctagactttattgtctatatgaatccccagtggcagatttttagactgttgacatatttcaatctcgattgtttagcttcctgaaaagttgcttaacttcttaatatttatgcttttactcctcaggtaacctctaagcttcttgaggactgggcccatgttcatggcaatagctagagaggtctttatacatattaggccttaaaatattgttagtttgctttagattagagacatgaaggtcaagaagaataacttttgagtagttggggaccattagtagttacataatctgtatgtttgcatcatagtgacatctgaagaaaaaaatctaatgaaaaagataaactgttctgagaaagttattttaaatttttatcagacattctttgttgtactgtttatattattgtcaatatactttgaagtatagcaatattgtttgtttatcttcttagagggacagttaagacacataaaaactggggaaccatttgtttttaactaccgggaagatttacacagatggaaccagaaaagatacgaggctctaggagaggtatgtcacatatactactttaactttgtttttcccaattttaaatattcagaataaaagttttgaagatgcagcagtttatgcactctttctacaaaatgtgattccaaaaaggtttttgttttttttttttgttcctttttagtggttatgttagaagcatattctcagtttaaaagttcctgttcagtggctcacgcctgtaattacagcactctgggaggccgaggcaggtggatcacgaggtcaagagatccagaccagcctggctaacatggtgaaaccctgtctccactaaaaatacaaaaagtagctgggtgtggttgcatgcgcgtgtagtcccagctacttggaaggctgag

SEQ ID NO: 116492 - DNA, 1005 bp, Homo sapiens
tgaaataatttttgctagttagcgtgttttattttaacagttttccccctaaaaatggaataatatgctatattaatactatttacatttataagtttctttattcgtaaatgtttcagttatatataagatttgatgacttttgaaaagtcatattaatgtctgaaacttttaaatgaggttaataaggtacaaattaatagctgtctattttgaagggaagaagttaaatataatggtgtatagaatctgagttgtagttgtttttagaattatgattttcaaggtgcttatgttaatactgtgcttgatcataatatagtattttgggaattcaatttagtagcattatcagttaaagcaacacataaaaattaatagaacaaagaatactttaaattaaattaaattaaaatctttgttacaaactatgaaaatgaatataagtaaatttcatatcatttcttttctagatttattatctaggatagatttggatgaactaatgaaaaaagatgaaccgcctcttgattttcctgataccctggaaggatttgaatatgcttttaatgaaagtaagtgggttatctatctatctatctatctatctatctatctatctatctatagtatatgcaaaatttatttatcagtgctcatagaataataagacagatattatttgctacttttaaaggccaagtagaatgttttctgtattcttttgagaaatagtgacatccttgcatggtgaaattcttcattcaagtgaaagaaccaagtaacaagtaacaattttctgtagttgtcaagttacgtgaactaatggtcatgaatttgattcagcttatgcatttcaaccttgagcgttcaactccctggtatccaatttgaactcctaattaaattatagagaaagatgctactgtttcacatgttatttagaataaagtgtctggcaataattatctgtgacaatgttttaaagtagttttccatgatttt

SEQ ID NO: 116493 - DNA, 1079 bp, Homo sapiens
atgtttggaattatttcagaactttccagaagcctggcatctattgtatagtatataactaccattacaatagaaaccagaattgtgaaagagctcctttctattccctttcagttctgtgattttgtgtttggaatcttcgtttaaacttgctttattagaatatgtttgtatacttagttatctgcaaaaggtaagcactggaggcttacagcttactctgggatccctctgcagtgtgtgtgtgtgtgtgtgtgtgtgtgtgtgtgtgtgtgtgtgtgtgtataaacggttttaaaccaatagttattaaaatatatgagtatttttagtaaaaacaaaaccccttaaccacatcgagagctatgccacaggtttttaaaaagctgtccgaatttatcgatatccagatttcaggtatttatttaaagacaaaatagtacctgcggtcttctagcaaactgagtggataatatttcaaaggaacaaaaataaagacatttaaagttaagcataggcctttaaatatattcttagactaagcgatagtgctagttctttgtcagtccaggcagctttataattttctcactgctgatttgtgtaccaataaaggacacttgaaacaacatctgtttttcagtgaaaggaagtttaactctcatgcagaaaaagcagtattttcagcatttgtcacttaaacaaatagaaatgagtttaacaaaatgtttggttcagacaaagcaccaaataaatgttttatgcttgttttattcttattctaacatcaagtcctccctccagtggctgctgttacagcattttcctttttcaccttattttggaaaaacaaggaaaatcattattttttctcggaattgaagtccatttttacatcatgttgaaggactgagagataaccgtctgtgggaaactttcttttataattaaatgaacccatcctttagcaaccaaagggacagattattctgaattgaattctcagccttcatttttcgtttgcaaggtgcttataactgccccttagcccagcattttaaaaaatttaatttcttata

SEQ ID NO: 116494 - DNA, 1031 bp, Homo sapiens
gcagattaatgtactaattgatagctagtcttttttgttgttgttaatcagcagttagattatttgtgatctagtagagcacggtttcctatatattacttttaaagttgagtcatctgaaattttttaaaaacttgaagaaatgtatcagaaggacctcaatgaagacttttagattatatatcttaaatgactgagcaaacaacacaggtatataaaagtagaaggaaagatgaaatgaaaggttatagaaaaataatatacctgtgttcatgttttaagaagatgcaatacaggttttccccctatatttagaaaagagttcaattgaaaatatttaccttctaataagatttatcacagatttaaagagctgtgtcctttagaacattttaaacaatgaatttacccataacctgctacattgaggtatttgtagggctgtagagttaaaggatgtttcaattaggtataaaaagcaaaggagcatctaatagaacttaaactattagatatatattcatccataattatgtgtgtatatatgttcctactgttttctaggcatggtgaaagcattttggtagacatctttttagttgaaaatagaaaaatctaggacagaatccatatttgaggaactaagtataatatttgaattataagcatttaattaagttttttacttacagaactgaaatggaataacattatagaaatttacagataagatttcaagaaaatgtataacagaaaaatgaaagacacaaaaataagacttggagttatgtgttggcaaggaacataattacaagtagtgacattagagttagtcctagatagtcatgatatatcaggaaccatgctatccaaactttgctgtggcacaggaagatacatcatgatttttaaatgaagaaatttcaagcacaaggatatgtacatagatggtaaagacctaagagcagagggaaatatcatatttagaagttttatcatagctcaccgtagccttgacctctcaggctcaa

SEQ ID NO: 116495 - DNA, 1062 bp, Homo sapiens
ggggaagagagaaatacagaaagcaagtagactacttaggcaaatgagattttcagtaataaaagagaacagacttctattcctcaatctttctttccatcttcacctcatatttatctccaaacaaaaccatatttctacattgtttgtcaatatttgaatttatcaatttgaaaaaaatatttttaactcttcacaactcccacactaagcctaaggccaaatctttgttctgttgaatcccttttctccattcccacccattggccttttctttgccctgatgtgtttctcatgttggtttctcctctggcctatgtgcaacgtacctgccagatggacatttctgcattatgcacacttggtccatcttttatttttactactttcattagcttctgctttcctttagtaatagattcagatttattttccactctgcctttatcttctcttgattgccattttttgagccttcttttccttttccttgaccatcattccatcttgttgtctgatcccctgaacacttgtcacctggcactttctggcaacttccaaagccacccctctgaaactttcacttttcttctcttgtctttaaaaaaacttggctgctgtatttcattaatgaatatgaataggaagcaagttaatgtcactttaatattttgatttagattatcctcatcttgaccaaatgttgcatttcatgtgtataattcaaaatatttcagtgttgtctattttttcttattttgttttgttgtttgtttgttggttgttttttcctcaaaactcaggctaggccctcacatgaacgtagagaaaagagtttgcctgggcaatatgatttgaagggtgtcttaaagctcagtaactggtcacagttactcaagtacttattattctctgcctttcaattgaattgaggcattttaacttctaaaatgctaaaataatttcttaagccactaggagccatgaagacatcagacagggttatatttacaaggagggtaggaagaaatttggtttgattgaggcaagaataaagatggc

SEQ ID NO: 116496 - DNA, 1041 bp, Homo sapiens
aagtaattatctgacatatcctggaagcatgtaatgaagaaatcataaacctagaaacgaccccaagagttctagtctagcaaactacttcctagaaggaactacatctaaagtctcttatagagagtatttatttttatcttaaatatctgaaggaaagacatttctttaactgcccctgttaatctctcccagtactccatatggaaatattgtaattggtgtaaattttttagttgtcacatgtgtccctttttttctttttagaaagaaaatacagcattttttcatttatttgagcattccacaaatttataaaacaactaaattgaacgagataggtaggtaggtaggtagacagatctttaattgtcacagagagatgaatattaacttcttacaagtgaacacaagataaaaatttagagtagtggttcttacctctcttttgaaacaggaactcctttgaagttctaagaagagctctgcctagaaacatgtaacatacgtatctacctccagaacttgccaacactttcaggaggttcatggcccctggaagcctcctaggttgataagcactaatctggcaggaagaagccatccctgaaatattgggtgttcagtacatttcctcatatgttgaagaaggcaaattatcatcaaagctcaaataatatcaaacacgaatttattaataatactttaaaaatcagaagatgaaaattaaactatattgcctatgtaattatactgtaaatctgtgcagcataagagtgctatatttcacctgagaataagcattacatgattttaattttttctagcttttaacaaataaagttgagcagtgaatttacattttctaataaccttgcacagaatattcatatacaagaaaagatagtgattatcctaactgctataggagttagtgatgagatcagcccatagagctcagaaggctattctttgaggaaccccaataccagagatttaataatagagacatgaataggaaagagatgactgcattaaaat

SEQ ID NO: 116497 - DNA, 1104 bp, Homo sapiens
ttatcatcttatctgggaagaagtagaatttgacctgcaatttgaaggaagaaacttcatctagatgggtgaagatttacagggatagttgttagtgtagagcaaaagatgcgagcaaggagccaaagatgaaaaaaaagcatatcgcattttggagaccatgaacaaatcatttgttgaaatagaagaaatcaaggctagaaagatagattggaaccaggtcacagtgggccttatattccacagaaaggactattcccttgatgtcttgggctttgagcacagtgacagggtgaacaacttttctgaaatttgaattataaaaccataacaattgaagaaacatcagagggtgacaggggcataggtactattataggcagccaaaactaaagtgaggggaaaagtagatagttgcagcctgtcaggcacaagggaagaagcaatgtagttagaaaaatacggtactttaaatgaagttttctttttataattctctttcctttcaaaatccacaacctcccgcacctatcttttattttatgaaaaaggaagagttgatctaaagactatcagtggtaaataagggaatgtagagcatctagaagtttgtaaaaaatccacctgagaagatatgggtaacaagatatcatattacattatttatcagaatcttgagggaatgagtagcaagtgttggtgtttgtcagaattgcctgtagaggtgggtatagatacatgaacctaagccctacgcatcatgtacctattccagaatgcctggtaatgacgttcgggtatctctatttgtaatcagctctatagatgatttgaatgatttgaaaatgatgactatcatgtgttctttctatttttctctcttcacttgttattaaggcaattaatcacatggacaattacggaaagaaatgagggctgcaacatccacacttgaggattgatatcagtattgctcggtattgttatcaatcagtattgttaatgatatctttgataatttccctctaatatctctatattttcctcaaaataatcccttaaatattattggggtgaaaatagtttatctaagtaactttacca

SEQ ID NO: 116498 - DNA, 1026 bp, Homo sapiens
accaatattccttccgagcaatcactaccaggaaaagaggtaagtgaaggaaaaagaagtgttttataattcacatataatatcatcatatgcctgtgaatccattatgaatcaagatgtcttgagttttaccctttgctacaaaaaaataatttttcaattttggattgaaaattggcttataagtttttgatgagaattcactttagtggggatgctgtcttcatataaaatctattccatgggaggaatagagagatggaactcaagagatctttgttattatcctgactcagggcctgcacttagaggatgtgggctatagataattgtcgaatagcgagaaaatggagattaaaaaggaaaaggaaacaatcatctcaactggcctcatatttttgatccccatcctgtgattgtttggtcccaaaacctgttaccactctgctctgctctagattgtagagaattacactttccaggcccccttgctttcggattctgggacggtttagccaattaaaggcattgatggaagacctcatggaaggcattgatggagcataggagttgcagagaaatcagagcctttcttctcctctctctgtcttaaggaacatctctgataatggctgtgacacctttatctccaccctgagccctgttcccaccatgcagccttccctgcatgacttcagttctacctggcaggtctgcttgggctttagcttcgactggtagccccaggagctactcttccataacttagtcccttttctaaattcctccagccctaggggtggttgcggcctcctgctccattaatatctggcctgcttcacagtccatgtttgacttctcaaatcttccatcatgcaggtaaccaaaaccctacattaaaattcttccttttgaaaaatcttgagtggtttctgctttttgaatggaccctgactgatacactaggtaaatatttaaagagacaaaacaacacatagttttaacagagttttcgcctttaataat

SEQ ID NO: 116499 - DNA, 1919 bp, Homo sapiens
caacgaacatttatttctcacagtctggaggccgacaagttcaagatcaaggcaccggtagaattaaagtctggtgaaggcttaccttttggcttataaaggcagtcttctctctgtgtcctcatgtggtagaaggggcaagggagttctctgtggtctcttttttaaggacactaatcccattcatgagggctctgctcccatcacctatccctcccaaagccctacctccaaatgccaccaccttggggcttaggattttaacataagaattttggagtgacacaaacattcagtccacaacaggggaaatctgtgtcttttacacttagaactattaaaattctttgtctgaaattacattttctgaatatgaactgatttctctgcacagacatttatacaggagaaactgctagcagctttaagagttaaaccaatcattcctctgcatgccatacttgaaaatgagaaaataatccttagctttgagtaaaatgtttaaaagttattatggatttctagtcagaaattattttgcttctatcatttttaaaattgtatttctattcctctgtttatacatacatttttaaattgcttctagtcttaccaaaacactcataacattgatggttgggctatctaaatggagatctaaaattgcacatgtattgaataaaaagttatttaaaatgatgtagggtaagtaagtatgttgttgtctcaatcaaaaacaaaacctatcaatgtttgctttcacaactccttttcaacactgaagaaagacaggaagcccttgtctattatttagaaaagtataaattacgctatttctagtttagtctcttttgtaacaggacaataagaagtacccaagttagcaggtaagtgcaagtcagagatgagactctaatatggcttttgaaattatgatgccagtgaaataaaaaagactaagtaatatgaagttttgatacttagaattccataacttggtcttactgagctcatctagaataaatggctttatactgtttgtccttcaaggtagaaattaagttaaaattttagtgttagcattttcactggcaaaaggcacaacatagtgtaattattggagtggacaataatctattctgaaaagaagagaaattgcctccaaattttttgatgatcgttgtcagagaaagctatattgttaaattgttttatagtgccctcatacaccttttttcccaaaccgtactgaaatgaattataataatcattgttaacattctttttgtagtgcagtaaaacagtaatccttcagctatctgaagaggatgtacttttaatgggcatttttcttatagtttttcttagtcatgatcacaaaagccctgaagttcccagttatgatgtatggttctagttagtggaggctggaccctgaagagaaataggaaaatgcagcaatcacagcctctttaagatttaatagttaaatgtaatgtagaatcagtatgtaaaaatgtgacaaatctttgcttgaacttatggacaagctattactgcacagatttggttgaagctttacctccagttactttctccaaagagacatatgttgtctttattgagttcaagcagttagtcttaatatcactatttgattaaatatatgcaagttttggaagctttctatgtttatggacaagtgatcctctcaggctttgccttatttctgtgactcagagataacaaaatataaattctaagtcctttctattttttatgaaacctatttgtagggatttgagttacagaaaaatacatactttctttacatttatgaccataactaacaacagggctactaaataggaaatttagtgaaggtcactcagccatgaaccaatgtgagtttgttttta

SEQ ID NO: 116500 - DNA, 1865 bp, Homo sapiens
aatttcagttgaccaaattaatgtgatatatgaattttcaaattgtttaatattttgtcttaaaattttaattttcctccagaagctatatctcattgcagaagagagatgcatctgccaaattcggttatggcaaaatacaaagtcagttaatttaggaacattattattttgctcaaagcaaatagacttttattttaattgttaacacataaattttaaaatgcactttattagtgtacttattttctaaaatttttatattctctgaaaaaaaaatcctgcttacttgtaaagtcttttcaatacgaaagttttatatgtgctaaatatagtttataacagaagaaaagatccatatggttgaaaatgtgtgtaagttgctatggagtctttagggttgatattgaagtgttttctcattcatgagagaaaagtatgtgtgtcctctttaacaccagaatttgaagcattttccacaagtgtaggtgcatagattatttcccaagctcctttatctgaactttgatatgaaacaattattaagtgagcactgtccatatgccaaacactgcgctaatgacaacccattcctattatcccaatttcatgaacacagaaagaaacttagaaagattaacttgccctgatcatgttgtatgaaatcaggattgatacttagaagtcatatgcagatctttctatttctgggacccatgttctcaagcaccatgctattgggccttgtcttacaagtgtagaattaaatgatctgtcacctataaaagaaatttcaaacagcactgttcaagtgggctgtctgcagataaattcagttcagctttattgaccacctaccataagaaaggcatttagcagctaccatgttctgtgctagacacagtaaggggaagaaaactaaatgagtcactactgctactgccatatgagaactgctaaactaactcaacagataagctatgttgttcactaatatttgacccaatgataatgttttgtttattaaggaaatacatctttgagatgaccgacaatggctcgaatgggttgtattatattatctttaatctatgtctgtatctttatgctcacgaaatctttgctattttacctgaaattatagaaaggacaatccttaagtaacaacaacatttattggctcagacattgatgtgcattatctcttttaatccttctaacctaccaaacaaggtagataccattatttattatctccattttacagtgaggaaactaagacatagagatgttaagtaatttgctctaggacatagagtgaagccaggattcaaacttatctgtctgactcagagcccttcctgtattactataatctactgactgaaaaataggatatttttaaatttaaaaacatttctctgaatcctctgtatacttcttcaactttagtggtcattgttttcttcttctccaaactatttaaataatttaaaataaatttaatttatttaaatttaaataatttaaaataaatttaatttatttaaatttaaataatcctaatttaaatgtatatgatttaaatgattataatttctatttagtgactttaagcaggctttgtatgtatactgtagtcttaatgagctaatgtcttacctttccatgcttataccttaatgagctaaggcagtttggacctattcaatctttagttgcttctgattttgtacttaggttgaggattggttgttcttccctgaatgacctgtaaattttccatcattcatctatcatctatctgtctatctatctatctatctgtctaatgtgattacttattaatatgtataagactttac

SEQ ID NO: 116501 - DNA, 1053 bp, Homo sapiens
ctttcatgttatatatttatgtattttatgacgcagtttctaacacaaaggaacttacaaatgaaaatagtgttacttaaatagattaacaagacatttacctaaatttcagagatggttatagttttaaaaattgaaatatttttaaaaaggtaaaccatttccttcacaatggcatttaggctccatcagaataaaacaagtcactgaactctgatgcttttgttctggattgcttatttttatttatgaaccattcatacttaattttttgcctaacctagtcaaaaataaatcatatttaaaagtaaaacagtgattaaaacattgtattttgcattaaaaaatagttattaggtcaaaactcagatgttagtgttaaaaagaaaatacaatatggaacataggatataatttttaaattaaaaatattttattgcccatatattaaaacgaacctagagcagaacgtcttcaagtgaccattgatcttcacaagggaccaaataaggaagtagctctatgtgctgtatactacatttagaatcaagtctatttttcatcaaattcaattatgtttttattatactccagagaataaacataatagtatagggtatatatattttttaaaataaaatactgaataataactgtggttcagaagagtataaatcatttatgcactcatttattgccttctaacagaatagcttttagaaaattgtatgtcatgacgaatcagttatgccacacttacactgcagtagttgaattacccttggcatttttgtattctaacagttctatttatctcccagtagtgtacattgaataagtaatgaacatctgtatggtataggttttcctccatagttttaaaagaaaaaaacaacattagtaattcattttaaaatatgatattttttccttatacttgaatttttaaagtagcagtgaccctgacatctatttatgaattccttctctcttcttaatatcatcaggttttatgagccacagggtctattgcctccccaaagcagtgattca

SEQ ID NO: 116502 - DNA, 1046 bp, Homo sapiens
ccaggatggtctcaatctcctgacctcgtgatccacccgcctcggcctcccaaagtgctgggaatacaggcgtgagccaccgcgcccggccctcagctttcaaacaatacagaagtgcgaaaattaggtcacacctcatgaaatttaaataatgaaacattctacctagctttataataccctagttctccaactgctatatttcattgtgcctgtaaataggaattactatttttggtttagtatcacaacttgaggtgaatttctgcccacccctatccctggccattgtgggggaactgacatgttttattatttattcttgctcctcagaatggattgggatgatgaatattctcataattcttttgacctacattgtttgttaaactcatttcctggagacttggagtttgagcagatcttcagtgacattgatgaaaagattgaacaaaatgctgcaaggtaaatattgttaattatttaaaacaagttgttttcacatttcacttatatgaaatttacctggtctatttgtatcctgctcttagataattttaggttttaattatcattaactttcccccaaaatattgattagacccccctctcacttaaagtttacatgattgtctttatctgagtagtatttttaagactagaaaatagaagcactatcttgaaataggcaattaaagtttattgaattggcactaatgttttcttagagcttgtcaatgttgatgtcctggattttcattaatatggttagagtgtaaggccctgattgcttgagttactaaaaacagaacattaaaataaattatttttgcataatattggtcattttatgattctttctcacttaagtaggaggctagagactttatagagagttgttatgctagattagtcatcacctatcccaaaaagtcgtgttaccaaatactgggggaaacagtgacagctcaatggtttctcattaatacgtgttctttggtagaaaggactctgttttcatatgtagttgtggaccctataatcag

SEQ ID NO: 116503 - DNA, 1104 bp, Homo sapiens
ccttacactctaaccatattaatgaaaatccaggacatcaacattgacaagctctaagaaaacattagtgccaattcaataaactttaattgcctatttcaagatagtgcttctattttctagtcttaaaaatactactcagataaagacaatcatgtaaactttaagtgagaggggggtctaatcaatattttgggggaaagttaatgataattaaaacctaaaattatctaagagcaggatacaaatagaccaggtaaatttcatataagtgaaatgtgaaaacaacttgttttaaataattaacaatatttaccttgcagcattttgttcaatcttttcatcaatgtcactgaagatctgctcaaactccaagtctccaggaaatgagtttaacaaacaatgtaggtcaaaagaattatgagaatattcatcatcccaatccattctgaggagcaagaataaataataaaacatgtcagttcccccacaatggccagggataggggtgggcagaaattcacctcaagttgtgatactaaaccaaaaatagtaattcctatttacaggcacaatgaaatatagcagttggagaactagggtattataaagctaggtagaatgtttcattatttaaatttcatgaggtgtgacctaattttcgcacttctgtattgtttgaaagctgagggccgggcgcggtggctcacgcctgtattcccagcactttgggaggccgaggcgggtggatcacgaggtcaggagattgagaccatcctggctaacatgatgaaacccggtctctactaaatgtacaaaaaactagtcaggcgtgatggtgggcgcctgtagtcccagctacttgggaggctgaggcagaagaatggtgtgaacccagatggagcttgcagtgagccgcgattgcgccactgcactgcagcctgggcgacagagcaagactctgtctcaaaaaaaaaaaaaaaaaaaagaaagctgaacaaaacagcagccctcagagactacttaagcatcctgcagcttctcactatagcgaagaactgtactggaagtgacagagcccacagaccactgtgaacaagggtg

SEQ ID NO: 116504 - DNA, 1234 bp, Homo sapiens
acccaaacattaatcaatttttcaaatatctacttattttcctaatcaccatactaattctagtcaccgccaacaacctatttcaactcttcatcggctgagagggcgtaggaatcatgtctttcctactcatcggttgatggtatgctcgaacagatgccaacacagcagccatcccagcaatcctatacaaccgtattggcgacattggcttcatcctagccctagcatgattcctcctacactccaactcatgagaaccacaagaaatactcctcctaaacactaaccctgactttattccactactaggtttcctcttagcagcagcaggaaaatcagctcaattaggtcttcatccctgactcccctcagccatagaaggccctacccccatctcagccctacttcactcaagccccatagttgtagctggggtctttctactcaaccgcttccaccccttagcagaaaataacccaccaatccaaactctcacactatgcctaggcgccaccaccaccctgttcgcagcagtctgtgctcttacacaaaatgacatcaaaaaaatcgtagccttctctacttcaagccaattaggactcatggtagtcacaatcggcatcaaccaaccatacctagcattcctacacatctgtacccatgctttcttcaaagccatattatttatatgctccggatccattattcataacctcaacaatgaacaagacattcgaaaaataggaggactactcaaaattatacccctcacttcaacctccctcaccattggcagcctggcacttgcaggaatgcccttcctcacgggcttctattccatagacctcatcatcaaaaccgcaaatatatcatacaccaacgcctgagccctatctattactctcatcgccacttccctaacaagcgccaatagcactcgaataattctcctcaccctaacaggccaacctcgtttcccaaccctaaccaacatcaacgaaaacaaccctaccctgctaagccccatcaaacgcctaacaatcggaagcctattcgcaggatttctcatcaccagcaacattttccccacatccatcccccaaatgacaatcccacttcacttaaaactcacagccctaggcatcaccttcctaggacttctgacagccctagacctcaactacttaaccaacaaactcaaaataaaaaacccactgtgtacatttcactt

SEQ ID NO: 116505 - DNA, 1616 bp, Homo sapiens
ggaagttgaataatttatgaaggggaggggccagcattgattcgggaggatcctattggtgcgggggctttatacgattacgggcattgattggtggtagttactggttgaaccttgtttgttggtgtatatattgtaattgagagtgctcggggtaacaggttatgtgattaggaggagggttaggaggagtgggaagaagaaagaggaagtaaagtttgattatgcctttttgagttgaggtgatgatggaggcggaggtttggtactgtgaggttgttttaggtattagtttttctagtcaagttaggtctaataaaagtagggataaattttggcttatgggaaggcttaggtgggggattgtgcggtgaataatacagggatagaatccgagtatgttggaaaagtgaaatgtacacagtgggttttttattttgagtttgttggttaagtagttgaggtctagggctgtcagaagtcctaggaaggtgatgcctagggctgtgagttttaagtgaagtgggattgtcatttgggggatggatgtggggaaaatgttgctggtgatgagaaatcctgcgaataggcttccgattgttaggcgtttgatggggcttagcagggtagggttgttttcgttgatgttggttagggttgggaaacgaggttggcctgttagggtgaggagaattattcgagtgctattggcgcttgttagggaagtggcgatgagagtaatagatagggctcaggcgttggtgtatgatatatttgcggttttgatgatgaggtctatggaatagaagcccgtgaggaagggcattcctgcaagtgccaggctgccaatggtgagggaggttgaagtgaggggtataattttgagtagtcctcctatttttcgaatgtcttgttcattgttgaggttatgaataatggatccggagcatataaataatatggctttgaagaaagcatgggtacagatgtgtaggaatgctaggtatggttggttgatgccgattgtgactaccatgagtcctaattggcttgaagtagagaaggctacgatttttttgatgtcattttgtgtaagagcacagactgctgcgaacagggtggtggtggcgcctaggcatagtgtgagagtttggattggtgggttattttctgctaaggggtggaagcggttgagtagaaagaccccagctacaactatggggcttgagtgaagtagggctgagatgggggtagggccttctatggctgaggggagtcagggatgaagacctaattgagctgattttcctgctgctgctaagaggaaacctagtagtggaataaagtcagggttagtgtttaggaggagtatttcttgtggttctcatgagttggagtgtaggaggaatcatgctagggctaggatgaagccaatgtcgccaatacggttgtataggattgctgggatggctgctgtgttggcatctgttcgagcataccatcaaccgatgagtaggaaagacatgattcctacgccctctcagccgatgaagagttgaaataggttgttggcggtgactagaattagtatggtgattaggaaaataagtagatat

SEQ ID NO: 116506 - DNA, 1025 bp, Homo sapiens
gctgaaatataaaccccaggaacacagaccctcccttcagcgaaaagtgtatgtgtgtatgtttgtgtttaaaggcctatagcagtcagagataggatcactgccgttttagcagtttaaaaaaaaaaaattctactagagaggaaagaatgacacaattttcttcgtcacaggaaagtgggcctggggtatcccagccaccttcgcagacgctaagttatggaaagcagccaaaattctggtatcaggatgaggcgtccccatgggttctatggaaacgagagacgcggggggcctagcgccttccaggcggcgggccgagcggcagagctgcgcaagcagaagcgggggaagtggctcagcccagtactgcagaggggcgctcggtggcagtccccgcagcggcacgggcgaagcgtcgcggggtctgcagctgcagcccaccaactccggcgccgagcgcgaagtcgggagagctggaacgaactgcagctggagaaagcgcgagagccagacaccgctgccgctcaccccagccgcttccttcctagcctcacagccgggaggcagaaacttcggaggtaccgcccggcgaagaaacatccccacagagacagaatacactgtgtcttcctagctgagcccctttaccttcccggtgtctgggatgcttccttcggtggcagcggcggcaggggcgacgactgccgctgcagcactcaactgcttcacgaatccgggctctgggaaacaatttcccgccgcgcgctaggcagccccggaagcgatagtaccatttccgggtggttgtcagtgacgctccggagccgtcgccagggtggtaatacctggtgcagagcttgagtctggccagcgggtcaggctcttgctagatcagcaccggaggtggaagactggtaagtgattttactgggttttctcctgcgcctgatattaatggctggccggggctctgtgcagcattatggccagcccgagaagtgagtgggcgagggtggaaccag

SEQ ID NO: 116507 - DNA, 1043 bp, Homo sapiens
ggctggggtgagcggcagcggtgtctggctctcgcgctttctccagctgcagttcgttccagctctcccgacttcgcgctcggcgccggagttggtgggctgcagctgcagaccccgcgacgcttcgcccgtgccgctgcggggactgccaccgagcgcccctctgcagtactgggctgagccacttcccccgcttctgcttgcgcagctctgccgctcggcccgccgcctggaaggcgctaggccccccgcgtctctcgtttccatagaacccatggggacgcctcatcctgataccagaattttggctgctttccataacttagcgtctgcgaaggtggctgggataccccaggcccactttcctgtgacgaagaaaattgtgtcattctttcctctctagtagaattttttttttttaaactgctaaaacggcagtgatcctatctctgactgctataggcctttaaacacaaacatacacacatacacttttcgctgaagggagggtctgtgttcctggggtttatatttcagctgcctgaaggctggaaacaagactgagtggctattttaagatttcttccacttccaaagcctcagattaaatattgacaaaaaaaaaattggtccgtctcgggtacttcatatcattatttgactcaggagttagatggagcttgattttggaggcgccagcctcttttttgacgaatgactttattaaaaaattttgttgttgttgttgaaatattgggaatgaacatttgaactgaatttacaatgtatgtgtgacagacaatgcaccttgtggactttttggtttatgttattccgttgtgcctcaattcttggaaatacctgtggatgtgcaagatgttctcattattggaaagtttgattacgtatattgcaggtgttcaatacctaagttgctagtatgaggtgaatttatattaaagagtatatttctttattttcttttcttacctttccttccttcctttgctttctttctttctttgacagagccttgctctgtt

SEQ ID NO: 116508 - DNA, 1060 bp, Homo sapiens
ttttggactggcaccaactacaaaggaatttcaggcatcaagaataggcccatgtgggagatattttgggaaactccataccacagagacagttgcttgctatgcataaaggccaactctgtttatagtcattgtctccttagttgtattttattgttcaaggtaagtaactaatttttgttaattatagataagattttaataattactacaaaaggacattttctcataaccaagaatgtcatataattttaatttttttgacagtaaaaataaaacttaactgtcagaagtcatgctctcttttttgctttttttttccctccttttttttggtgttaagatagtatcttctgtatgaatgctccaaggaacaccccctattagttctagaaagatctataatttttctaaaaataaccactggtacaattatattatggtatatttactttccttcttgtgctgcaagacttctagaagttagctcttgatcctccctacctcagacatatcacttacactaaacttgactgtactttaaaggatttttaattgtctgggttattgatatatgttaaaccaattatagtgctctttttggcctcattaacatatcaggtttattgtattcttaatcctgcagggtcagaaagaaccatcaaaccatgaattttataaataaatcaatcagtatatctatacatgtttatatctattcctacatatatagttttcctgtgtaactgcatgaattagatcctgtaatacaggtcattcacttgtcatatcatgtgctgtaaaaaagcattgctaaatgtattataaactgttgtttcaagtagataattttattctagaaaactgttacaaaactgtgctagttattttgggccgtcactgggattcctgattctgttaaagtttagctagtagctcagtttttctgataaatttgtgactagaatgtcctgtattctgatttgtctttaaacatatccatattttatggataatgtttgaatcaggacattctgttttttcacctttgtttcctact

SEQ ID NO: 116509 - DNA, 1050 bp, Homo sapiens
taattttatttttttattttgtaaaatgtatttcttaacatagatcaaggctaatttttttttaagtagttcaaggctaaaattttttgaaagctaactttttaggagtgtttgcaactggttccatattttatggtccagaattactttcttgggagtacgttacctttgaggatagccgcttccttagacttctttcattatcttttggtttattgacatgacttttccttagggaatactttaatattcttggtccctaaaagcctttcctttatcaagaaatggataggtagaaaaactactatgatttcttaaatatctactctgaacaatttataatttaagaaattgcagccgtgttctctgtgatcctcaattgcccaaagaaattagtccctattagaaaagtccattcgtactcctaagaaataattaatttagataatttgactaaagaaactcaaattttctaatacttttataccatttacatttttatttagagttttggaggctggaaaggcaaatgttattttaccaaaaagttcaccaagtggaataactcatgtgattgccagtaatgcaagaattaaagctgagaaagaaaaagataactttaaggctccattttatccaattcagtatctaggggattttcttttagaggtaagtaaaataaatagtaaacattttattttgtttcatgtgttcattttataaaataccaacatagtaaaatatatattaaagttgtgttctaaattttgaaactacattggtagtaatttaaatgacactttttaaaggcagtggctctcaattacttaaatattcatgaatacttcctgtagatttgaaagaagcttactagttaagtttaacattaagtattttaatgtcagtataaataaagtagtagaatatatagtattatatagtattgtatgagaatttgggggttatttttcctttggaaaagagagctatttctaagggtttagaaatactgtcctgtcctattcccctacatcctcctccttacttggt

SEQ ID NO: 116510 - DNA, 1051 bp, Homo sapiens
gaatgcagtttgggttccttggcaagagaaattttgttgtttgagatagagctacattaagataattgttgtttattgctattcaagtaagagtattgtgtaaccttttcctctctatgtggggtatacttgcaagtgagaagtcttaccaggaaaaaactgaaaaataatccaagaagaagtctgtctataattgatgatttgtaaaatctagattgtaactttagcttggacagggactagataaaatatttttgttcttggttattcataaaaatgacttgttagtagatgaacaaagcattaccttttcttgagatatacagaaatcactttattattcaggacctttactatcatgattttttccctgaaagatttttatcagtgtttaacatcctttgatttaagagggtgcattttacctacttgtttgactaacaaagtattatagttaaagttgagtaccataaaacgtacataatattgaaaatacacttagatgattgcctaaaccatttttacatacatacagaaagaaattcagaatgatgaagattcccaaaccaattctgtttggactgaacatagcaatgaagaaacaaacaaagatttcaggaaagatgcaggatttcttgaaatgaaaggtgccttaagagagaccatgtatagaacccaggtaaactttataggctgaaaaacatacatttctgatgtttcttatagaattgtttaagaggcaaagtatggtggaaaaaatagattttggaatcagaaggctggtgtttgaaccatgtgtttatagtctgtgacttgaacatgttaggaaattgtcctatgtctctgggaactcttgttgaagtaatgtttgtatgcatatagaaatacacagagttccttatacatagtgcgttctcaacacatggtaattacttatgtaattaccatgtttaggtaacttacttatgtttaggtaacatcgtgtgtcttataaagcatttttcttacctgagagcacaatatataattcatgtaaattcaagtatttata

SEQ ID NO: 116511 - DNA, 1431 bp, Homo sapiens
ttaaaataatttagttttgaataaacatggcaaaagaataaaatagaaattttgtaagataaatggaaatcattaaaatacatctacagtcatgtacacataatgatgttttggtcaacaacggaccccatatatgatagtatcttatagtcccataagataataataccatatttttactgtatcctttctatgtttagatacactaatactcagcattgtgttgcagttgcctatagcatttaatactgtaacatgtcataaagatttgtaacttaggagcgatagaccataccatatagactaggtgtgtagtagactataccatctaggtttgtgtaggtagactctgatgttcgcacaatgacgaaatcaactaacgatgtacttctcaaaacatatccccatcgttaagcagtgcatgactgtatatatgtcttcttgagttctttttaggactcaaattatgtatgtaaaattcaagtagaaatatccttttttaaaaatagctattttggtataatgattaaacaacatgatttgtaatactcattaatcggaattcagcacataggtaaactaaagcatatatgttaacgtactataaagctttgtgaactgaaaacaattatgttctgctttatcttacataattcagagggttctttactctatttaaccttgtatgtatattttacaaaatctatgttcctggatgggtttttcttttgtgacttgtgttgattgtgttaaggctatatttaatccacagtcttaactaaattatgtttacaaacacgcagaaagaaatgcaaaatcatgaagatgttaatgttggttctattttgattcaacatcacaaaaaagaaaaattcagtggttccagtaaagatttgaaatttgttaaaatgagaaatacctttggaagccatacatatgaaaatcaggtacaactttccaaattaaaaataatttatttttaatatatatagtgtttatagaacagttttctttagcttttaaaaaatatataaaaatgagttatgtatccaatagctagattaagaaatagagcattaccagtttttaagacctgctgtattattttcttttttcttttttttttttgagatggagtcttgctctgttaccaggctggaatgcactggcacaatcttagctcactgcaacctctgcctcctgggttcaagcaattctcctgcctcagcctcccaagtagctgggactacaggcacacaccaccacgcctggctaatttttgtaattttttcagtagagactgggtttcaccatgttggccaggatggtcttgatctcttgaccttgtaatctgcccacctccgcctcccaaagtacttggattacaggcgtgagccactgcgcccagcctgctatatcattttctaatgc

SEQ ID NO: 116512 - DNA, 1045 bp, Homo sapiens
atgagattttctgttgtacgtacttctttatttttatttctattttttgagatggagtttcactctagttgctcaggctggagtgcaatggcgcaatctcagctcgccacaacctccgccttccaggttcaagcgattcacctgcctcagcctcccaagtagctgggattacaggcatgtgccaccacgcctggctaattttgtatttttagtggaaatgggatttctccatgttggtcaggctggtctctaactcccgacctcaggtgatccgcccgccttggcctcccaaagtgcagagattacaggcatgagccaccgcgcccggccgtacttctttattttttaatgtgtatgaaagtatgaaagtcactcttgagtttatttggattttgtaacatatgtcattgatgttgagatttaattgtggtctaaatacatgtagaaggaaattaagaaaaaagatgaagatattcagaggagttatactttgaggagaaaacgcaagaaaggaaaagaaagcaattgcaagaaaggcgttgaacatgaaaaaataaaaagtaccttaagaaggcacatatataatagagatcaggtaaagtttgtaagctaagctatagctttcttttttattttttggctgttctctgatataatctagatatataatgctacatgttttaagaaaaaatcttgagtcaatctggtgtaatattcatagttaatattccagttaactttggttcacagtaaatgtacttgtacatgcatatacaaagaaatctgagttaataatcaaggtattcagtgaattttgttttgcctgaatgtgatgaataagaaaaagaaactggaaaagactatttcttaaaatgaaaaaatctttaaaactacatgtgtgtatagttgggtaatactttctaatgtaaattttattttgctcttttgtatagtacagaccatttttaatgagatgtcttgtttttaaaattgaatgcttcttgggtaaattttttctggagtatgactttttttttttttaacg

SEQ ID NO: 116513 - DNA, 1033 bp, Homo sapiens
gaaagtaatcttgggtaagaaagaggaggattctggcgagtattataaattgagaggttagctggtcatttaaatcaaaaggacttaatgaaatctataatctttgttctcatcagtgaaataaagagcacaaagggagagtacctgctagtcattaaatattataataacttgaaaaattgagaaattagatctatttattaagaattaagtactcatgagatatttgacattgtttaatttttgaaggaagaaatatattcataaaattttgttgaactttctattttaagaaaattttattaaaattccagcagtattctagaaggagaaatattttgttcacaaatgacttagtgaattgcttgtatgttatagatttttgggttcatgtttttcaggtcttgccttttcaatgaaagcttttgtcatcaaatttcagaaaatattggctccaaggtgctccacctgacgctactcaaatttttctttaatttaattgaaagtgaagtacaacatctgagtcaaaagtaagttctaatcgcaagaataacacttttctaaattttggttgtttttatgcaccattttttttttacaattattataaatatatttctaaaaagtcaccttattttctattttaagatagatttgtttttaaaacatatttccagatattctcagtgggagtaaaggtttatatgcccttttaaaaaatttcctcagttcacttccactgttcatttggatggataatagtgttttcattttttaggattttaaaaaaattctttagtaattgaatgctaagtaaaaaactacaccaattttaaacactgagcctacaatggtaagttttgctcctgctctaaaacttgcagatagattactgtgtatatatacattgtcagtgactttattgaactggggccattttttatattttgtcctttattataattgttataatctttatattttatgatctatgttcaaaaattgctagcattttttttgacaggagagatgt

SEQ ID NO: 116514 - DNA, 1447 bp, Homo sapiens
taacaaaaatgcttatgtagtttctcgtcaaatacttcctcagatccattttctcttctctacgttttaaattaccattaaacttacgttataccttttcttcatattctttgtgtttttcaccttgtatctccctccctttctctctctctccctctttctctccctctaccatttcccctgtcctcctctttctccctcttcccccgccccatatagattttttttttctgtacttgccacattctggatagtattttcgtccagtttttagttcattagttctttcttcagctatgtccagtatattgttaaacatgaccattgcatttaaattttttgtgttttttccagttaaaagactttttaactgttccaaaccactatgacttgtttttatgagtttcaaggttttcttttgtctttaacatggcaatgacatttattatctatgcttgattattccatatctgaagtctttatgggtctgtttctgttgttgtttttgctgtttccttctcttgtgcttttttattttctcttgcaagcttattattcactatatgcttttaaattgcatttgagaagttatttgtagaaacaatacgtgataaagaccagagtatcttcccccagaaagaatttctgttgaacttctgccaagtgcctgggtgtaccactagttaaggactattctaatccaatgtctatgtttgggggactctgggtagttcaaatgaagtaaagggctacatatacatttagttttgcttctgattcactcttaccatgaggatgaagcccttcactttttcatcctatgagcaattagcttttggccatgactttttttttttttaatcttttcttcccttgtgctccagaaaccacagttctgtattctagattcttccttaaaatcagtgaaagtcctcagggcgaagtcaggtatctgagtagctcccttgagtacctcactagattttggcctagcacttcctcataatttgttctcttttttttctgaaatgttttgcttattttatttaacatttttagttttagttttcttctctaagtgggttcaattgaggccgggtgcagtggttcctgcctgtaatcccagcactttgatatgctgaagtggaaggattgcttgcggccaggagctcaagaccagtctgagcaacatagtgagacccccatctctaccaaaaaaacaaaacaaaaccaaaaataaaacagatgtagtggtgtgcacatgtattagttttaactacttgagaggctgccctgggaggattgcttgagcccagaagttggaggctgcagtgagctatgattgcgccgcagcattccagcctgggtgacagagtgagaccttgtctcttaaaaaaaaaaaaaaaaaaaaaaaattcatctgaattacctaggccttcattagaaa

SEQ ID NO: 116515 - DNA, 1082 bp, Homo sapiens
ttcttactaatctatttctaaagcttatatatccactaatactggaaggaatagcatcgttgatgtattgttaaagtggcagtgagtatagtccatagcacactgtcttggccctattattgttatgagtgtgctagttaagattatggtataaaaggatctaagaacctgagttgaaagtgtcttttcatataaaaacttactattatggctatgtagtagtgtgcatgtttagctaatgacatgaaaagaacaacaactttggcaggatcttttttatcatagtaaaaaagctatagttattcctcgaaatcactgcaagacctcttctgtttaataacattaatatcaaggtaaatttaatattaagcaatatattaatattctattgtgattttaactgtatgtaccacatatttatataaggaaggagggaaagtcccaactggttgattttttttttttttttttttttaaatgttgtttttggttgttggaaagctggattgtgtttttatataaggcttcactttgtgggctaacatccttctttcctgcccagagtcttaaagcctgggtggtctaaagtgatcttgatttactatacccttgagatggagaatactttcagaaatcaaaatttaccaacctcttgcttctttcctgagtactgtcactgctgatattcagatacatattatgttggaaggaacattttgtggatgcatatgtgcatatggacataatcagtttactagtttaaatatatattttcactgttctgttttatattctcttgataacagtgagaagtaaggattaactaacttgctcagagtgatcaagcaagatactggctttacagagaatggagttgatttcctgcagtgttttctggagactagcactagaccctagtcctgccgatcacaccaggggaggtgttggtgctactgatgtggtcagacctgctgctggtttcccatgccatatagccgcaactgcaaggcttaaactcagctgtcctatcaaggcaggagactgggtgggattgacagccacctgtgaagactcacctgcta

SEQ ID NO: 116516 - DNA, 1043 bp, Homo sapiens
atattaatatctatctttagatattaatatctttagatattagtcaaattctgttttgcaacaatcctttaaggatgtttttattccttattttgttttctgttgaagaaagacttgttttctgttcaaggcattatcagaatggaaattacaaaataccagttgtatgtaaatcatacatataaaatgtgcaaatgaatcatacctgttgggcataagactaatcaaaagagctttcctaaatgaggatcaaaattgaattagaaaaaaataattatttttaagaaggtgtttttctggttgttcacatggtattgactttgacacaaaactagttttcttaatattttattatgttcaaccaagatagagtggcaaccatagtgatgcaaccaagaaaatataaccaaatgtaatagtgaaatgaatcaaataatttctctttactgctgtttttgtagttgagaaaataatgcaatattatttttcaacaggtatattcctatttaccagccttggggaaaactggtgtgcttgggtctggaaagattcaggtgtcaaagaaaataggacagcggccttgttttgactctcagagaaccttactaatgctgaatggtactaaacaaaaacaagtcgaagggctgccagagttactgtaagtgatgctgatatcccagctgtgctttgttttggagtacagctctttctctgatgcatttcttgaacttaatggttatctgtgatactgtctgaattatactgattagatcaaaactcaattttagatctatttgatcaacattttctgtttctgtaattcaaggtacatgctttctaagtgcttcccaaaagaaataaaactgctcatcaaattattgatgaattattgatgaaatacagttccacacaatttttgccctatgatttgaatgactactttgccataatatagatgggatttcagaatgcatggtcatatgagatatcctgtatcattatagtagtttccccaaaatgagaaacctctaaaagtataaggt

SEQ ID NO: 116517 - DNA, 1822 bp, Homo sapiens
agaggaagagaattgagatatagtagagaaaaacttcaaaagctttttatgcatgtaaaaaaatgtttttgtagaagttagagataatctgtaaaactgaacactgtaaaaatgtgctacttagtattttatagtaagaacaaattagattcagtatttcattttgtttcctaagcagtcatttatagtaatttttttaaaattccccttaaataatcacttatatcttattaatcttggttgtaacagtgatggatatagacaattttagccagaaggcattaattgcgtctctcctagaaaaaaccttgtcatttctatttgttactcttgttcagctttaaatggtactagggattttttttttttttacatccgtgtgtgtgtctgtgtgtgtgtgtgtgtgtggtgtgtttatattaagattcctccatttctccctctctctgctgttgtagccaagccagacagcctattgagaagcagcaaaccatctgttaatggatttgaagttctgaattatacttgagtgtgtagaggcactcatgcttagccagaaacattcatttgaattaagctataaatgctgtataaaaaagagccatacatttaatgtaggttcatgaataaatttaagagagggcaattgcactctaaacttttattgctgcaaaacccagtatttttggtgttctctgatcatttgggggttttatagcaggattgaagctttaaaccttgaactaggggagacaatgcctgtgttaaaccttttacagtagaatttcattgctgaattgctgatagaacagaagcagtatggattggtgggggtccttccccttcccaccccccacccccgcctttttaaatgcaggggatgtttaaaccagtcaaaagaagaactcaataaataaatttctggcatggggccagatctcctagttcatgccctttgattattttttttagttgatatcttgtcttctctggaataatctattaattttttatggcaggagaaacagccctgcatagagcttgcataaataaccaagtggagaaattgattcttcttctctctttgccaggaatagacatcaatgttaaaggtaagttttaaatctttgtggtctagtccaatgtcttaatatttgtgatattaaacagttttatatcacattaagaaaaattatttaagtaaatttacctaaggtatcttaaaagtataagaaaaatttcttagcaaagccaagaaatttctcatatattgatttataactaatggtataaaaacattttttggtgtccatattttgataatacccaacattaatattttaaaattgtttttattttaattttttaaggtagaaatatgattacaccctagacatttttatcacagcattctttttgtatatgaagcacctagaaagtcacactgatgagaaaagtagaacatcagtacttttctaccaaaagtcctacttctgctgttttaaaacttgccttgatttctaatttagacaatgctggctggacgcctttgcatgaagcctgtaactatggcaacacagtgtgtgtccaggaaattttgcaacgttgtccagaggtagatctgctcactcaagtggacggggtgactcctttgcatgatgcactgtcaaacggacatgtagaaattggcaagctgctactacagcatgggggtgagtgtgtttatgctaaatgggttttgataaattatccagttttttgatgaatcctgcagaggtagatagcattttatgtttaaaatctgtaaggaaagatgccttta

SEQ ID NO: 116518 - DNA, 1035 bp, Homo sapiens
agaaggggaaagaaataaatagttaaaattttaactatacatattctgttttcagcctgtgaatgtagtagtttctaaaagcaatgaagatttccctgaatatcacttttgtgcctcaagctagttcttattcctctgttaatgtcattggttgctcacccctccagaggtattttcatataagagtcagagtttcaggaaaaaggtcttatttgtttaaaccaaatctgtttttctccaagtgacatatagtttttaagaatatgcacacaatccctcatcaatctctgaaccaccaaaaaaaaaaaaaaaaggagtgctgattatacgtgggaaagattattttcttttgtatttaatacagtgaatgtgtagtcagcattaccattgaactaaacatctgaaatttgatacagtgaaacaaattagtcatctgttaatggttactatccactagatacatctgaggttgtagaatatcaggcttatagacatttgagtacacattgtcagcacagaacataaaagtctcacataaggtataattgaaagttatttcaaacagttatctcatcaataaactttctgtagtaacatcatgttcatggaacattatgtttttagcaacaaacagtgatggtatgcagacagaagcatgtcattttaaacatgatacattaaataaagcatgttgaggtcaaagcctttctgtagaaagggaatttaattgacattcaagcatagtatataaacagatcaaaatagttctattataagaaatagtatttaacaacttatctctaaaataaaaatactttaaaaatcagcttcaatgagattacatttattgttaaagaatcttcctttagagtgaaatatacatttcttttagcttttctatagtttttccagtataacccccacttttaccccatccaagtttattattaataaagtagtgcaaagcattgtctgctgcaatttcaactgagtgtagtcccctaccaagtcagggaagtaagacattctcaacca

SEQ ID NO: 116519 - DNA, 1037 bp, Homo sapiens
tcacaatagtgtttcaacttatatctagttatctggtttcattgtgaaatttatttttctcctcctcaaatatattgcataattctatattgcaagagagaaatttaaaatattttattctttctgaatgctttgatgagagacttgtgtgattttttttcagtcttgttaccaaattgaaggtaaagatcacagatgagattttaaatcttctctgaaagtagcctatttgagggacctaacagcggccccctgctgccctcctccctcctagcactttgtatctctcttatgcatgtctagtcactcctgaccacagacctatcaaacctcaaggccttagggcacaacccatttgttattcactggggcctttcacagagtcgtttctcaacacatttttattaaaggcataaagcagcaaaccattaatttgaagttccccctttttagaactcctcctcattagtaaaatgaaagaacttgcaggtggtaaattccttttcagttcaccctgaagttttactaatggaataagtaaaattaaacctctgatagttaaacagaaagcagagcctttaaaagaagggccagttaagtttgggacatgattcctggccagataattcattattttgatatgacggtgggaggggtatattgtgagggttgaatttccaggcagcaaattctacttatatgccaggaacatctggcagattgagaccctcatgtcctcccaaggcacctccaaggtatctctatacaggaccaaatttggtagaatttacacatgaatttttctgagatctagaagacaaaagaaaaaaaattacttgggactttctctaggaaagaaactcttctgagtcctggtaattccctcagaattatgactcaaggcagatggctgcaccacagcacctattccatgtccttccctttgagaaattagatgagcctttcaaattaatcctctttgatgttagctcagcttgacactgctgccattagcctcttcaaaataaaagcagtca

SEQ ID NO: 116520 - DNA, 1026 bp, Homo sapiens
tattgttttccctaatggctgtaccaatttattgtcccacatacagtgcacgagggttcccttttctctacatcctcaccaacacctgttatcatttgagtttttatatatctgttggctatttgtatatcttcttggaaaaacatctattcaggtcctttgcccattttttttatcaggttatttgtgtttttggctattgagttgttgagttccttatatgtttttggatactagttccccatcagatatatggtttgcaaatattttctcccatttcataggttctttcattttgctgattgtttcctttgctgtgcagaaactttttaatttgatgtaatctcacttgtttacttttgttgcctgtgcttttggtgttatatccaaaaagtcattgtcaaaactaatgtcaaggggcttttctcctatgttttctaagagcaggtgttgataataggaaggaaacaacaggaaatttaagggcagtaggacccttaactattcaagactgtttaaatggtgtttgtacttaaagtaaaaactacctgagcatattttaacatatgcctcaagtctgtagcgtggatctggattgcagattctccagtgctcaatcatcctatatttgtgggaagagaagtctgacatttcccaaaggattaagtaatattgtttgatatggaataaagtgccatgtatattgagcttctttaggaggatagttttatttatctttttggatttctgtcaaaataaatgcaaggggagggaggcccagtgctccactggttccttgaacagaggtgaatttactgtgaaacaatggctcttaagcttcaggggctcctgcttgcgtgagctctagccatgtatttacaagatcattgtcatatttacagaagtaagacattttaaacataattgatgaatgccattgattaagaccactgcctcttttcactcccacttcccttgatgtcgggtggtgctgaagtggctgtggacaaagagaagttgagttgg

SEQ ID NO: 116521 - DNA, 1865 bp, Homo sapiens
gctgtaatggctattgggtttgctttgatggccaggacttttggaggaaacatccttcactggacagtagcatcagcatcttgtgcacctccagtcaatgcccataatgttgcttcagctgttagcctccttctccagagacaattgaaagaaatgcttttaaaatagaggaatagttccacattatagtttgttgcaggagaaatctatattttgtacttccctctgcttttgtccattgctagaattattgcaagccaaggtatttcttctcatacatagtaaaagaatcttttttaagctcaagtatttttagatactaatctgaatcagagttgtatgccagtgcaccatggaacttgtctttcttttcccataaagataaaaagctctgtttacttgtattaataccatttatcaagtacagtgcctgttatgtatcagacactagtattagatggtttacatatatttagagaaacagtgtagcataatgtttaagaacaagttctctgttcttgtgagttcaaatccttgctctatcttttactggcaatatgaccttacataagttatctaacctctctgtgcctcggtaataggcatctggtagattaaatgcattaatctatggaaagtactttgagctatctctaatatctgatgatagctcaataaatgttttttctaatgcctcagtagcctacaagataggtattgttatccccattttaagataaggaaattgagattctgaaattaaggaatatatccaaagtcacactgctaatgaatggtggcactgggtttaaactctggcttgttaggccacaagacccttcaagacttctcagcatagaagtttgggttatttttctcttttctcagtgcatcttttgagactgttgaggaagacctggtttatgacgtagtgctgagttcatcaatgatttctgatttgtaaacatcacatttgtatttgtaaatatcttctgaaaggaagtagcaaaactctacaaaagaacagagagttatggaaatttagtctatggagtcacatttttataactgtatatcaagggaacgatttgacataatattaaacccttaacacaagtgtgtgtaactctaatctgaagagggaaatgcctaattaggtagaggccaaaacagcctaatgtttttcctggcaaccatccttcctctctcaaggagggctccccaccctctctgcattggagaagatgcagcatgtttattttatggcatggaaggagactcaagaaagcatttgtaactattcttcactgtgttgcataatataccttgtcaagtttacactgtaggttggggtcctctttgataaatggaaaactaatggtgggtcttgaagtaatactagtagaacttcaagttgattactgacaccgtctgccagcaggaactcccaaggaacactgaaaccttcaaatgattacactccctctcctactttactgctgcacgtctccccatactcgcccaggactcttctgctgttctttcagtgttaggtgtcttcagtgttaggttgttcttggtctctacttctcactgtagtcttcatgtccccaacccctatcccacctaaccaaggcaatgccttcctccccagtaattccagtaaccatttctctgctggtgacttccaaagctaaatccccagttcagatctttctctcatgctccaggcccagctctctcactaaccactggacatctccatttggatgtcccatagatgcctcaaaatcaattagtttaaaacatctcattatcccctctctgctgtattatttccctcctttcccacccaaatttgcttc

SEQ ID NO: 116522 - DNA, 1036 bp, Homo sapiens
agccaggtgtggtggtgggcgcctgtaatcccagctgcttggaaggctgaggtgggagaatctctcaaacccaggaggtggaggttgcagtgagccaccaagatcagacgattacactccagcctgggtgacagagagagattccgtccaaaaaaaaaaaaaaaaaaagcaatcagaatgttggcatctatactaatttgaatgaattgtgcatctctctgatgttagcttcgtttaaacaatttatatctgcaaaagtgactgaaagattgcacagagtcacttttcctagtatagtttgatgttgccttttcaagactgccgcccttggattacttggcttcaatgaatcaaaatatagatattgttaataaacaaaatactgacgttcctgtatgtgatttcccataggtgctggtaaacaatgccaaaactcatggagatacaagagcattggaactgaatcagagattgtcctcacaataacattggattattttatagtaaggaagcaaagaaaaagctgtaagaatgaagcaatgaatcaagacttctacccaaagcaacatttttttaaactatatttattccttttctaaaggaatctagagaagttgaagtttttaagttaggaatgcaattttctgttaactccaaacctgattttaatctgaaaaaaaaaaaatttaatttgggaaaaccagaatgaaaggaaaaccattattgccttggttgcttaacattatttgtaaaccattattttctgcatcttgcatggtgcacaatagaatatcttttactgtaatcccttacaataaagccttaatagccattttctatgtaatatgcaaaagtagattagcacaatgcacaattttcttttgttaaaaatcaaattcaaagatttaattcttgctatgaattctaaagttcggcaaaccaattcatcataaaatccaaataatcttgtaacctatttatctagtgattcatctccaattctgttgaaaaagcataatataaatgttgatgagac

SEQ ID NO: 116523 - DNA, 1048 bp, Homo sapiens
acaaaaatgtgtatagtgaacatttcagtcattctcatttcaattcaacattctctaagagggatttctagtaacttatgacctaacaagctattttctgataccaatttacgtatatgaatctgaaagttttacatgctggtagggaaaatttgtcaagatacatgtttaagtgggagtgagggcaaactgcagagcaggatgtatgatataattctaatggagtgttcatatatgtggtatgaatttttaagaatgtatatctctaaatataccatgtgtgtttgtgcatatgcttaaagcatgaagatgtaattatatggaaacatatataagaaatataatggcagttatttggagaaggggactgggggttttaaaggatagtagaggagaatttttcattttatatcttttgatagtgtttggatttttttgtcgttccttattattttgtaattaaaagttaaattgttattcttttggttttacatggttagaagaaattatcctagacagccctaaagtaactcttgtttttaccatagtaatccatgagaatgttagttactcactttaactaggcatttgacaatgaaatgtagaattaggcctttttttttgctttggtgccattactgtagagcacatttaagagattcttatgtcagggactatttctgttcatttttgcttccttgctctgtcagtctgccttgtgcatagggggttctctataaatggttttgagtgaatggacaaataataataatgtggccaactaattgtagttcactattttattttgtttgccccatatttgtatataacaaaggtctttatgaccttggtaactggtgagccacagaagctgcacatagtacctataacatgcccttcaatatgtgaactggagaagtagacactcttttagcataacttattactttttacttttcagtattatttattgatttttgttgatgctgggaaattaaatctgacctggaatagaacaaattaataatagttttaacaatagcaaact

SEQ ID NO: 116524 - DNA, 1039 bp, Homo sapiens
gggacaagaggaaaattttgataatgctgaatatgttcattatcatggttgtggtgatggttcactgatatacatgtcaaatatcatcagattgtatagtttgaaaatgtgcagcttattttacatcaattatatcatagtaaatctttacatgttttcagcaaattattttatttttctttagaagtcacaattatatgaggctttgagttatttagccacaaatactcctgccatgaaacttttcagaaacctgccacttgtcaggatagtctatggtacatgtggcacatgtaactttgaaaaactgtgtatggatgataagcccaacggtaattttttagcaaccagttactcctctaagaacacattataaattgcagaagaaagtaacattgacattttttgtttacagttaaagacgaaaaattctttgaaaattacaaccagtcccttgaaaagtggtctctctcacaagctgtcactggtctaatagacacaggaagaatatctgaagctgaaactctctgcacaaaggtattttatggaatgtgcattgaaactcatggattcttatcttactgggaaaataacttcaaaaatggaatgtatgaggctagatgcggtggctcactcctgtattcctggcactttgggagactgagatgggaggatcacttgaggccacgagtttgagacgagcctaggcaacatagcgagaggctgtctctacaaaaaattaaaaaattaaccggtcctggtgacacatgcctgtagttcctgctactcgagaggctgaggcaggagaattgcttgagcccaggaatttgacgttgcagtgagccatgatcacaccactacactccagcctgggcaacagaatgagatcctgtctggaaaaaaaaaaaaaaaaaaaaaaagaggaatgcatgttgtttaaagagcaggtagtggtggtgatgacaattatgatgataacaactaaaatttattgattactgtacttgccacaaaccagtcactgcatttagcattttgt

SEQ ID NO: 116525 - DNA, 1026 bp, Homo sapiens
tttaaagttatagatttcaaattgacctaatgaaaacactgtgatgctacatgtatttttcttatttttagtattgagttgattattgaagcaatgatgagcttcacggtgccttgaactttatttattttactagagtatgtaagttttaaaaatactatgtattttcatatagtaagccatgttagtttatctttgtgatctctctcagtctttatattttatattgttagaaaatgtgtacatttcgttggtaaaattatataacttttgaaccttcaaatgaatattttgaaagtagagttggtcacagtagaaaagatttcctttcacaagattattagtcttttcaaacaacaataataaattgatacttttaagaagtttaggagttgtgaatgtggtaaaactgaacctttccagtgatttagtggaaaggtcttatcaatcttaattttttctttttcatgaaagtttctgcatttgtataaatcatcaatattttctgttctagggaggtgttgtagcaggaaatgtggctcatattctggactcaaatcatggaaaggttagtttgtcctagtacaaaggaaatgttgaatttattaaataatattgatgaaggaataatagttttcatagtcttagggattatgtcatatcaaatagagtcttttagtcagtttgaaagagagggagctatcaggaaaattggctaacatcttttctcttatttagaaggcattactgtacactgcggtaaatcagttggctatgggaagcagttcagcagaagatgaaaaaaatactgcactaaagaccattcagaaggcagctctcctttctccaggtgcatataatatctatttcattaattccaattctttttttttctaaatacatattttgtaagtgggggaaaaatcttgcacacaatatatattttattggcattgtttataccagacaaaaatgtgtgtaatttagatcttctacaacaggagtttgggtgattaaagtactttg

SEQ ID NO: 116526 - DNA, 2100 bp, Homo sapiens
acaaagatcattttgaatattatgtttctgtaaaatcttcatatttggtttgtcacttgtttatgagtgttctttcctcccccaaattcagatttttgtactgccaaataggaatcaggatactttgttactagtctgagtctgttacctactgatttttttttctttttttaccttagcatatcacttttctggattttaattttctcacctgaaaaagaaggggattagactgagtggcctcgaagttcttgcctggttgagaaattataatgaattagtaagcagtcagttgcttatcagaaaattattaatcagggtttagagatcttttgttgtattttagactcttgggcctaattctagttaattggtgaagcaagcagagctagaaaggcaaactcctgttcccattcactgtggtagcatttgggagcagtggcgttactgtgctagcctctgtgtcagccattgaacccagggagtccaagaatttgcattctaactgctcccaagtgatgattatgaggctggtccaagggacctcacttcgcgtagtactgctctagctcagtagatcttagatgattatcagaatcactttttaatttttattttaaaagtatttttggttttaaaaataatttattttagcaggtaactggaagatttagttaaaataataacaatagaagtgaaaaacttaggttaactttgcttttaagctcagctagtaaacctttggttcttctagacagtttcattttgtattattattgttactgtcttttaaacacattaagagtctgtttttttccttttataggctcttattgctgaggcagttggaagttatgacaccatggatctcttcaggcacactacagaactaaatatgcatgtaagaatctgaacattcttcttgaggattcattaatgagaaaagtgttatccttgttaagggaatgaatagatattgggctaggcatagtggcttatgcctgtaatcccagtgatttgggatgccaaggcaggaggattgcttgaggccagcctggacaatatagcaagaccctgtctcttaaaaaaaaaaattaaaaattagccaggtatgatggtgtatacctgtagtcctagctactcaggaggctgaggcaggaggattgagtcctggagtttcaggatacagtgagctatgatcatgccattgcactccagcctgggcaacagagcaagattctgtctctaagaaaaggaaaaagaaaatgaatagatagtggtattagatgttaatgacatcagttgtttttattctttattctttcttagaaacagattagttttctcgaattaaagaactaccatttttcttttttctacaactttcaagagctggtgaagaaatgatgtttagatttaatagatatagtagcagtcatatattaatagaatagaaactgagactctaggaaaaagatagacatgagataaggagtaggcatggtagacatttctagattatttatgaaaatgttgtagaattcatttttttttttggtctgacctttggcaatggtgctgaggaagggaaagccagcccatcaggcaaggctctgttttctgcattttatcccgtttgattcttctcgttaggattggagcaaataatttcaatatgttcttcgctgtgttttatcatagtgacccttcatttaaaggtacttttaacaattgacttaaagaacactgagatgtgatatttattgtattgaagtgcattgttttacttcttattataatttttattgacacatttattatcctatgtctgcttaacgttggcttttttaaagactgaaggagcattaggttatgcgtattgggtctgcacaacattgcaagataaaagcaacagagaaacagagctgtaccagtacaacatcctccagatgaatgctattccagcagcacaagttattttgaataaatatgtaggtaaggtacctgttatataatagcaagatatttgagcaactattgaaataatttaaataatttttaaaattaattcatgtcaaattaaatattggtattctttaa

SEQ ID NO: 116527 - DNA, 1076 bp, Homo sapiens
ttaatttaaataaaacaatgtcttaataagctatggatgtggttttattgtagcatgggatagtttttgcccatgagcttactttttaaaaataggaaaaataagactgtttcctgccatacatagattgttgagaaaatagtataaagcagtatgtaataaaaagttattttttgtagcagaaaaaaaagcatccaagttaatgtgtccaaattagatatttttgaagtttcctgattgcttaatgcagaattatgttgttgatcactccttctctggtagcaggtatacacatgtctaggacttcattggttaggacttcattggttgtgagttcttatcctcccagttaagctaaaaggggaatagatagccttatttaatcattgccttcaaacctatggctatctaatggatggatgattggttggttaaaagttctgcagatgacaaggtagaacccttttttgctagggttcagaactcctaacctggggagaaatctgttgcacccaggagtgttccagaactgtgtagttaaaacactgctttaagcattgctaattatgcttaaacagtgaaattttatgttcatacatatttatgatgagaggtttgacttattttatgctttttaaacataagcggtttaataagtttataaaatgacttgctgtaatattttttgcctttttttcctagcaagctcatgaggctttcaaaatggctcaatcccttgatccatcttatttaatgtgctggattggacaagtaagaaatataacatatagttactaataagcttgttgatatcaataactgactaatatgcataacagtgataataatggtaacggatagcatttgagggcttactttgtgccagtcactgtgcttagctctttgtatacactatttcagttaatctatcaatcatcaattctttgagatatggttgatgttatactctctttatagttgtggaaatagaaactcagagctcctaagtgtcattcctaaggccacgtagcttgtaaggatttaactctgacttggggggcctttgaacacttacc

SEQ ID NO: 116528 - DNA, 1042 bp, Homo sapiens
gcaccatctaaagtgaatgttcatgttttaggagtccttctaggtcagaaagaaggaaaacaagtattaaagaaaaatgagctcctccaccttggaggaaggtaatttgcaaagattgccagttaataacatttgaattgaattaaggcattgtaacaaaaaacattcacttttatattcccgtaggtgttatggtcgtgcattaaaactgatgtctacatctaatacatggtgtgaccttggaattaattattatcgccaagcacaacatctagcagaaacaggcagcaacatgaatgatcttaaggagttgctggagaaatctttacatgtatggtataaataaattttttataaaccttttcaaaaacataatgcttttctcgaagttgttttggatgaagtaaatagtgttttcacataaaaccacatatatcttgatatacatgctgctattccaagaaataaaaattaatctaatttaacttcttttcagtgtctgaaaaaagcagtgagactcgacagtaataatcacttatactggaatgctcttggtgtggttgcatgttacagtggtgagaattgagtaacacttcaatatttttagaagattgtgtatttcaaacaaagttcagtttcatcaggttttgtatttttcaggtattggaaattatgcccttgctcagcactgtttcatcaaatcaatccagtcagaacaaattgtgagtattctatgtgtctatgaaaaagaacttcaaaatttagtattactaattttctgagactttcaactagacaaggggcctattttaagaaaaaaaatgttatgttttttagaatgctgttgcatggaccaacttgggagtgttatacctcacaaatgaaaacattgaggtaaatatgttgcctgtctgtcatatttaaaacaaagaatgttttctatattattgtctcctcaatagctcagcttcttgtggagaaatgtttttgcacatcgttatctagccagtatgctctccagtatgctagttaattgatgata

SEQ ID NO: 116529 - DNA, 1087 bp, Homo sapiens
taattttgtaaaactctttcctcaagagaaggagaactcacatttaagaaatctttactaggaactttaggtaatcactatttcatttaattcttatagtatagcttgctatacagattttaatataaaaagatcatatcttgtttcacaatagttaataagtagtaatatcatggagagtaacatatagataatatccacattttttgtagccaaagttttagcaggtaagtaacttgcccaaagtcaaggaaattcttgggttctgtagataacttttttataacttctagtgcatgtttactccaacagaattcttccatttgaatttcttattgagtgaatgtaggatcatgctttaagataattttataacacaccgttaagttttattttctggaaagtgctttaaaataacaccaataactttatttgaagttcattttaagtgtttattttatatgttttaataacagtgacaaacttacctgattttaggtttgggtgaatgccatcttatgatggcaaaagcagctctagttgattatcttgatggaaaagccgtagactacatagaaaaagcactggaatattttacttggttcgtattattcttattatttattgtttatttttgtaatattaaaatgaagccaaatttagaagatcattttatgtattctgctagatatagcaattgctcagaatgtcaaacataaagaataacagacaagccaattctataacatacatgttgtattaattttgcacttggggaaacagatataatttcttctgctcttagtagtggctggcatcctagatgcataggaaagaataggaaggaaggagcagtctgctagtggaacagcagctctgacaccatgtgttagtgttctctttcagtaggcctggaaatgagtatctttaattggaaccgattgggaaatagggcttcaggtgctcaatatgctgtacattcagtggtaagagccaattgtaggattattagtaggtcttgaaggtaaggggaaatgacaatctgattgctcctgaggagaaactgtgaaggaaaaaagtgatgtgt

SEQ ID NO: 116530 - DNA, 1034 bp, Homo sapiens
ttaggaccatgcttttctgtgttcgttcgttaattaaagcaaacattgctgtggttgtgttgaaggagatttatagcagttctttacaattattttctagatttctgatgcagataatatcccaggacttttggttctcaaaagcttggcctatcggaacaaaggttcatttgatgaagctgcaaaggttggcttttttattcaaactgagcattttttgagttaaaagcatttttatttggctatagaattgacaggtgtctactttatagattatggaagaccttctctcttcttaccctgacctagctgaagttcatgcccttgaggctttgattcatttcaccaaaaaggactatctacaagcagaaaaatggtaaggatatataaattgctcatagaaccatttacatcttagttctttatatttctgaaaaattcaaaatgagtaggcttgatgaagatttgatttttcatgaatttgatctttgtaggctttaagttttagtattttaaagaaatgtatttagcatgtagtacagtagctataaaaaattatatgatgggtttcaaatctaattagctgatcttggccgggcgtggtggctcacacctgtaatctcagtactttgggaggccaaggcaggtgatctcttgagcgcaggaattcaagaccagcctgggcaacacgatgaaaccccatctctactaaaaatacaaaaagtagctgggcgtggtggcacatgcctgtagtccctgcttctcaggaggctgaggcacgagaattgcttgaacctggggggtggaggttgcagtgagccaggaccattccactgtactccagcctggatgacagagcaagactcggactcaaaaaataaaaaaaaaaatctaatcagctgatcataatgttcactaagcagatgtaatgttcagtatagtctgaacacttagcacatggtagtgctaaaaggccactgtgcttttttaagatcctcttcttcaaaaacaaatcacttttttccttatgataa

SEQ ID NO: 116531 - DNA, 1056 bp, Homo sapiens
ccttaatttcttatatttgttacaggtgctttggttgtgggctaacctttattgtttagcaaatatagatagccattgtcgttttttaggatattcagttttattatatgttgtgtgaagatagaggttttaaattcagatatgttctgttttaaattcaggtctttccataaggaagtcagggaagaatttatatttagctttgagttattcttcatgtatattgttttggaaatttatgcttattgtatctgcaatttattatatgtcatccttaaaaaagaaaaaataaacagaagtgatatggctgtcttcatttggatacccttaattttgtcagctctgaagatcgtagataatcttggtgcgtctggtaacagtctttatcagaggaatctttgtcttcatttgaaagcagaggctttgattaaactctcagattatgactcttcagaggaagcaattcgtacgcttgatcaggtagacttgtcaagtttttttcttcaactctagttagtttccaatcaaccaggcaacaaccattctctgcctaccacaaaatttacttatatggattttgtgttagaggtatgaattcaccacatctgcacttttataagtcattcatacatttgggaacttctaaagttatttgtttgctttttgattaaggacttatagtactcatcatataagactatttcgttagttctagacttcattctcgtttcttccttttgccctcttaggttattactacttgattattattaatttgagattccaaattttttccttcaggaagtgttctgcagatttgacaagaataattaaggacactgttagcttcatggtagagaatgtttatttgtttcattcaaagaaagattcatatttcataatgaaaccgatttcttagtgttttgagttaaagcaatttgaaagtccatagtgaaaaaaactataactggtaaattatgaattatagcattatgccctaaagatttttgtcaggtaaagactattactggtctaaattaaaattgagtttttaaa

SEQ ID NO: 116532 - DNA, 1034 bp, Homo sapiens
tatttaaattaaatgttaatattttctgcatttgctggtctatttaaattttgaatttctggagtcagcatgtggtgaagaatgcataagaatataaaggcagattttgagatttaagaatatgggtttgggcatttagaaactcgatatatgtatactaataacctttccttttaattccaggaaatcttactgatgaggggcagcagtattgttgtagattagtggaaatggattcaaaaagtggtccaggcctcattggcttaggcattaaagcattacaagacaaaaagtatgaagatgctgttaggaacctaacagaaggtaaatgtacagtgtatggcatgtaacgtgaagtataattattattcagtcagtaggcatttatctttgagcctttctttaaggaatgtctatctaaggtggaagggaaaaaatgtacctgcataccttggactctgcttaggtttgaactctgactctgcttatcactaatttcaagacctcagaagagttaaacttactgtgtgtcagtgttttcatttgtaaaataggtatatctatatagaaagagagaaaaaagaaaagaaagaaagcaaagcaaaaagtaaattgggagggagagggagggagggagggagggaggaaggcagacatgtagatatatatgcattaggaacttaggctttaacttagtcttactaggtatgatgtttctggaagaacctacattcaaattatagatctgaatggtaaatacaagccaggtaggtggttgaagggaatgggaagaacattttaggcagagatgaatctgtgaaatagcctgagctaagaggaaaactgttgttcagagaactgcaggtagttcaccagggtttgagaatgaagtgtatgtacaggaggggacaagaagtgagattgtagaagggcctagcaagacttggtaaggagtttgcacagtatcctgacaacagtggggaatcagtaaaagatttttagcaggggaattttataatctgatttgtcttttt

SEQ ID NO: 116533 - DNA, 1971 bp, Homo sapiens
catgctcttgtatcttcatgtactttgtttgggaggaagagagaactgatgacaactagcttgctgggagttgggtaacctgtagctgtggaagtcttgtgtccagggctggtattccaccagttaacaagaggttggctgtattggtttttccaccagcctctttccttttggtcagtatctgtgctgaatagatttttttttttaataacctgaatttcatgccctactctcttgaggtgaacaaattcacagaagtcagtcactgaaatagaaatattagtacgtacaccagtgtggtagtgattgtcaattattgtggagctttactaatccatttaatttttttcactttgttgctaaatgagtatatacatgagaatgctttgtatgtgaatgaccctcacatgtgtcatagtgaaaaaagggttgaaaactactgctaaagataactgtgaaggaaaattccttggtagaaaatgaccattgcacctatctcagttctcctcattttaactctcctttaaagtcctcttttacttttttttttttcctggtgtctgaattaaaaaatgctgttactggccgggcgcggtggctcacacctgtaatcccagcactttgggaggccgaggcaggcggatcacgaggtcaggagatcgagaccatcctggctaacacggtgaaaccgcgtctctactaaaaatacaaaaaattagccgggcgcggtggcgggcgcctgtaatcccagctactcaggaggctgaggcaggagaatcgcgtgaacccgggaggcggaggttgcagtgagccgagatagcgccactgcactccggcctgggcgaaagagcgagactcctcaaaaaaaaaaaaaaaaaaaaaaaattgctgttaccttcagctctggttttggtagaagcagatgccctttgccttactttaactgagtcaaagatagacttaggagagtactttttactaccataagaagaaagagaacataaaaagtatagtgagtggagtataaagtcttaaactaacatggtgtgcaggacagattgtatagaaggtggactagctccagtacactaggtgacagtaggtttgaatgaacgaggagtatgatagtgaagatagaaaggaacagatgaatgaaaaaatgaaagtgatttcttagacggagagacaaaaatcaattttaactttcacctctcctgaaaagttggcccaatatggcatgatgatttgtatgaaatgtaggttattgagaggagatgttaatggggcagttaatgagaaatgcccatcagtggtttgcagatgagagatcaatactaagcgtagacatatggtttggaagtcatttgcatgtaggtgaaaatgacgtggaatggttaccatcagaggaggactaaagggaaaaatactgagaactgtactttgggcagtgctggctggcttggagggaaagagatgaaaaagagaaagggagtaagtgaaggaagagaagggatgaggtcagagaagaaggtggactctgacgagaagcaacacaagacgacagggaaagagcatttcagaagtgagattattatggtctgtcttgacagattgagccaactgagtttatgattgtgaggctttttattaaggctatctttttaaatgaaagtgattgaattagagcttagattacagtgatggggaaagaataggaaaaagcaggtatacaaaggaaagtggactaagtgcattagggagtagtaggatgagaaagtgaagcccgcagaggggatagtaagcttttagaggggtgggagaagaactgcaatagctgcctggcaggagtggtgtaagaagaaatagttagtaggtgagatagttaacattatgagagtgttgcactgaggctgaggaggatgaggtacatcaagcacaaggagcatacttaggaagtcttgtgattttttt

SEQ ID NO: 116534 - DNA, 1676 bp, Homo sapiens
actggtactagagaagcttttgggagctggcaggctctgattggtgagtgacgatggtaggtaaaactagacttagagtcatggcagctactggggaaaactggtcttagggttacagcaggccctctcagcagccgggcttttggaaaatttaaatcttggagcaggtgctatgaggcctgagtgccttttccccctggtgctccctttactctgacttaggtgacaagaatgacccaatttgtgtaatcagtgtgttcacagatagaatggagcttgtactgcatattagggacagattattaggagtgttgtgtggaaacactcaagtctaataatatgactcgcttaactcatggaaatgttcttattttctctggaataatgtaaaaccttaagaggctaatttcattttggctactggttttgtttttctttccctagaacatacttgctaactgcttcaagctgttttattttacctttagcaagtagctgttatttctgaaagcaattatctctacatataatttttattccagttggcaggtgttgtttaaacatcattgccactatttattttgaacatatttggtataatcgcactggggtgaatctactttcctagtcttaatcttgagaaaaatccatgtgtctaatatggggaaactatcatggtgaaggaaaatatgagagttggattaagtgaaatgagatggagaacagctttgtgaatttgaccagtagcagtatggagacaggcaggatgattgagtagttattgttctttttatacccagtattctcaaagagcatggggaggcatttggtggaggtgtcagtatccctcgggcagctttaaaagaaaccacctgttatttcaaagccattatggtcactcctacagtccaactccttcccctgaggaaactgaaaccagataggttaaatggcattctgaagtttgccctgttaagtggtagatatagatttcctgactcatgctagactttctgttattgttagttcatttgcttcgaaaatttactaacctactcttttaattttttttaaatcagacagtgttaaagcaagagaaaaataactataatgcctgggtttttattggcgttgctgcagctgaactagaacaacctgatcaggcccagagtgcctataaaaaagctgctgaattagagccagaccaattactagcttggcaggtatgtagaaattttttttttctgtattatggaaatggatttttttttgcatttttcaaaatacaggtttcaacattaaactaagcatttaaacctacatttgccccatgtaagaaaaaatttaaatttattggttttctaaacctaaaagttagtttagaaaaaaagtggtgcaaaggatgttgtttaacactatttaatatcctacctaatggattatttctaatgtgagcactcaaatataaatctctaccttagttatatgtgcatataaaagacttctccacaatattattctttatgcttacctgaggaaaaagaaatgttttttaatgtttcctaaaaataaaataatataaaaatgttaatgtttctatctttgagtgcaagttaaattcttttttcttacttagtggccttaatgtttttacttagattctccaactttttcac

SEQ ID NO: 116535 - DNA, 1641 bp, Homo sapiens
tctttttatggctgaaattagtatacaacccttttgcattatccattgcttccattcaagtttaaacattgtttttctttagaaaaagtacaggtaataaacctacagtaatccttattgtgaagaaagttaatatcttgatttatgtttcacagaaactagcattaaaacaatgctttcttaaactttcatatcacagtcactgaaattatttgtgttagtgttttatctgtgacttgggcttattctactggatctagctttgtatagagtgggagagttggattgagattggtatgtgttttgagtcctgatcaacaagatcatttgtattttagccaaaatatatagagaatgaatgtaaataaaatataactcaatttcaacacttattaattgatcatctataatttaagatactaggtcctggggatgcggcagtgaaaaaaaaaattcttgcctgcatggaacttagcttcttgtggggttgggacccagaaaataaacaggataaataagtagaatatatagtatattaaatgtgacaaatgctttcaagaaaaataaagcaatggaaggggttccggaaataatgggttgttgagagtagggggatggcaagattaaaatgttaaatagcatgtcaaaggaaggtttcattgaggaagtgacatttgagtacagatctgaagaggttaaggaataaactgtgtatattctagagggaagactgttccagagagaaggagtcttttccttttccagggtcccttttcagatggctaagtttgttggaacatttacgattgggtaggtattactgtagatttactcaggctttctgccttgacagaatgtccagcaaggaagtgaagactgctctaaaaagtgctagagatgcaatcagaaacaaagaatacaaagaagctttgaaacactgtaaggtaaccagtatttttttcttccacaatgaaagtatgttacccatttataaacattgttgatttgtaatatgtgaattatttcctgtccaaacagcaaaagtggtaaggccatttagtagaaccattagaatggttggacttttaacctctagttagcaggataaactacctctgccaaacttaactttctctgtattggtaacttaacaaaaccaagttcttaaaacctgaatatcccataaatatcttttgatggttgtatcgtggaatgctactgtatcttaaagttttcattgtttaatggcatgttagtgttctatttctatttggtttgtggatgagaggaccaagattataaagcttatttttatgctgatgggtatgattccattcagagggagaaattggactcgggggagagacagagggtagtggtaggagtgaagtcatcagtaggtgagagacacactgggatccagagcttgagggagccctttaatccttcttccatcttagcaggagagaagataggtgcccatccatacagtgttgggcttatagatttggtgttgggaaaagctttcttctctaatggcttctattttcttggcaaagtataagatgagactgggagaagacttggttattggttaggaggtttgagatagcagaaggtatgaaatagtttctttctttg

SEQ ID NO: 116536 - DNA, 1039 bp, Homo sapiens
atattgtggaagaatattaaagacatctccctctcttgcaagagagctagatgtttctttgacgtgttagaaatccttacaatgaagggaaatatccaaaatagaggagtatggggttacgtggaatcattttgggtagtaggtttttaccctcggaaggaaaatgggtttaagtggtacctagtagatggttggatctcaataagggtttgtttagaaaattggtgaatggacgtttccctttcccctcaaaaataaaaataaaaattaaaaaaaaaggaagtagtagtttttagggttgaaaaggggcagattattttgtctttttacaaattaaacttctgaaacttacgtacatatatgtgtgtatgcatgagtgagagaggacctcagtgctagcgtattgtgttaaatgttgcatcaaatgaagaaggaattggaagagaatagagggttccattgtagcatgaagaattgtaattacatatggagacatacagatactgaaggacatttaatattagaattgattaccaagagaaaaatggtgtttgtttctatatagtggtctttaaaaacaacctacttaaaaattactaatggcttcctatttgctgctgtatttaacttcacacttgtctgtttgactttcaggatctgtaatctgaggctctatttacctacccaacctaattttcttctgtttaataagtcccttctgatccattcagcctggctttctcactgtttcctatacttgccacaactcattcccacttctgtcactttgctaatgcatttgcctctgagtagagcaattttccttcttcactccatttttaagtcttgtcatcttctattaatagaagccattaataacatcacaccacacacctttccttctctaaattcctattgcacttccactcattacccttagtttagcatttgattattgaatgacttatatgtcttaagtctttctcttgatttagattatattctttatatattttttatatcgtgcacagcaaatagc

SEQ ID NO: 116537 - DNA, 1067 bp, Homo sapiens
ctgagttaatccaaggagtggcaactaattaggttgtattaaaagcctgcttgttgtaatagtttctcagccatattttctcatgtaatactctctgattgaaaagaaagtactttggttcctaaacatagaatataaatctgtgtcctattccttctctcaaaatctgagttctaccacacatactgctggtgttataaacccgtaaaattccacctctgcaacaatactaatagtcacatatagtaagagttagctatgatttaagcaaaatgagacgccagtgtcagattgttttgatggtgtgatgaatacaaaacttcctattttagggtttcccatctgttagaattaattagaatctgttagatgtaattctgctgaaattatggtttttttatttttatcaaaatatattgaatatctacaaagaaaaatgaatttttattatagctatttaaatttatttacctgcattcagaagtcagggtataaaatttttctattttagcttatatatgggtggttagtcattttgtatgaattgcaatttctcttaagtggagtattatgttttagtataaaatattttttatttgtgagttggtatctggatttttaaaacacttttctcaattgatagatcacttcagagatacctatttcaacagaaacttaaaaagcaagcttcctagaaatgcccaggactgctttctcaccaattatgtcagctacatatacttaagagcttgattgagaaaaatcaagcagtcagataaaataaagatttagagaaagtgaattaattgagaaagtgaattaactgaattatttaatttataaatgagtaataaagaaaatatctctggtttataatggatatgaaattcgtatcactattagcttagatagctcagattatagttaaaattgttcttttaataaagaaaagatagagctggaaacaatttaaaacctgaaacttcagcaacacatgaagtatacatggtaggtagatttttgaaactataaatgtttagtgataaaaggaaattatagtagctttg

SEQ ID NO: 116538 - DNA, 1014 bp, Homo sapiens
tactgtcccattattccctatccaagaagatgctaaatcaaacttgtacactatctgtcctgcttccagcccttcttcaaaggtgggatttccataatcctcagccaactttatgagcatgatctggtgattgcttagagatttgggagaaaaagtagcagagaagaagagttctgactgctcttatcacttcctgttgcacagaaactgtgggtcagaggtgataccaatctttttatcatctgagacatgtaaagtgctcatatccaactgatctttcttttctcattcaaggcactaaggggaagattttttcccctattctctggtagaaacctagaaaacaagccggcatgatctccagataagcagctttgagcaagagttcccatgggtattatattttcttcttcctctagtcagctgaagagcaagcagtagacagaccactgtcaactttagacttaacttgagaacagtaggtaatattcagatgttaagaagcatagtgacaaactcttatagggtagagtggttataaacttaatgtgatagaataaaacatgaactgaaagttttaatcggtttatcatgatttctattgtaggtgaaattattttggcccttcatcaattagatcttcttcagaaaactattgtcatatactcctcagaccatggagagctggccatggaacatcgacagttttataaaatgagcatgtacgaggctagtgcacatgttccgcttttgatgatgggaccaggaattaaagccggcctacaagtatcaaatgtggtttctcttgtggatatttaccctaccatgcttggtaagtaatgtagttctgtaaatatttatttgtaataatgctggagaatgcaactgaagttgtcagtgagtcagtctttcagttagtagtcagaggtcctgctgacttgtttataaccctgagcaactcattcaactgtgagtcaaatctgtactctgaagaatgaagagattgtttttcat

SEQ ID NO: 116539 - DNA, 1099 bp, Homo sapiens
agtggaagtatcaaaagaattgaagcaaatactgtaacagttatgttcctttaaataatagagaatataaaatattgtaataatatgtatcataaaatagttgtatgtgagcatttgatggtgctcgatgagttacttgtatttgatgggattgtttggatgtatttaatgggagtatttggagtatttaacgggatgtaaaccctggatgtacctgattttgttactgttttattttaataggtaatatatatacagggtaaaagcttcaaatggtacaaaagggttaacagtgatcgtgaagtctctgtcctttccctcttccctgccatccagttccccctccaagaagcaagtaccgaaaccacctgcttacgcatttttagagattggccacaaatttataaacaaatgtatatattcctttccccctacacaaacggtaacatactgcacacattgttctgcatgttgcttctttttccttttttttttcacttaacagtagatatctagaggtgaaattactgagtcaagactatatttagcaaaattacactagatactacaaattacctctaaagaaggtatactaactgataatctcaccatcaatgcatgtcttcttatcctttgccaacctaacagataaaaatgttctatttttatttttctttttatgagtaacgtagagcatattttcatgtatttaacagccactggaatctgctttaccatggcctttcctatttctattctttgcctatttttctgttggttgttggtctttgttttgtattacaggtgtgctttagatattagctttttgtaagagatcctgcaaatatcttctttccagtttgtcattgtcatttgtcttttgactttgttctggtattttttgatatgtagaaatttttattttcatgtaagcaaatttatgaatctttgtacaccataagtatatacaattatgatttgtcaattaaaaatattagtacaaaatttacagatctttgcttttgtggcttttgggattttgtatcatatttagaatggccttctccacttgtcatttttttttttgagacggagtctc

SEQ ID NO: 116540 - DNA, 1027 bp, Homo sapiens
ctgtgaaatgctacagtattactatatttgaagaaggtgtggatgatgaaatatcttcctaaagttagaatatttatttgaagttgacaactgatttgtaattttgttaaatatttgtagacaagtgtgtgtttaatatcttgagcattccacagcaaactttttttaaaaaaatatttttagagacagggtctcactctgttgcccaggctggagtacagtggtatgatcatagctcactgaagcctcaaactcctgggctcaagtgatcctcctccctcagcctcccaggcagccaaccctacaggcaagtaccaacccacctgggtaattttttaaaaacatttttatgtagagctgggtctcagtatgttgcctaggctggtcttgaattcttggcaattgattttcccacccaggcctcccaaagtgctgggattacaggtgtgagccactggcctgagtcattattttgattcaagggcaggatcaaacctataatccttaagcctgttcctaaaaataatattgagatatttcttagtcttgatttttttcccaccttttaatttctatatttggccaaaaggatattaaagagtggaataggagacaaactttagaaatacagggaaaagagagtagtaatggttatattctgaatataagctcttacttggatactaatcagtatttgatttctaggagggtggatgtatagggagtaagtgaacttacaaagagaaaagggtacagggtaggcacaactctttatagaacaaccaaagtttcaggacagtttcctaagaacctcgagttttcttcatgtattatttattgtttagtacacagacgtgaccagcattggaatttatgtggcctcattgcctgcctttttttttccaggttaccacctatttgcaattcaaggagaatataagacagagaagaaagctgtgaatgaatttcatttgattagcaatagattggacactctactgatcttgcctctctacaacctctcttc

SEQ ID NO: 116541 - DNA, 1066 bp, Homo sapiens
ccctggaactgatttacaaggggtgggagaatttgattttcttcataattctagaaatctttggagtattttctctttggcatagtttgagaagagatgtgttgttgttgccttgaagttgaaatgaggtagctgtgtttcccttccctagttctcttctatagatccttagccttaccctggatccttgccttatatacttggcacttttaaaacaaatgtgctgcagattcattagatgtagcacattatttagtgtgtctttctctctctttcccatccgtttttttggtgtggtacattattatttcatttcacgtttctatatcttttactgtttattaaaaatattccacaaaaagcagtgaggtagtttaatagatttacagttttctttgcagggtttgaagctctgatttggattacaaattaagtatttatagtcttcacatcctcaatcccacagagttaaggatgcccagacccattttttcataacattttcccttaaaggtcctccccttccccggatacctctccagtaactctggaattttgaactatttggaattcaaaaagcagctacttttgatttattctctcagagttaaatggctgcttaatattggccccacttttgtttagttttttatctcatttgtcttccttgttatacttacgcactctgttatacttggatactttgaacttgaacgctgtaacagatgcagttggaactgaatgagctgtgtggtttgggatttggcagtttgagagttctgctgggaagctttcccatttttctgcactgtgtcccacttcccttctgcccccttgcaccctctaccaagttcaaccctttgcctttgttgtttatagtccatattttgccttttttttttttttttggttcttttacctcccttcaaaaatactgtacacatcccagttttgatagggtattcatgacaaaaaattctgcagttcttgttactctgagtgtacttgtgggaaatgagtggctgggagggtatggggaactgggggaggcactgatgagaagaag

SEQ ID NO: 116542 - DNA, 1370 bp, Homo sapiens
aagtcagcaattgtattattttgacatatgagaggtattaggctgatgctgagccctagaaaactctttttgatgatctgaaggtctacctgattgggaaggatagattgttcacatgaagatgtgggcttgggagcaggatttttaggtagataacaatgagtgagctggaaacactgacagtgctgcctaaaagaaaggattgcttattccatggctgatagattcattgggttcaggctgcttcagccattgctgctgtgcatattattgtcagatatcttagggccaactcaggattcagtttgatttggtggtattttacagatcttcttagtggtatttcctagtaaagctatttttaaaattttatttttacacattattctaaaaacttttaaattgaggtattgcgaagtaaaggacataaggtttactgatcttagagtgcagctaaatgcatttttacctatgtatacagccacgcaacccacatacatcaaggtatagaacatttgcagcacttgagaaggctccctcatgctcttcccagttaataacgctcctcctcagaggtaactgctattctgacttctaacaacacagattagttttacctatttctgaacttcatacaaatgaaattatatggtatgtagtagtgccttaggttaggctaatttcagttagcataatacttttgagatttgtccatgttgtgtttatctgtagtttgttctttttattactatatattagtccattgtatgaatatgccataatttatttatccattcttcttttgaggatgcttaggtcgttacccaggagcgggattgttgggtcagagggcaggtatatatatagcattagtagatacaagtaaggcaggcatgacctacccgtgaccccatatcccctctacttccctatctttctttttatttctggtcatgattcataaaagagttatctgcacttcctgagtccatttcctattcattcttcagtccgctacagtctgactttgactttcacaagtgcaccaagtttgttctccctcagggtctccagttgctgtggtctgaatttgttccccaaagttcatgtgatggcacagtgttgggcagtgagactttaggaggtaattagggcaagaggactctgccctcgtaaatggattgatgctattatctttaaagtgggttaattatcatgggagtgggctcctgataaaaggatgagtttggcccccttctgccctctgtcttgtgagctctcttgtacttctgccttccaccatgggacgatgcagcaggaaggtctcaccagatgctagcaccttgatattggacatctcagcctccaga

SEQ ID NO: 116543 - DNA, 1054 bp, Homo sapiens
caaatctcacgttgaattgtcataatccccatgtgtcatgggagggacctggtgggaggtggttgaatcatgggagcgggtttttcctgtgctattctcatgatagtgagtaagtctcatgagatctgatggttttataaaagggcagttctggtcatgctctcttgcctgctgccatgtaagatgtaactttgctcctcctccaccttccatcatgatcatgaggcctccccagccatgtggaactatgagtccattaaacttccttttctttataaattacccagtctcaggtatgtctttgttagcagcatgagaacagactaatacaaccactttatgatattttctatagagatgagaatgataatcagtggaatctgattatcagttatcacacactcaactatacatggaagtgactataaaccacaaatagttcattaagcctaaggttaaattccctttggcaacatcccccaaatgcccacagttactccagagctgcctgatacaagatgaagtgatttggagtggaaagagacaatagtcttgactaaatatcttagtttgcaaattttacaaaagaatatgaccatgtgaagatatattgctcaggttcttcctggggcttggaaaggatccacaagaaaagagtcttgaagcttgagcttcatcagctttatggtaaattggcctctggtgtgctattcctggtttgtctctttctgaaataaattctctcagaatagttatcctagaatacaagtcagatcatggcgctcaatgctttgaattctttgagaactttcttctttgcctcttattttgcaaaatttcaaacctaagaaagttgacaagaataagacattgaaccctagattttataaacacacacacacacacttttttttggctgaactatttgagagtgaattgtaaacattatgagatttctttattcctaattactttagcatgtatcatctaagaacaaggccgttatcttattaagcctaatacaatcatcaatcaagaaatctaacatactatt

SEQ ID NO: 116544 - DNA, 2477 bp, Homo sapiens
gctgtgttgcctaggctggtctgaactcgggcctaagcaatcctcctgccacaggctcccaagtagctaggattataggcatgcatgaccacatctgccttctaatctcttttaatctggagcagtacgcccagtgggtttggggggagggaccgtgtctgtcataatatgaacatttttaatgagcccaggccctttagtttgcataattccttcatttatgataaatgtgcttgcaaaatagtgatgtttctatcgttcttcctatacttattggttgatattcttctgtaaatggagctttcctttttctctgctcccaaatttttctcttagaattattatgattcatggatttctattttaaattcagtattttgtgatctgttctgattattcttttggatgctcacattgctccatatttgcttgcagggagtcatttcaagctacctctaatcagtttttagccccttccttattttctggcacaagatattccaggctcagactttgcctatcccagtcctagaatcagccatttcttcaggaactctggttccttctagggggcaatgatatttagaaaccaaggtctgggctctaggatgctcatgactttaggtgtctttacttctgcgccctttaattggctagagctagggattatactttttatttaaattatgggcactgatgcccttatttcaatctggtattcgtatctcatttcaataactttttcttgtaaaatctttacctgaaatacaagatccttcatgaggtagcctctgactgtttctataatcttgcagggcacaatcccctgccttatgtatcagtcacactgaactacttgaaaaacttaatgtctttctttaggtctaggaaagtcttaactgtgtgacttcagatatcaccatccatccattttctctattctcttcttttgggacttttgttagactgatgttggaacttctggatctcttctctgattattttatctttcttttatatttcttattgctttatttctttgtgttgcattatgggagagttccttggccttttcttctggttcacacattagttctgctgggtctgttctgctattctgccttattaaattttttatttcaaaagcttttcataccagatctctaatggctgttttcataagttcttgttccaatcttaaggatgcaaacttttatttaaaaaaactctcagaccaggcgcagtggctcatgcctgtaatcccagcacttcgggaggccgaggcgggcggatcatgaggtcaggagatcaagaccatcctggctaacacagtgaaaccctgtctctactaaaagtacaaaaattagccaggcatgctggcgggcgcctgtagtcccagctactcgggaggctgaggcaggagaatggcgtgaacctgggaggcggaggttgctgtgagccaagattgcgccactacactccagcctgggggacagagcgagactccatctcaaaaaataaaaaaataaaaaataaataaaaaaaactctcaggataattaatgatgcttaataattcagttttgatttttctattaagtttggttttaagatggcattataagtcgttctacttgatgagattttattttatggtatggatacttcttaaacattggggaattcttaatttgcctacttttgcagttgactttccttgttggattgatgccttcctctttctctgcccagctgctgtctggggatgggggtgtaagtaggaaaacacccaggatcaacaggcttggctgcttccactggggttctcccactcatccccagtcatttgcctttgggccgcctcctccttgttgctccctgcattgttgagcagggagcactctaggtgtggctgcagtgtgagcctgtactcagagcttcaggaggcctcttcggtcctgtactgcctgccttcattctctcaagcactcctagtttctgggctgatgaggtttcccctctagtttttgagtgttgctgtgtattcagtccttcctgcctccctccctgtctttctccctccctctctttctccttcccccttccttctttcctcccctcttccctccttccctcccttcttctcctcccccccatttttttttttttttgagacagcatgtcactctgttgcccaggctggagtgcagtggcacagtctcagctcatggcaacctccacctcaggttcaagtgattctcctgcctcagcctcctaagtagctgcaattataggtatgaaccaccatgcctgggtaatttttgtatttttagtagaggtggagtttcatcatagtggccaggctggtctcgaactcctgacctcaagttatccacctgcctcagcctcccaaagtgctgggattacaggcatgagacaatgcacctggcccctctcccccttccttctttccttcct

SEQ ID NO: 116545 - DNA, 1036 bp, Homo sapiens
gtaaaatagaatggcattggcaaacatatggatggagatgataatgttagaatgaaaggagcattgaaaatctgcatttaagggtcagagttgaagagctgtgcaatactacccttagacctaggccagagagaaagccgcctgccttccagctttagagagctccatctgtccgtcctccagttgcacccctccccacagggcacaagtcagtggagccaagggttgtgcccacctggagctggtggacttcattcctttctagacctgcgctgtccagtatggcaaccactagctacatgtggctatttatatttaaatgaattgaaataaaaccaagtaaaattcagttcttcaagcatatgaaccatattttaggtgctctatggctacatgtggctagtggctactgtattatataatgcatatattacagaacatttccatcaacacagaaaggtctatggaatagtgctaggactatgctcccaaatccagtaccccagaattctccggccactggtcctgggtctgtttcggcctgtgcaggccattttcctgggacagtcctcctgatggtggaccacattgctggtatatgcacccctaggcctgcggggtggccaaagggtgagtctttatggggaatgggggaggggacagtggacagagctttgatgtccacttgtgtgcacagagctctttaaagctctgtgttagagcaggaggtgagaagagaatgggtggtcttagggctcaggaattagggatcagctctccctttgctgtatgaacctctgaagaatctgagaatttaaatataaatcttgcctgccaggcttttatgatgatgtatttgtcaaaacagaagtatagaatatcttttatataacagtttgttttcttgatttacagcgtttaaatatttaggtgtgtggtgggtgggcctccatttggacttttgccccaggccttgcaagctagggcacaggcctgaagctacgtaaatgcacctgagagagatttttagtttgta

SEQ ID NO: 116546 - DNA, 1062 bp, Homo sapiens
gacacacaagtaagaagaaatgttattttattgttccgtacgtcattagtgggtttttcatttgctctataaaatgtaaataaacatagtatttgtgtgtctgtgttataacattctacagttcctgaataattagtttatatatgtttataaattaggttaagcagtagtagaaaatcgctgtttttgtgcatcaaaaaatggttaaatattggctgtttcttatgctttaacctaataatattttaaaatattatacaattatatttaaagtaaacatgaaattgttgggtctgtaaacctgaaaggagtttattatttttattttctttttcaaaacagaaaaaatgcctgtcttaaaggctgaagcgtcacattataactctgacttaaataacttgctgttctgctgccagtgtgtggacgtggtattttacaaccccaatttaaagaaagttgtagaggcccacaagatcgttctctgcgctgtaagccatgttttcatgctgcttttcaatgtgaagagtcccactgacattcaggattccagtatcatccgaactacccaggatctttttgctataaacagagatactgcatttccaggtgctagccatgaatcttcaggcaacccaccattacgagtcattgttaaagacgccctcttctgttcttgtttatcagacatccttcgcttcatttattcaggtatcttgtcaagtggttctggttacttacaatctcataagctttggaaatgaaatgtgcctgtgacactcaagggtactggttagttttacagtggtctttacctaccatctgagattaagattatacatgaaatattatttgctttatatataagaattggtccaagctttctgttttccttacaaatgtacttgcctcatcttttccctatcaatttcattttattgtggtaaaatacatagaacataaattttaccatcttaaccatttttaagaacacagttcagtggaattaaacacattcataatgttgtgtaactatcaccaccatccgtgtccataattctttgc

SEQ ID NO: 116547 - DNA, 1051 bp, Homo sapiens
cttccatgtgtatgacggttatgttgtgtataggatctcagaatgactttataggaccaggatttgtatgatcctgttttgcctctctgttttgcttatggataccattctggaatgttttcttctgccttaggaggaagaataatatcatttttcccccctcaccgaagattttaaacttcccaccatagtagattagagtaagaagtagatgtcatttattcttattactgctgatgttatatgtttatttcttagggataaagctttcagagttccctagctaggcaagcagaggattagcattctgaccagggctctcaggctctgagattcagcagggggaatgggtggagacgtcagaatttaaagtgaataaaatatgatatttcaataaaaatcataactaagtctttccaaattagggaacaacatagactttaggcaagattgtggtcctaatgaatcctagtatttaaaatgacttattatttcatcatcatttgggtaacactacctgaaaatattcaggcttgttttgtttatccactgtaaatagactaaaatttaaaaaaaaaaaaaaaaagagaaagaaagcaaagcaaagaaaaaagggtggagggtatggaaagggaggccagcccttgacttccaggagggttggcacacaggggatacctgaagaccacagaaaggataaagcactgaggtctgagttagacagagaggctgctcccggagccactagctccagccaggcgcgacaggacagacgagttatcaagggtgagagtctccggaacgccagatcaaaaacccaggaaactctttataggttctagtgggctctgctgtgagtaggaaggacaattaggattataagattggagatgaagatggaggtgaaccagctgggcccggtggctcacacctgtaatcctagcattttgggaggtcaaggtaggcggattgcctgaggttaagagtttgagaccagcctgggaaaaatggcaaaaccctgtctctacaaaaaatcagctgggcgtggtgg

SEQ ID NO: 116548 - DNA, 1017 bp, Homo sapiens
tctaatttaatagtagaattgtgtagcagcgaacaatagtcatttacttttaaaaatatttcctcagaaagatgcacattacttttaactttggtcatctgccaagacagggaaatggaaactttccaatgtaccttccgacaagccacggccagccctgtgtgcagtgtgagcctgggacgctgaaagtagggcagcaagagtgaccttgagatacagaaaaacaactgggaaaaaagctaacaagaggacacagactttatatcatgctttcgtcattttagagagacctataactggctctaagccccttatatgatcacaccttgatttatttgttgcctaaataaagatccaaagtgtctatctaaagacaactttcataaattactcattataggtaggacacgcctagtcagggataaagctcctggtgattacagaattctctcattagcttctaggagaaaactgtctgttgatgaagacatttactaaaagtgtttggtacgctctatccataccagagaaacacaggaatagataattttgtacaatcatctaagaagcttctcatttcaacagaaaagactacatccattgttaagaagaaatatgattggtaaattaaaaaatatttccacctttctaaaattagcttttaaaaaaaaagtctagtttatggagatcgaatcagtttctgcattctgaaagaaggagaatgatgccgctggagatggctgaatgctgtcttccagatgacttcctggcactggggtcacctgtgatttagggttgattggactcacactgagcagactctgcaagatggagataaggtgggggcaaaccattccagtgaccattataacaacctagggcactgcttttcataaccagaaaaagaattggtaatctgaaggttatatggtgaacatatgagagtagtgtctagtggtgtttgatccagggcctggtgagttctggtagatgtcttccgtcctataacatagtgtt

SEQ ID NO: 116549 - DNA, 1610 bp, Homo sapiens
cctgggaggtggaagttgcagtgagccgagatcgcaccactgcactccagcctgggtgacaagagcgaaactccatctcaaaaaaaaaaaaaaaaccaaagtgaaacactaaaaattccctatagatatattccaggaaatattttaattgggctgattttaattaggctgtatcattgatgattactggaatcgattttatgtcttttgtattttaatcacttgagttaatcaaccactggcaaatcccatttgacaaagattagcattgtaaaaaacagatactgtggtagatttctagaaattcattcacatttaagacttctaaaatggaataatagccttttgtttttcatgagcatattcgcacccctatatgaattacagcatttaaagttcaaaatcagtaacttttaatctaggaaattgaaaaatattaagttgcaaagcaaaaaaaggtattttcttgaaaatactatttaatgtttaactagactataggtagttccttaaggttgtttgacctgaagtggagttgggtttggaagctggtgcccagttggtgtggagtgtgtagttttgttatgaaagttctctaccacctacctgtgtgagtgacaccaacatccagatgtcacagctctccagagctagtcagaagagaaatcaaattagtgtttaaacccatttgcatattgacttgtcagtacctttaactcaatttaatataacaagaaatcgtaaaatacttataacctatcttagagaaatgagtgctggttttgagagttgttttttaactgaaagattatttctagatgggtagtgctttgtgctggtttctgcttccatatatttcccagtcattttaattagagaagatactctatggtagaactaaggcctttcctttcttggccaaagtctttaccctatttaaccctttgtatatttctgactgctcactgttcatattataggggaccagatttgtaatatagaattctccataacatgaatgaaattaattctgtccaagccagcatggtggcttcatattaagtagtaacagaagtctgaacaattggataaatttgacttccaagacagctaaacttttcaactgcaattttaaaaactacactacactgttatagttaatctgacaaaaatgtcctcaaagagtactttattttatttaaagcatctgtttaattcaacctttaataattttgcaaagaagggtatgtgtgtattttaatatagcctgacctgaatttatatgtttttagctttagtatttaactttttgtaacaaataaaccttttttaaaacaagtttaacgaagtgtcctgtaattattttaccttggatgttgaaatactgaaatgatttggagaatgctgccttgtatttctcaagcataattatgcttcatagataattttcattatgtgtaaaatatctagaatgttgctgatactatagctgactaatatgtgtggtgagataaagaaatttatattatctttaaaagtcaagaccagaatttatctcagcaaaataactgcctttatttagaaaaatgctttgataattaaacatagaa

SEQ ID NO: 116550 - DNA, 2689 bp, Homo sapiens
caacctccgcctcccgggttcatgcgattctcctgcctcagcctcctgagtagctgggattacaggcacacatcaccatacccggctaattttttgtgtttttagtagagacggggtttcactatgttggccacactggtcttgaactcctgacctcgtgatctgcccaccttggcctcccaaagtgctgggattagcagcactggcatgagccaccacgcccggccctctgtgaatcttttcaagtcccacattagcttctcttggcatcttggctaccagtaacttagacacagtgctgatgcatttgttctcaacttgagctgaactttgaatattctctctattctcttttccagttgtctttatagaggacagtttttaaaagagcgtttttgtctggaagcctaagtgcttcttgccacctagttactagagggggttgttcgttacaggtaagatgctttggataaaaggctgctgtgaaaatcactctttcttacacctgtaagtttttccttctcctcccaaggatagagttcatttaaatcagccttgtcaaaggagtgccaggagggtctctaggggtctcgtggccacctgagcttcagaactctgcagctgagaacagctgtaaggggacactagggaccgtcagcaaagccacctttttctccaccctcctccttccctcctctttctctgcccctgttgacaaatctttattgctgtggtagccaattatcatccacccctcccttccttaactcaccctccccacctgctcctcccttctcttcactccctcctcttgactgagtgaatgaccctggctcccctcttctgttagcatgcacatcttaccattttccccttgtctttggttaaaaatgacctgacatatagatggtgacaaggccaggtcagaaatagggacctaaaagcatgaaaaattggggaggatagaaaatgctttgtggtattgggggaaagaacggaacatggagttctctaccctgggcctgagttccagttgtgacattcacctacctttgacccagggcaatttgcctaaacccctagatcttctttctttcatccctggtaatgtaggataatgcctgtgaagtttaaacactgtcacattgaccatgagggacaatcataaagcaacagcgattgtcatgtgtgtccctacaaatccactttttgggggctgtttgccttcagagatgaaatttctggcggttcccagaattcctcagagacagctacttttaaataagtcctgtattcacttttagcaagggcctcatttcagtaactcacaagtccagtcatgtaacagccacagttctgaaatacatttagaactgaatattctcccctcgtccagcttaggcctgctttagtctggaagccaagtgctttttgccatcctccccactcctcccaccacccagcatttcccaggatgaaagggtgggaaggtagggaggagagacaaggagcatgagagggctgattgaatgacagctttgaagtccttggccttggtttcctttgggcattgtcaaagcccaccctggttgcctcggactcctctgacctctcctatggctggcccttgcagtggccttcagcatctgcctccaatagcatactgccgtcacttcaggcaagaagctagtaagcttactgcccatttaaaaatgatcataccaacatgccaactcgaggtgtcccatctggtcgctcacccacactcccaccccagtcatagaccaatcagcacttttgggctggtatccgtgagtgtagtgacttccaaatgcatccttgactctgctagacctttattttcaggcacaagtcacataccagccctgtgtgtcccccaagcttgaggtgtcacaaattactttttctaagtactctttatgaagctgttctctttagccttgtggcaagagggaagctcactgccaaccctctatagaaaccctgatttctaacatgagctgacttttctacttccaccccttacatcagtgaggagccagaagtgaagggagaaaaactggctttttttttttactactcctctctgtgagtcctgcaatatagggttcagaatctgagttacactacagtgtggaagttgtggatgtagatggcacatcttgtgacttcaaccaaagctgtcagcaagtcctgcatgaaaccctcttatatatatttgtgagttcctcagtcatagaagccatgcatatttgttctgcaaatatttacatagactttgtgctaggtggtgggaatacaccattgaacaagagaaatgcaaatgacacaacttgattccagttgtggtaaatgctccaaaataaaaggttggctgtgagaattaataataaggggacgtggcacagtgaggcagtggggtcaggcttccccaagaggtggctaaagctaatatttgttgaggggagagctccataaagagcatggtagacaggccccaaggtaagacggactttaggctcactgaatgtatgtgtatccaaatcacttctcattaacaaaagctatttagggccttgcttttttgttgctgaacttgttccttcaatggcttgtttgcctttactacccattgctggggagatgaagcccagacatgattccctcc

SEQ ID NO: 116551 - DNA, 1019 bp, Homo sapiens
ccaaaagcctatctcagaaacagactccagcttaggggtatccagtctgagaagacataagggcattctcccagctgaatccttaacctccagtttctaaaaatcttctgaaggaataatggaggaggaagggaagaaagcctcaatcaaacattggtattaaaaacccagagtgagtaatgtgggcggttcctctggtcatatttacaagaagcctcaaggatgagtgagtttcacaacatgacggtcgggagccctccccagtcccttctcccactggacctttaacaggctcctgtcctcagctgtaaaatgaaaatatgcttttcttactgaggcgtggaggggtttcagtattgtttataaaagcacatgggaattctgtgaaaaaaatcgttctttacagattatcggctgaatgcaagaaggagtgtttcttgaagcattactttccatatgagaatgaactcattttgactgattgcaaaggggacaaaggcagtagctagaggtttcaaggtgaggtgtttggggcttgttttattgaatgctgggtgtacatgtacctgctctactggttttacctttctgagactgggacagaaagctgacagtggtagtggcagtaggaggctctgatatgattgcttaattctcaagttggggatcagatgattctgccaggtgcaatggtggagatgtgtcatttcaactcctgcttgcctcattcaactgaccaacctggctggtttttcttactgtaattaaatggttggtacaatgtgagcatttgtagatggacaataagaacttcacgtctgtctaggactataaatgtagaagtgtgctccctgcagatgagcccacataattggccagcatgtttgagttctacagctggggcttctagaagcatgctgactgcccttccatacttgctgaattccaaataggcttacagaatcccattgtggagtacatggatagcatgatctaccttaccagtctcgctgcctctt

SEQ ID NO: 116552 - DNA, 1829 bp, Homo sapiens
ttcaattttgtttactgtcttttgctttacaaacagcactacagtgaataatcttgtatatgtgtcattcactggggagcaagtgtgtccataggataagtagaattgctgagtcgattttgcatttactattttgatagctgttgccacattgccttccataaagattgtttcaagttacattcccacagtcaatatttcctatactcttgctgaatgcatgttatctatttgtattgccacacacaaaagaagttgttctcttctgatttctaatatttaattttgtagaatgttcatgaagaagtcttacaagaatatcagaagataaagcaggtaggtatcatcactgttgattttctgacctgtggttgaaaaatgttgtaaattctgcaatctcattcctcttttttttttttttttttcatctgcagtctagtcccaattaccatgaagaaaaatacagatgtgaatatcttcataacaagctggctcacatcaaaaggctaataggtgaatttgaccaacagcaagcagagtcatggtcctagaactctgcttggaccagaagatgtgaataaacttaagcttatttatttaaaattccaaatgagttgctctagattctaaaaaggtgaaactttggctgttgaaagtttcagtattagtaaacttgagttactttttcttttccattttactttgcttccctgcatttcgaagctgctctttctggtcctccccaccaccccacccccaagacttgtgtttgttaatagaaataatttttttaggtattggggatccattgtctatatttcaaatcagttttttttcctcaaaaacttgtgtttgttattagaaatgattttttagatattggggatccagtgtccacacttaaaagttgtatgtgtttaaaaaacaacaacagtaatgtgcaaggtgaaatgcttttggataaacgtaagcctattttctgacgtttcttaatgcaaactctttgccttaaatggtagaatatttagaaatttgcacaaaattaaaaaaataaacattgtcttggagggttaaaaaatagaaaggtgtatgtgtatagattcacatacacatatgtatatacaggctgacttgatctagaacattaaatccgccctgcaagttaaccccccattgcaatggttgccttaaggtgtttgctagttgtgtacatagtgtggttaatcattagctacactgcttcccacttgattagagcaatgggaagcatactgtggcctaccagcatctggaagtgtgtgctcgatctgtatgtgtgcagaggtggtgtggatgtgagcgtgcatgaaggaaaaaaagctgctactcctagtaggccaaacgctcaggttaaacaactgacgagtgttactgtagggtgtttttttgtttttttgttttttttcttctatcaaattgctacttttgttgtggaagacaaaagcatttccatttcaacgagtttgtcagctttattaatgttgggcaaaaattgatatgtcatgaaaatgaaacagatctatagttttgggacaaaattataaaatgaaatgtgtaggtaacctatttatatactgctataaagtattttttgaagagagatatgcaaagaagctattacctacataagaggtatatttaaagattttttttttcatcctggtgccaggaatataaaaaagagtggatatatttaaccataacatactgtgattcatcaaacagcacaaactttcatttcatggagtttatctgttgacattgatttaaactgtcacttgttttatcat

SEQ ID NO: 116553 - DNA, 1457 bp, Homo sapiens
actgatgctctaggaaaatggtcttctcttaccagttaagagtaatttacatcccaaagtaaaacagatttatggcattttattaagaaagtaagttggactaatagtacaacactggcttttgttcaacatagtatgacatttaaatgtttgaaaagaactagagaaatatgcctttttttggtctaaccctcattttacagaatggttggtaatttcccttttgtgtttcatgtatttgcttggtcagaaatatgaggaaagggatagaggaagcaagcctgaggcactttgttgaagatgtctgctagcagcatatctgaaaggccaagcaacagactgcctctcataaagcagtaggtccagagagagctttgactttcagcactcacggactgcgtgacattctcctggtttcacattacccattgagtccttctgtctctctgtgacttgtaacagatgggttagcatccaccattagtgtggtagtgaattatcttggatagagaaaggttcaggaaactagatctgtgtaaatactgttttctttttacttagttgcattttagttccattgccaccatgtctttaccacatttactctccttcgttgaagctctcaaactctgtgtaataattttacctggaagatgtttggaggagtgacctggcagccaaccagtggcagagtggcattaaacattagtgacacatgcatggatctaatctctaaatatttggtttaaatctcagacttgtgcaatcatgtttattgggtagctactctccatttatcttttttcttattagaaaatatatcgctatcgtctcctatgagcaacgccagaattataaggatgacttcaatgcagagtatgatgagtacagagctttgcatgccaggatggagactgtagctagaagatttatcaaactagatgcacaaagaaagcgcctttctccaggctcaaaagagtatcaggtaaatggatttgtaactagatgggctgactttcatattttaccttctttctttccctgccctgctcaacctcagccatcacagtggcctttagagtaagtactcttgcagaccagcctcgctgctgctttaggaaactaaatatttgaaatagttcttgaaaataaattaacatagtaaacctgtatttctaccagtggaaaaaaaccttgtgccactataatgtatcacatattgagaaaaataccaaacacaactaaataggaaaaaaagttggatcttgagattcagctaactatttgattaattacactgccaacttagactacagctcataggtctggtgctatcccaaaacagtgctatttcaagtatttttctttaaacctcaatctgagatagaatagggaagatacaaacataggaaataaagagggcttaatacacagagatttggggtttaagtaaagaa

SEQ ID NO: 116554 - DNA, 1122 bp, Homo sapiens
atgttgagatctacatcagagttccaagtgttctcagagttggagacctggagaagcagacttagtctctttgaattctttactgaggatatagtaactttcagaaccagttgcgataattacaaagttaggaaagctctagacccacatcccctgcattttttggaatttatctggtgtctatggcagaagggaagccaggtgacctgcacttgatgcctttctctttaagactcagactatcgtaaaagcatgttcttttacccaagcatgaatttataggtgagcagcatgcactcagagtctatgtattaatatttgtttagggtactttgtcctttaaaatattaaaccgagaaattacctaacattcacttttatatgttttgccagtgggcatgattagggtttgagttatcagtttaaccctactttcaatgataaaaaattaccctgataaagaatctaaacatatcctctggacatggtgcatttaagcaaatggcatactgagggatttacatactttcactgtgtagccacaatgtttagcacttcttttgtccttaaaaaaaaaaaaatctgtttagtgttatgagtgctagagattataggaatataaatcgacattcaataataccttattttaaattactttaaaccaatgggaaaactttctaccaaattccactgtctgcatacaaaaaagggaggcaataaaaatacagtgaccaaagcagtcggctacctgactctattgtctcatccgccttgtttgaatcccatgaaaagtagatgttgatgtaaaatttgtatctcccattgtctggctgcatctgccaccacaatctttgaattgctgggcagatgccacaactgttgttgaaagaatagaagactgaccttgggttaagatggaattcctttattgtgcagacactgcagtagccagggtgctttaaatgcctggcgtcggttctgctggcgctggtcatagggcctctattgttcatgttcaattgtattccttgctcactgttgcttattgagatggaagaatagaatttgaggaaaagtgttccagatgtttctaatctattttagaattacaggcatttgata

SEQ ID NO: 116555 - DNA, 1194 bp, Homo sapiens
gctttctcttctcatttaatataactaggtcaaccacagccagcaatggagggtgactgcctctgtttaatactctcctgagtggtataatccacataaatcagcatagtctctcttggaacttagggtaaagctgtatgattagaaagaattcagtaagcacttcaagaaacatttgccagattctgctttttgacattaaacatgaaaatgtatttcacatttggttttgtgttgttgttgttctggtttagtttttgtttgggttttttgtttgtttgttttttgcttaagcatgaagaaagcgtgtaatattacaaccctggtaatattaatagtaagtaaggttacttagttgtttaaccagccatgcatgtattgaatttatttaattttagtgcaaactggctcacttttctccttttccctcccctagaaacggcttttggattcagagtttattgatcctttaatgaataaaaaagcccgaatatctcacctgacgaacagagtaccaccaacactaaatggtcatttgaatcccaccagtgaaaaatctgctgcaggcctcccgctgccccctgcggctgctgccatccctacccctccaccgctgccttcaacctatctgcccatctcacatcctcctcagattgtaaattctaactccaactcccctagcactccagaaggccgggggactcaagacctacctgttgacagttttagtcaaaacgatagtatctatgaggaccagcaagacaaatatacctctaggacttctctggaaaccttaccccctggttccgttctactaaagtgtccaaagcctatggaagaaaaccattcaatgtctcacaaaaagtccaaaaagaagtctaaaaaacataaggaaaaggaccaaataaaaaagcacgacattgagactattgaggaaaaggaggaagatcttaagagagaagaggaaattgccaagctaaataactccagtccaaattccagtggaggtattttacctttagatgaaccagaagtgcatgctatcatgagtttgaaattacacagtttataattagtaatttctttagcaaatgacgtttcatttaattattaatcttagtgttgtgcttttgagcagtttttttttttttttttcattttacagcagttgttttccatctctttttggccaac

SEQ ID NO: 116556 - DNA, 2102 bp, Homo sapiens
aggaatcctctgctttaagtggagagatcagggaaccttttctcagatggctgcattttagactgcatttagactgcatttaagacttctacggcaagaatggcttggaggggcaggagtagaggagagagactacttaaagagcctaatattttgtgataagacttgctaacggttaggtgtagggagacaatgaggggaagaacggaatctgtgattatagctaggtttttggctgagcaattgaatggatattgagccattgactgagatgcggaaggatggaaaagaagtaggattaagggggagaagaggatcaggaattctgtcttatatagactccatttggaagatgtctattagacatatccaagtggagatagatgtcagtagatagttatatgtaagggtgtggttgtcagaggatagttggggctagagttataaatttaggaattagcagcatatatattgggtattgaaagtcttcaaacttaatgaaatcatcttaggaggaaatgaacagaatgaggaaaacagagcagaaaacaggcactaagtactttagcatttcaacatatagaggattgagaaacagagacttaaaaaacaaaggtcctaggccaggcgccgtggctcacccctgtaatcccagcgctttaggaggccgaggtggggggatcacgaggtcaggaattcgagactagcctggccaacatggtgaaacacatggtgaaactctgtctctactaaaaatacaaaaattagctgggcatggtgacaggcgcctataatcccagctactcaggaggctgaggcaggagaattgcctgtatctgggaggcagaggttgcagtgagctgagatcatgccactgcactccagcctgggcgacagagcaagactctgtctcggaaaaaaaaaaaaaaaaaaaaaaaaaaggtcctaagagaggcggaaaccaggagaatgtcctattacaaaaacctagaaaatggattgctgtgggggtgggggtgtcaatgtgtgtagtgctgggggtaaaagaaaatggaagcattgccagtggggcgtagtggctcacacctataatcccagcactttaggaggccaagggaagattgcttgagcccgggagtttgagaccagtctacacaatatggtgaaaccccatctctacaaaaaatacaaaatacaaaaactagccgggcatagtggtgtccacctgtagtcccagctactcaggaggctgaggtgggagtaccacctgagcccaagaagtcaaggctgcagtgagccatgttcctgccactggactccagcctgggtgacagagtgagaccttgtctcaaaaaatgaaaaagagtaagaagaaagaaaaaagaaaattgatggattgtgtttattccacctcaagaaatctgggtgtatactatattaacttatttgcaaatttgaattttgcaaatttgaattttaagataaacctattttctccttaatagaaacattactgttagaatagtgttcagctaagttgtgagaagcataaactatcatatttgttagtacttttaaaagacacagaaagaatgatctattccagtaggaagtcataagcaagagtaattttctcctagccttaaaaattaattacttttggtttggcacgtgaacctgtatgtttgtgtagttagttaatggctaagccgcgaaactctaggaattgcagttaagggataagaaaagattacacttcggaataaactggctgactaataacagtaatttgggggttctctaggcatatgttttcatttattggtttggggaatttcaaggactttgagtaagtggttcttcaggagaactggcagatataaggagcaagcgtggttatccaaagaaagacagacaaggttatcagaattgatactatttatgaagacagtgtttggttgatgactgaaaggaaagtttgtaacccaacatttgggcactgtttggtttctacttaatacaagtgatcaaggatttttattgtgactcaaaagtaatggactcaattgcccagaagtaaataaggatgttggtaatacagt

SEQ ID NO: 116557 - DNA, 1031 bp, Homo sapiens
ttaagatataagttatcaagtctgttgttacagtttgtgttactagttattatctttctgtagcaaaatgaccaaaatacatgcattatacatattatttccaagaaatgattttattaaaataatttctaattcaaattttagaccatttatttaaaatgctttctgtttgcatgccttcttaaagattgaaataaagtggcctttattattatttcctctagaaatgaagaggtacctaaatcagaattgtggaaactgaggtgctcatattgtaacccacaaatgtgtaacaatgtcatttccactggactttagggaaaagagtgcaaattcggaaagcacctcaagctgtttcagatacagttcctgagaggaaaaggtcaacccccatgaaccctgcaaatacaattcgaaagacacatagcagcagcaccatctctcagaggccatacagggacagggtgattcacttactggccctgaaggcctacaagaaaccggagctacttgctagactccagaaagatggtgtcaatcaaaaagacaagaactccctgggagcaattctgcaacaggtgaggacagctggagagaggtccttcctgcttaccttcttgttaaaatgttcatttaaaaaagcttgttgtcattattatcattattattgagatagagaaattttaggattattttgatcagtggtatgtgaaatacaactcctgaatattaagttaaatcatctcattttaagcacttaattaaaaactagttgaaatgtgagcattgtctttatttgggaccaacaaattttgttctcaaattccattaaaaagaaagtaagaagtgtttgttatctgtttttagtgttgaatacactaaagtattgccttaatttgtattgattattgtcggtgaaattgtgcaatgtattctattggcctttgattggtataagccagaacattttttgcctactaaatagtttaaaatgtatcttgccccacatactttgtgctgcccttattact

SEQ ID NO: 116558 - DNA, 1424 bp, Homo sapiens
ccccaagtaaaactctagttctgtcttcacttgatcaggctcttactttcttgccaaacatcatacttatatcccttttaagggcaaagttagcctcccttatttgtcttctccatacctgctttggggaagcatggggataaacccagtagaccttggagacctcctgagataaggatcagaggtgaatcagaggtacagaggaggtagggcacctgaaaacagtggcagtactgttagtttctctttttatttttatttgccttgctgcttgaattcatcctaaatgaccagtcctagtgtgtgtagcttagctaacaaacattctctgcccatcccccttcccagaaagaaagaagggcttcactgttagcttggtttggaaaagagttaaacaaatttcttttttgcaagacttgttaagggggagggagtgtggaatttatagcattttctaaacttgtgaacttgactctatttttaaaaaatatttcctattaaaattttaaggaatgctaatgtttgttaacgctgttgcaactgggaaatggtggattaaatggtttccctttgccacattagaaatttcagtgtgtattcacactggcagcctggcaacgtggggaagtatggactgtgttgattcctgctcctctgcttacttgctctctcgctgtcattcatttagtcatcaaatactgatttaaggcatgctagtggacaaagcagccactgccctgccctcatagagcttatagcctaacacaaagcaacagcaaacattaggcatttgttcataaaacctttcccacaaagacttacaggcaggaaaattaggtattaatcaaatcacagaacctcccaaatgctaagtgaggattttaccctttgagcatatcccattaaaagcctcagttttctcatctgtgaaaggggacggtacctgccttttcaggtgaaacctagtgagataatgtgtatgcagctcttagcacagtgtcccccacataattggtgcataagtttccagctgatgtaagaaaaatacagaaaccccaatctaaatctatctctgaaactctaattataacttaagtttttgttatcattaggcagtgtccccttaatgttgagttcctttgttgtgtaatagtttgatatttgcaattggttttgtacagatagtaaagaaacataccagccagtagaggtttcagtttgagagcattcatcttttttcccttactggaggtaggatggaatcaaaacacacaggccttctgaccaggcctggggagcccagcatggacagaattactattcagtaaagctcctgccccagtgagctgttttcaccccagaccacagcttataggagctgcttttacccacccattatttctagttgttagtcttgttcctaa

SEQ ID NO: 116559 - DNA, 1039 bp, Homo sapiens
ctgaaactgcttccccaagggagctgtgacctccctgcccccaaaatccagtggatgtgttattggttccttattattctggacttgttgccagtgttgcacactgttgaccactctctcctgcttgaagcgtctgttccagtggcttacattacacagtactcttctggtttccttcctacctctgtagctgtggcttttcagtctcatgtggtcttcttttcttccttttgcttaaatactagtgttcttcacagttggttccctcctgagaccccttctctcctcattccttcaaggtcaccatctccaacactgaacttatgttctttgtcccagtcctgtctcccaacctgtccttcatcttgtgttcagtgtttcagtacatagcagcttccatatacctcgtgacctgggcatgatctttaacttttttcccccacctctctctgagtgtggctaactactgaccacgttttgtcagttccacttcctcactatctctggaagctgtgtactattctacactctcactgccctactctggttcatgccatcactgcttgcctgtaatccttcagtagcatcctaagtggcctcttttctttccttctggtgtcccccttcctctcaatctatcctccatccagattgagctttctgcaatacaaatgagttattttctctcccctgatttcagcctctcgttatcctttggataaggtccaaaacctgtaacacatgaccctcagagccctttgtgatgtatttctcattccctcttcagcttcagctgtaattgtccttcccaactttctttggacaatttgaaaaccttctttttgctcttcctggccctgcacagattagttgtcctccctgaacactttcattcttcttcccccttgcccagtcatctttctagatcacctcaggcatcacctcctctgggaagtccaggtgagattacctttctgggagtcctctgctccctggaatttgtcacactgtgttatgatttccagtttgtccatccttg

SEQ ID NO: 116560 - DNA, 1124 bp, Homo sapiens
cattttgatatcaaattgaacaatgtccccttaggaattttattaaggagcttaatcctctcttcaaaagcattcatatcattgtaagtaatatggctttactcttacattataaataccctgtgtggttatttctaccttccttgtttggaaaggatttaaggtcacttacaaaactatgtatgatgcagtaagagaatagaaacacttattgtgaaaatattggggcaaatgtatcccctctgtataatccaaggtgccttataaaatgaggtagtaagggtataaattgaagtctgccactaggaaaacaaaagcactagcttttgttctcaggctttcacttcacagcctggcaagctgacctgtccataatctggcttcaccttttccattcaatttaatttccattttccttatggatcttttctctctgaccacagtgcatgctcttcaaggtcagaggctttcttatgccctttttctaatttcacagtgctgactgagctcaaaatacatgcttattgactcaacctggagataaaagggtaaaaacagatgctcagtaaataaatgttcaacaaatacaaattaactagtcttcttatctatatttttaaacttccttgattctcacttttctcatatataaaatgaaatcaatgtcacagtcaaaattgcctttcaaaaattccttaagtctacccattttcagacttagtgaaaaatatatagtctaggacctatagtgtataataatgcacacttaagcgaaggaaatggtgagctaggctagagaaagactaagggagcatttatatacatttgtctaaaatatttaaactttcagggtaactcggttgagaagggatgagtgaagaattctagagagtaccttcttgcctacagcgtttagctccgtttgttttgcataaagatctgttttctgacttcgcatgaggggcagtatgttcagcttattctcactatgtaaattacttagtaaataataggaagagatgttgaaatacaaactttctgccaccagaccttcactctattgcagtcattttctcccactctcccccctctctcccacttcctctgaggattaccttcccctc

SEQ ID NO: 116561 - DNA, 1028 bp, Homo sapiens
aaaatagggggaaaaaaactgtacaattcaaccttttaaaaatgcaatttaggctgggcgcagtggctcacgcctgtaatcccagcactttgggaggccaaggccagcagatcacgaggtcaggagatcaagaccgtctgggctagcacagtgaaaccctgtgtctactaaaaatacaaaaaattagccgggcgtggtggcgggtgcctgtagtcccagctacttgggaggctgaggcaggagaatggtgtgaaccaggaggcggagcttgcagtgagttgagatcgtgccactgcactccagcctgggcgacagagagattacgtctcaaaaaaaaaaaatgcaatttagagtctaccagatgggatggtcttacattctctgataggtatggaagtactgctatattcccaaacctgagctatgcagtagggaaaactttagatctaaaccgaagctggagcctcataggaagatgaaatatcatatggagatgagacctctttaaaaccacttttaaaatttctccaaccaggttctgcagatctagatgaagggttaggggagaagatggatggaagttaaatgagtcatgcctagggaggggatttcattcaggtgtccacacctttcttacctatctaggcatatcccttctctgtcagcagaaccctgctcttcccagagaaacaaaagcagacattagtgagtactgttataccagtatgcaggtagccttatgttctcttgtgcctgacgcaagcattcctttggctcctgtttgcctctactgctgtaggattaagaagttgccaatatatgtatgccaactaggcgctgagcgtgcacacccagtaagacagcctgatgaatacctacctacagagtaaattaagacttgttcacaaagttacagcactttagaactggggaaagttttgggaattaaagagtaacgttagggccctcaaaagatatttataaaatagataaaaacacagaaacttgtgccaggagttgtctctaat

SEQ ID NO: 116562 - DNA, 1022 bp, Homo sapiens
tcctacctgcgtgtaacactatgggtatatttgagcagtacgcagacacggcaggggcaggcatcagggcaaatagtgttcactttgggaccaaagggtgactcttgatgcacgtcatgagtttctttgcagctatggagctgaagtggagcttagaggttagggaacaaagggacatggagcccaggccaatcagagttctacattgccttttcttggtagtttcagagcagcatcaatgcagatggtatggtctgagctaagcccaggccaatcagagttctacattgccttttcttggtagtttcagagcagcatcaatgcagatggtatggtctgagctaatctgaagcttttcaagagcaagatgttttcaggcaaattttacatccttaaaatttcaaaagggtttgtagacttagtgcatctaatttcttgaagatgtattaattagacacaaagttaattgtatcaatatccaagtatactcttaagaatgaaatgggtatataaggtagcacttatgtttatggctggtaaggctgtgtaacaatttggccaatggacaggaaagcaggagacttattggaaagagcaggtaatatatgacaattagggcaggttggtgagagggaagctttagaactaaactatggcaacttcagagcagaccagaacctgtgggactgttgaaggccagagctagggtgggtctgagaccttgtctaatctagagccattcaggcagagtttcagaggaacctgtggatatgcgtcagtcccctctgatatgcaggagcctattccattgtgtatctacacagttcttttttccaaaatggttataaagcattttcttaaaaactagccttcaggttcatgaaatacgaggaggaggaagtgaaaatgtactgactgctactggtagacctagggtcagctttgaggactgaggtaaccaccacaggaaataagttttgaggtctgattttgaaacaatattggaagaccattcctttgtg

SEQ ID NO: 116563 - DNA, 1063 bp, Homo sapiens
ctctaatacttaactttttctattgccagtgaaggctaccctccccttcctactcctccacccttcagcattggtttgcacatctgggctgatgtgagaggcttttttttttttctcccctcaacccataatgtttgggcctaaagtcataactgcaggtctagtttaaaaaatagcacatgtggctttcaggttgaggtttctattttctgttctgattctagactattctgtccctaaactgtggagcctgaatagtacatgcaaatatatttctctagcttaaagtatattttctagattttaaggaagtcacagaatcaagagtctagaaataatttgagaacaacagagaattctaatgtttaaatgtttgcagtaagtttgtatctaagctaatatatagtctatatatagtcaaataatagattttagataaaattaagagatggactggcttcctgggatgccggaggggaggtgggttctgaggccatacaaattgggaaactattcagtatgaaaagacccacagcaaagaaagttattttgtttaacttggcatttcctaaatttatttgaggaaagaacccctctttcacataaggaaacttttcagcatgcttcagaaatgctggtggaaagaaagcaaacacttcagttctaggcctggctcaggcattaatccaccttttcatttaacaaatatgcattgagtgactactttgtgccacgcaccacttgaggtgctgacaatatattcagggaacacaacagacaaaagcctctgtccttgcagagcttatattctagtgaagggagaaagactataaacataatatgttagtattacaaggtaatgagtgtttcagacagccatggagcaggctcggatttgtagtacaggggttgtcaatctaagtatgactctaacttgaacaaatcactaagcctcattgtccctaatctataaaaaagaaattatagatgatcttggcccgctcagctatatgagtccactttaacaccaggaattgtcatgtcaaaccatggtactgctggt

SEQ ID NO: 116564 - DNA, 1087 bp, Homo sapiens
agacaagcctgaccaacatggtgaaaccatgtctctactaaaaatacaaaaattagccggatgtggtggtgcacacctgtaatcccagctactcgggaggctgaggcaggagaatcgcttgaacccaggcggcagaggttgcagtgagccaagatcgagccgctgcactccagcctgggcgacagagcgagactctgtctcaaaaaaaaaaaaaaatgaggaagaccatggtccttgcctccaaagaactcacagtctggtgggagagaaaggcaaataaatgagtacttagcatatacaatgtagtgaaggcagcaatagcgatgagcgcctagaggtgaggggaccatggagactcagaaagcgggcttctaaacgcacctcactgagaaagcaaaggctcctgagggaaggactcctaagctgaactcacattaagttagcatgagctaaggcaagaagtggggacacagagtagcgtgttccggcacccagcaagcacggtattgctgctggacatgaaatacaatgtggagatgaggcccagttaaactggtttagtagcaagagtgctgacaaggaaacatatatactgttaagaagcttacatctactactcataagtagtaggaagtcatgaagaaataaatgacccttgagactgacagagtcatattgacattttgtaagaatagttgttgataaaaactgaatgattataggatggcagctgaatgattagatgatgggattgagaatggttcaaaagtggaggtcgaaaaccaagttgtccaagcaaaaggtaatactgagccaaagcagaggaaagaatatacatttaagaaatgtttcggaaggaaaaagcagtaagtcttacgattatgtgtttgttgaggggtgtggagtagtgtgagaaagaggagtcaaatttcactcatcaggatgccagtaatctcagcactaaatgaatgatggcttattaactgggcaatgtgggagggtggaaagatttaggaacgagatgataatttagtttatatcagctttgtatatttaaattttggaagggactggttaataaaacaaa

SEQ ID NO: 116565 - DNA, 1026 bp, Homo sapiens
agccatatttatgaaggtagtaatactctactaatcaatacttagaagtttttgttatgactaatctgaatgctttttagtttttccttaatctagttatgttggtaatttataagtcagttttcagattaggaaagaaggtatttgagggtgttccatttccactgaatagtaagatgatgcttacttagatttccacagctgtttgaaagctctgtatttggctataacggaaaactttgttagggatgcttgatgttttgtgttttgtttctaaaggaagacagtgttttgttccttctttagaaaacttgaagaatagaataatgagtccaggattaatttgggataaagtcttttacttcataaattctgattctgtaaaaaaaaaaaaatctctaacctctttcaagaatatttaaggtaattggtcaaagggcaagtatcagtgataacctaaaatctagttattatttttatgcagcctttattgtttttctgattgaaaaacaaagtgaataaacatttgtaaagtgtataaaatacacataagaataaagatgagtaataaaagggtccctaatagtgaaaaacagttttattcaatttctttctagtcttttcttcttgctcacacttacatttttaaaattgcaggcttaatgtgtttattgcttttttatattcttttttcatttagcatgtatcatgagcattttcctatgttattaaataataaaagttgcttttaaatagctacctaacatttcattttatggatgcactatcatttagccattctcctattacatgtatggtttctgtataacaataatggtatgattaaaatccgtgtgcataaattattattgctatctttatttcctcaggatagattcctagatatggcatttattaggtcagaatacttttaaagttttcaataactgtcaccaaatcatttatcccatctgaatcccccacccccagaaagctgctgctgccttatattcccacagctgttcg

SEQ ID NO: 116566 - DNA, 1034 bp, Homo sapiens
aactctttcagtagagtcattaaacagagggttggatttttcttctcgtttttttatccccaaacttagcaaagccttcagagatattttgttaattatttattttactttgtggggggtgtggagaagattgggtttgaaaaacaaaattatacagtatttgaagttagtaggcaatttcagcccccttgaaaatgcttcctgcagattgtccttccctaccctacttggttcctggggaagcaaagatagctatcagcttgaaatacacagcaaagataaaaataaatcccccgcactgccataccttcttagataatatgccttccctccgacttctttcccttgatgttttggtttggctagcccactggttttgccaagggttgtgtttagtcagtcggctctgaatgttgccagctaacagctaccttgatactcttggctctgagtgtaattaataccagaagaatgttaaaattatatttctttataaaggtagttctgttttaatttttttaatattacagtggttaacatgcatagatatcatctaatatttttgctgaattacacctctttagccacctgttaatttactaaggtgttaataaaatagtaaattacctaatgttaaaaaaattttagtttttatatatacacacacacaacacgtacacacacactttttttttttttgagacggagtcttgctctgtcgcccaggctagagtgcacattttttaaaatctcattttacccaggagatgggctgcccctgggaactctggaaactgcatattttctcacacaataattgaatcatactttgaaactattgtaaattgactagagtactcggtctaggccaccccttgcccttgaagagctcagaatagcagagtgtgggagaataactttgattgtatgtttgtggtgcctgaggaaactatctcaaagtactcacggatcatacccttacacaggccccactgtgagctacagcaagacaagccccccaaagcatgagcaca

SEQ ID NO: 116567 - DNA, 1047 bp, Homo sapiens
gagcagtagggttctagggctgatgcttcccttaattctttctcctgggaaatgcaagtaaaggatattttctaaggaggcatcaagttatgccaaaaccctaaattatggggcaccaatatgtgcaggcttccaaactctccattctgacccttgcagtttttagcagtctaggagggagtatggttttctctagcatactagttgcccctgggccccaagcagcattgcaaagcaggcagtttatatttgaaatcttagaccaccttttctaaattttcctacctatgtccccctgtagctttcctgttccatgtgtccaagtgccctcagtttatctttgcctgctctactttctcttcctactttattccttgccttggtatagttcactgatggaagcaatttagatataaatgactgatgggtttaaatcttaatgggtgtttgaattttaacagataagctttttaacccaagcaaatggtgattggatttggtagagtagatgaggagtggaggtactatagactgagagctataggatggttgatcctaccttgcttattctgtctcaaccccccactcttttcattattctaactgggaacaaaatatatggactcagcattgttttagagcctgcagctgcattccatccacccctcccccccttctttttgcagagctctccccagctctttgggacttagtaaaaacaaagagtcattactggggagagagtgggttggcacagcccacagggaagacgcagggccaccgatgtgagggtcttctgtacactgctcctctgtttttctcgagagccatgataatttaatgttgccttgctgattgctttaaatcctctctgaagaagtatgcttacagatttttttcctatgtgaaatatgtttagggctttaaattaatagatttaaatttaaattttccacaaaggatacttttccttaatgagaaattttatttgtctttttacatcaaatatgactgaaattgtaccttaactgtcatgatactgtcata

SEQ ID NO: 116568 - DNA, 1034 bp, Homo sapiens
cctcaaagtaggccctagtgtctgttattcccctctttatgtccatgcgtactcaatgtttagctctcacttataaatgcaaacatacagtatttgtttttttgttcctgtgttagtttgcatagggtaatggcctccagctccatctatgttgctgcaaaggacatgatctcattctttttcgttgctgtgttgtattccatggtatatatgtaccaccttttcttaatccagtctacctttgatgggcatttaggttgattccatatcttcgctgtttctaaaaataactcgtgattttactcctcaaatctctatctacctaagtgttccctatctcagtaagtggcagaactctctatcaaattgcctagaaattgactagcaacccttgatttgtctcctgttttcttgacatatttgatctatcagcaagtactgtcaccttcaaaatatcctgaatctaaccccacccattactgctattccagtcccagttaccatcatctctcctcaggatcactgccataaacttcgaggtggccttcaagtttctacccttcccccataatccacagcagctagagtgatcttttcagaacattaaatatgatcaagtagtctcccagtttcaagtccccaatggctccctttgtaaaaaatgttttagatgccacattttattaatttctagttttaaaaaaaaaaacttcatcttccaatctaagcttattttaccacttctccttatacttctgctttagagttcatgatcccaggaaacaaatctttatttgcatttacagtcagatttgacatataagctaattatacaattataaggcccacattaaatctgggggaaaaaatggtggaatactatgcttcaagtgttgttgatttatttatttatttatttatttattttattttatttttgagacggagtctcgctctgtcccccaggctggagtgcagtggcacaatctcggcttactgcaagctccacctcctgggttcacgtcattctcctg

SEQ ID NO: 116569 - DNA, 1030 bp, Homo sapiens
tcagaccttctgtggtttctgtcctattgattaatgaaacgtaagtaactctatataacgttcctggatttacatttcaagttttattttgaaatagtgtaattcctaaagtccttgaaggagtgctttcaattacctcacattacctctatttctgttttggtgttttgattcctttatttcttttttattggcagttccttatgaaaaacaaaagaatcatgagtgcataaaacttttgctatacatacacattgtaatggactattatgagcgcttgtttcttgatccagggagataacctagtctggaagactttttcactcaactgtgagcttattcaagggtgtagccaggcttgaactttcttataagattcacagagatactttaagacttaaatatgcttagctagaaacaagtattagcatattttaagataacatttaatatcattgcttttggctccattattagaaaccatgatacctcaagagccagaaaaagtgtccatgtaataaaaagtcagctgagtatcttaagatgttttttctttaataaaaagttaagaggtagagttaaactaccaaatattcgtttgttcactcagcaaacatgtatttatcttctgacatttgccagggatagaactaggcattggagatagaaagctgaataagtcatgaatggtccctgccaagaaagtgcttgtcattttagtagaagcaggcaaatgtgaaaaaaaatgaacactataaagtctgtgttcaaagagatgtcttctttacctgccatcctctgctcagcccgttgtttccaccacacccgtgaggttatacctgccaaggtccctgttaaaatccggtggtcatctctttgtttccatcttaccagacctcagtggtattccattctcttgaccacttcttcctattagaaacactttcctgattttcctcctacctctctgcctattctttctcattctcctttgcctactttcctctgtttgactggcctctgaatgttg

SEQ ID NO: 116570 - DNA, 2090 bp, Homo sapiens
tacataaacagtcttgcatagttgtgtttgggggcaggggctactcctgctctatccctgaagatcagaaagcagatgcctttaagtgggattctgctaacactttctcttgtcaactccattggattgaaatacatttttctgcctttgttagtgtcttctaggaaagtgataatgtttttaaaatttgtacatatatattgccatttaatttttcataattttagatgctatttacaaagcataagttcttatttaagcctccaaaattattgtccttcatagtagctcccttcaatgtgttacttgaccttttgttaaatcactgagtccataggtcagagggtaagtgacttccttgccttatcctttttttctaccaggtgaactttttagcatttgattcattatagtttaagacacagaaaagactcatactctgcttttttctctttctttttttgcctgcccatattttgtatgtgttttcaataatctgccttataaatgcagaagactgttcttaagccaccacttgagcatccagacctgccagcacagcactgccaccactgttggacatgtttattaagtaaaacagtgaggtttgctttagcagattctatttgctccacttttaaaatgtagccaagtttaatttaaataaattaatcctactgacttttaacttagacccattttcagtctgtgcttgattttaaaatgctttttatcaagtaaagtcaagtttgtgccccatccttcagtgtttggaaagtttattcagatgcccagttgctcaatgcaacggagggtgttcctccctgagaaaagtagtagccagattgcctaaaaagatagacagggaagcttggcaccagaattgggaagagaaagaaagaacatatgtgaaggattggaacatgttcaagaaaagaatttaaaaggaaaggggcgtagaattcttggaatgacttacagaaaagcttaccaaggacaatcaccagattcagcctttccatttgctccatttgcacttgtgaaaaattacagaagctgtgttcataaggcttattaggtaattggtgataaagccagcagagagaggaaaatgagaatttcagctgaactaaggctaggtcacttttaacaatttgtgatgacccttttctctgcaacagagaagcttaggagcccggcactagatccagcccaccatttgctagattgggccaaatgtattttagattgtttgagaaaatgtccctaaaatgtgatattatggacattcctacactgaagatgaactaagtcttacaataaagaaaacaacatgtatataacccaacatctgactgtcctgcatacctcagctccatacagaatttcctataacttatgcacaaatttaccgcagttctggagtagaatataataaattaatgtccatgtctttagagcaaattaaagctggaaaacacagcataactcgggtcaggttaccagcgaggattgctatctctgtctttttttatctccttccttctttccttccttcctatttttttctgtggcagtactatggctcttgagagccaatgttaaatcttcaggaagaactggtttaagagttgccactaatactttgccagcaaagaccaaaactggcatttgcatggtttaattcaggatataagaaaagggaattttattaattaagctataagctccttgaagattcatgaataaaattatcaccttgaattgacctctacagaaagggcatttggctgctggtttcatagtaactagattgttaaacaaatggcatgagtttctttccttcacagggatcctatatgttattggtctaaaatccttgggtcttaaaggattttagcaagattttagcagacagaaactggatggggaccacatctccagcagaaacaatggcataggtaagcaaagaagagtggtagctagggcaagctccaagaattgccataaagaccctgttctgcttaacatgaagggcaagagaaaaatgtagttgagtttaagagagaaaaagtaggtcagagcagatt

SEQ ID NO: 116571 - DNA, 1064 bp, Homo sapiens
ggcggccagcccctattcaggagcagacccgaggagcagagaaagacttgacacacagtgggtgggaagaggcatctctgggggcagtaggtcagccagctaccttgggaaaacaacaggcaactgtacagttgattacagcaagattgacagtgtacacttgtggggaaagtgggcagatgaggaggtccacttggggaagggaaagcgaagtgacagtaattggtcatgatctgcatgaccactggaggccccagaagggagtgctttgttttcctacctttgtatggccttcatttctgcttcctataccctagtgttttcatatttgggattaagtttacagtgctctaaaagcccctgcatttatataccagtagcttccaggagacagaagatcaaaaattctttctctgccaacccaccacttagttcttaatttaaaaaaaaaaaattactttttaagaggtaccaaagtcgtcaatgtctttgtttgcttctgactgcttctagtactttttccatttctgtacatgcccatttatgggtctggttggtctctacagaggcagcaaagggaaaggaggaagactttttcccagatctctctaccttaaagcatggagccaagtagcttgtattagtcctaggattccttttctcctgcaaaactggtggtagaaacagtggcatgcgggggatggtacataagctgaccatccttaaccagctcctatcaggactcactgtcagctcagccatggaaacactttttaaggggtgtggacaagcaagcaggaattggagtgaaactgtcaacctcagttggatgaaaactgggaagaaaccaaaaaaatgagatagatacctttctggtgactgaatgtaccgttggtacttactgcaggctccacccacctgtgtgtcctcagtgcccctcctcctgactcagccagaccagtgtacctctatgggcacagtaagagttgctagcagtaggcatctggctgagcttttatcctccagtggaaggatattaatttggtctttcttgtcttccatcg

SEQ ID NO: 116572 - DNA, 1055 bp, Homo sapiens
atcctcagagacaggacacaggcgctccgcgtgtgggggtgggaccttgtattcccagggacttggggacacaggcgctccacgtatcaggggacacactgtgtgctcgaagggatggggactcgggcgcatggtgaggggcacacggtgtactcatagagatagggacttaggcagtccgtgtaagggggcggcgcacactggaacggcggggacactggcgcttcgcgtacggggggggaggggacacacctgcattcccagggactccgggacaccggcgcatcgcgttactggagacgcgccgcgtccaggacggacacaaaccaacacagtgccctggggagagacctgaggactcacgcacacttagcgctccccgggagcaagacatcgggttctggagagagaggttcacggacgctcaacgtacccgaaaaagctcccggcgtcttgggctgactctgggaagtgtaaacggggaacgagccagagccagaaggtgtggggaggatacaatgcatcccgggcagagactcgggcctctcacccctcgttttcgagagaagcccatggacacacacacacacatatacacacacacccctccagtacagagagaggctcagataggcgcacatacactgtaattggactacaaatccagacgctttcatgttggaaaaaaaatgggagagacagggaagcaccgagaagggacgcggtaaccagggtgcatggggaaacagtttatggacatgcagtactgtgggagaccggagtggatacatcgcgtgagggagggatatgccatatgggggaacctgtaacgttttacaggagaggagagagtcggaagggagatagaacccacggggcatcttacaaatagcccgttcggtactgaggaacacactccaaccggtctcgtacaacagacagaggggcagaaggacaccgagacacagattcacatagttattcagctaaaagtggggaaaagaattgacatctgttgagctcccactagtgccaggcactttaaatacatagag

SEQ ID NO: 116573 - DNA, 1026 bp, Homo sapiens
ccttaaatgtgggaaattcacactcagcttcatcactcctgtcagtgaactggtggcagtatccaaaagagcaaagtacatttctgaaaaaaatccaagtggttcatattaaagaataatgagtatcagatgcattagggctctatcatgtaatgttgctaacgtcccctataatattcactgaagacaaactgggaaaatacagagaaatagaaaaaagaaaactaaaatcacctacaattccacaccctaaaacaaccattactaagaactttatgtaccaattcatcccagccacaattatatatatataaatgcatgagattaaaattggggtcatgctacagataaaaatttgcatttatcctattaaacaaactcactgagaacaccttcctagacaaaataacttttaagcttttgccttctcttcagttacacatgacatatgctaagtaacattatcagttcaggatagaggatataagtaaaagaaagattgacactgcccaggatagagaaacaagagtatgaacaataaatatgtgtgttatttctgaatataatttttttagtcatcaataaattatttatggggaagagttgaaaaaggcaggatttaaaaattatttttggaaaaagtacaggatctcaaaaatgcttcagagagaattagtttaagtttactagtggtctttttgggagggctcaatgagtacttattgtatggattaatttaagaagagctatacatataaaagtatgaacatattccctataacctaaatcctttctctccctcatctaagacttattccaaagtcccatgttttttctatatttaaagctgcataggaattttaatttttaaaagtagaagtgtggcaaggcatggtggctcaagcctgttatcccagcactttgggatgctgagatgggtggatcaccttgggtcaggagtttgagaccagcctgaccaacatggtaaagtcctgtctctattaaaaatataaaaattagccaggc

SEQ ID NO: 116574 - DNA, 1030 bp, Homo sapiens
tttgctttgccagcctcacaatcatgtacgccaattcttagcaatgaatcttttaacacagatcccctagtagtgttttttctctggttgaaccatgagtgatacattcgtctaagtccacagctcaagtactaaccagaatgctatactcattctttgtatatggcaaattaggaatttgaacccaagtccagaactctgtgcacatgccactgaatcatacattatgtttatcataccctgccttatcctgttagtttttatattttgcaccctgcaagctgataagcattttgaaagcagacctcaggttctccttatctcctttctcctatactgcatcatgcacacaggacacagctctcttgtcaaaataatatttgtcatacctgcacacggcatatgtcatctacagtcttgtttttatactttctcaaatttatgtgctagtattattttatctttcctaacttttctttcacctttctattttaattcttaatatacaggcttttaagagttgagaactttggtcagtgttgctgtcccctctcttatcaattactagaaattgcccttgataatgtaaaaccttaatgggagaaagaggtgacattctctcagagtgctggatggtgatttggttatctgggtttttttttttttttttttttttttgagacggagtctccctctgtcacccaggctagagtgcagtggcacaatcttggtttactgcaagctctgcctcctgggttcacaccattctcctgcctcagcctcccaactagctgggactacaggcgcctgccaccacgcacagctaattttttgtatttttagtagagacagagtttcaccgtgttagccaggatggtctcgatctcctgaactcatgatccacctgccttggtctcccaaagtgctgggattacaggcgtgagccaccaaggccggccggttatctattttaatctgcaccacagttctttcacggctggacctctgacaaatattgacaagtaaaatt

SEQ ID NO: 116575 - DNA, 1068 bp, Homo sapiens
gacaactgtacatttatacctaaacgctgtttaaacaaaatacatagatgcccaaatatatgtcatattgttaaggattatgggttcatataacaaaaaaaatctaatttctatcataaacatgtgtcaaaaattgaggcagaaatttgagatcttgcctagagtgcaaataccgtacaacaaagtatttaaaacaagtaaaaaaatattatagtaaaagcacctagtgcagtgatctaccaggtgtgcacagccaaacactggacaaaacaatgttctggttttctccaggaatcctcccaagtactgaatgtagttcttagaaccatagttccccaatatgaacaggctggtctattcatgactctttcttttaattcacgacatacaatccaatgaggaagaagcaagaatggaataaagctctgtgtcagtcagggttcttccgagaaacagaaccaatatgtatattacacatatacaaagagacttagtttaaagaattgacttcatacgattgtgggggctgataagtccagaatttgtagggcaggtaatctggcagcctagaaactgaggcagtagttgatgtttcagtcttgtggaattccttcttctccaggaaacctctgttttctgctcttaagaccttcaactgattggatgaggggcccccacttatcaagggtagttgctttgtttaaagtcaactgattgtttgttaataatatctacaaaataccttcacagcaacacctagattagtgtttgactaaataaccgggattaactaacaatcatggttacctatgtggtaaccatgttggaggaaacaagtcaggaaatttttcagatgtaacccaatctgcccaagaatggctggggaaaggagatggaacagatgtcatctcttgtccttccctccagacatcctcaacaccacttccctactgcttgtgcagccacagggatgagcaaaagggaagttgtgctccagatatgctaggaattagatcactgctaggaaacctggatgtaagaggtcaatatctagatgattttatgatg

SEQ ID NO: 116576 - DNA, 1017 bp, Homo sapiens
tacactgaggccaggtggtcagatccctccagaacacaatgtccctcctctctctaggattgttaaaccatcataaaccgtgcttcagagtatttttattctctttttggtatttcaaatggcaactaaagtttactgtagtcataacagtcttgctgcattatatgaacatttttacttcccttgaatctttacaagttttctggaagagcatataaagcaataatttgcatattgagtatctcaatttacctgtttagacctaactccaaaaatttcttctcccactaagtgctacaatctaaaccgatggctcttggtttcatgaaagccaaataccctatgctatggagaacactgagtgaaataatggcacatagacaaagtattgataccaattgtttctaaatatttctaacttaatgtttctaaaatcagggtgaattttagtgtttctaaaattagggcaaatgataactgaaagctaatagtgggtatctgtagggagtgaaattctaatttctttcttgcctttttctgattttaatttttttctacagagagcatgtatttctttttaaaaaagctcttcctccctcctatggagaatatatttcttttataaataatccaggcagcattataaagaagatttgtccatacctttattatacttgtgggatcatgatcatactgtactaggtactttaaaaaaaatgtataactaataataaaagtaaaatgagcagagaacactctgcttttcattttggaagcagtaaagcaagatacacatataaagttactaaaataagtagaaatgaattttccttcttattccatagtttagacagtaagagaaaaatcttcattttcacctggcaaggcagtctggtgtcagaggacctagagtgtgaatgaatgagagatctgccttctgctgctcatgaatgggttatgtgagttcctcgtgccctgctttttctcagctgcaaaatggagataattatgcctagt

SEQ ID NO: 116577 - DNA, 1219 bp, Homo sapiens
tgttagcaccacacacctaatgataaaggcaaggtgattgtttatgggctaggccctgttctaagcacttttaatgaattaactcattgattcctcagaacaaccctattaggtaggcatggctgttacctccattttatagatggggaagctgaagcacagataagtaacttgtccaaggtgatactattcagtggtagacctgtaattagaatcaatttaatagcagtctggttccagagttcaaggcagcagacactcactcaataaaggcttgttgaattgcattacactgtgagtataccagctttagatgtggtcttcctgctttaagaaatggtgttctgaaggtgactaaggagaaagtcaaatcattgttacagttttctggtgtgtcttattgacctaaaacaatatcaaaacatatcacagatgtacaatgtttaatgggttcattctgaaaggacacctcgaatctgttacgaaattgtgaagtacccagactatttcaaagagcaagattttgtagaacaacaggaggaaatgaagacttcctgacatggtcatttctttctttttttttttttttagctttattgaggtatgatttacataaaataaatttctctttgaagtatacagtttaatgaattttggtaattgtagatagctattataacttttaccataatcaagatatagataaattatattattctagaaagtagcctttgtgcccctttgcattttatccgttctcctgacctctggctccaggtaaccattgatttgctttctgtcactctagttttaccttttccagattgtcatatacatggaatcatacaatatgatagtcttcttagtctggattgttttgcttaatataaagcttttgagatccatctgtattattgttttgatcagtagttttttctttcttattgataagtagtatttcatgtcatagatatactctgatttgtttacccactcaccagttgatggacatctgggttatttccagtatttggcaattatcaataatgctgctatgagtattcatgtaaaattctttgtgtggaaatatgttttcatttctcttgggtaaatacctagaagtgggtttgctgggtctgccatactgtttcccagagtggctatactgtgttgtactccccagcaatatattagagtctggttgttcttatccttggca

SEQ ID NO: 116578 - DNA, 1033 bp, Homo sapiens
cctgtgtttcctgaatctgggggacttggggactgacatatgaggcatctcaaggcagaggcaggggcagtggagagaagagatgctgtattgagaatggccagcccttccatagttgactgggtaaaaactgactctgaggaaggagcagactgggtcatcttggcagcaacttaagagggagaaactacggagtgaggtgactctggaaagagacaggtctctagaatggagtggcagagtgggatggtggggaagattcttaagggaccaacccgaaagactattgcctggcaaagcagctgtggggggcagggcctctgaaaaccccataaagagcaggcctgggaagcttggttatctgccagatgcagaggtaaaaaccccagattacagtgacatctgacaagacagacctatattcccctcttctccatctgctgccccaaacctgaagagccacaatccacaactacaaagatgggaggaggtggagtgaggagaaagctgacaaggctgtcttcctgatgagcttccttgcctggatcagaagcagatctgagctgtgagaggggaggaatcattggttaacttaggtttagagttctgatattaaaatcaccctagaaaacagactatttgtttaagacttggaagtgactgtgatagctatgggactggtggagatttttcatctagagacaggaaagaacatatgaagacagcagattcaaagaggcagaggaaggagaggatcaattgctttctgtctgcacatactgattccagtttctttactatcctaacttgattatgctagtaaataaataaaatgttgaattataaaaccgtgacaccaggtgaggtagtgtgtgcctgtagtcctagcttttcaagaggttgaggcatgaggatcacttgagtccaggagttcaagtccagcctgggcaacatagtgaggccccatctctaaaaaattaataagcaaattaaaaagaatcataaaactgctcttaaaggatagtgcagaggg

SEQ ID NO: 116579 - DNA, 1064 bp, Homo sapiens
cttttactgtctctgtctcacatgcttagaaatgtgcttatatctgtgttcccttgctaccctgtacttatctcctgtacagtcccacactctgactatcagaaaatgtattttaaaaggaaaaccctgaatctcctctcacagacacttaccccctaaatcactcatacttaaaaataggcaatcacattgcaattcctgaggcaatcacagtctcctgagcattccaggttctgctttttcctttagaataaaaattctaaaacattcatgaatgactatgcaccaggcaatataatgagagctcaatgtggcaatggagaatcaggatttggggggagatgaaaacatcgactatcaaatagagcttccatagatgaaagggttgagcatgttattataaatgaaagaaatttagggataaaattcttcaaagccatgtagttcaaagagaaggagcacaggtgattcatcttttcaagtgatgtccatttgggacaatcgggagaagagcagcactctgggggttcatttggccttactctcaactttgttttctcatttcactgaattggcttcttctaaagagtagagtgacccaaggaaaaagaaagatgggtctccaggttggaactgaagtgcccattttgtagcaagcaaatgataattttatcaatgcttcgttgtttttctttaccagcaagataccaggatgacggcagccctgcccaagctggaccttcatgtgatacctgtttggcaaaaaggcattacgggcaaaggagttgttatcaccgtactggatgatggtttggagtggaatcacacggacatttatgccaactatgtaagtgtgtgccttctcatgactgtgacttagggagctgtctgtgcagacacacagttagggctttccttcttttcaaggggatgctgctctggtgtcagtccctgggattatgggccaaggttatgtcccttctcccacttcccactagcttatatgaatttattttgtaccagtgggcattgaaataattcagtgggatcaaaaattgtacaaa

SEQ ID NO: 116580 - DNA, 1023 bp, Homo sapiens
aggtctccaaataaaagagagtcttcaactaaaaaagattaacttttattgttatcaggacttgtatttagcatacacttaaattatgccactaaaaatgatacacctcattagcaaaacacccacccagtgagatttagtgagttatttgtaaatgttcccacacttgctattatctaaacttttgaaggtttagtacattgtggaaaaccacacccagttttttcttgaacgtaatcataagaatcagaccctttccatgtttcttttttttaacgtagaagttaccctatttttctgagatgggatagttataaagaatttgaacatctccccacaaaccctgttctgtcttaagagctgggaggggcagggcataactgggaagtggagatgatttagctatatgtttattgctttagtatttaacagcaaacatgaaattctttttttggctttaaaaacaccatcctctcccatttccattcttatgtctgctgtttctctttctcaccatgcttttctgactcactttcctttgccagtttcctaaatgtgagttctccagggtttgattcttcaccccttccgttctcatattttttacttttataaggtgttgaacaaacgtaattgcttatttcttcttttgatgccagattggaatggttgtaactcatagcattatcccttaaggaattacatacccatgcatcatttagaaaagctgggggtaatagcataacttgaagccttttattacacagttatcatggcacacacaggcaaaataatattctcccaacacattctgaaaaggcgtgacagagtggtagatagaattggaagtgagaactagtgctagttttcttgattctggaaatagttaatttgaaattcaaaataagtgataattttacaattattaagaaaactttaaagttttaaaaattaagtacttaatttgaagcatatgtgtaagctatgtattagagaatggtttctatatattgtagaattgtt

SEQ ID NO: 116581 - DNA, 1035 bp, Homo sapiens
aggaagaggaaggtgggggagagaacatgagtgaatatctgcatgaggtagtggctgaatcatggaagtggtttcaattatccagactcaggctcacaccctagtggcccccacagtgtttctagcattgcaattgtaacagtcacttatttagcacttacaattacatagcaagtacttacatagtgctgagcatgtgccaaacaatggttttcatacttcgtatagattcacttatctaatatctccaaggagaagtgacttgctaaagcctcaagcagccatgcatgtctcaactgttatgcaaaccttggcagtcagagcctgtgctcttcctgtgctttgttccctgagtttggataccttcaaatgggaaatggtccccttttatcttaaacccaacaacttcacccatttagtttctgccagtctctgaaagcatttgcctctggccatagagaatgattttggataagaccaccagcacagggcagaaatgtgcagagtgtatacagtggggaccaaagtaaaagagatgccagaggtaatggagaacaaagggcatagatgccacaataggatcagaatggtgccgaaaggtggcaatggggagggagagatgctccaagggtcaaatttcagagattacatctggataaaagcatggaaactgcagattgaaaagttgtttgcagtctttgatagagcaatggaagcaatgatgagcgatcaactcattttaaggaaagaggaggtgttgagatgccgaagtgagggatatggaagtcttgatgtgtgggggcaaagagccagagagcaaagccagaagtggcagcctatagaaagaattcatggatgttgtaaaaactggctgtgggccctggagaagaacagcgaggaaagaaacagtcttggattcaaatcttcattctgtcccttactgtgtaacctgaggaaagtggcctaatctgagccttgctttgcccatcactaaatgagactaatataattaaagcccttctgaaaaaggatata

SEQ ID NO: 116582 - DNA, 1062 bp, Homo sapiens
atgaatgaggacggtactgttattattcccattttacagtgaggaaattgagacacagagggcctatgtaaatagcccaaggtcaaggggctataaaatagcaagccaagcccaggacttagaactcaggctgtctggtctgagtcccagcgtctgaatcacatgcccttctatcatgttactgttgttagtgacaatctccacatgccctaaactaataccactctcctgaaagaacaaggggtagcagaactttgctgccaaaatcctgcataatcatagaaacggagtatatcatccgtgttttgacttattcagaagagaagtcatgaggaaataggaaaataataatcacatttaaaaaaattatacagatcttcattgtagagaacaggcaattttatttgaacaaaattcttctgaaactgaaacatcaagggaatgtttgaccaaataaaccattaatactttggtcctgaggtgtttagtatttcttaattgtttcatgaaaattttatcttaacgttgataaatgaaaaaatatgccctttataaattagctttgggtgttaagtatggcctcatatgtgttaatcaggaaaaaaattgctccatgaaaactttttttttacaaaataaaaaagagtccccttgtaatatacagcacttcttatattacagcctcggagtgaatcagaactcattgatgaactttcagaagattttgaccggtctgaatgtaaagagaaaccatctaagccaactgaaaagacagaagtatgtttctaaacatataaatctctagttttgaggtttgtgatcttaaaaaaaaattgtgagacagactgttttagcatcaagcagtctgttagaaagcccaatatgccatcgttttttccatgtcatttttgtcttcctttttggatgtgctttctgccccaacctaaccctgatattcttgcaattgaagtcctgcaatgactccttcggaaagctctggaacccatgccttccttcttatcccagcttctgtaactgacctgattggaactgtcaccaccc

SEQ ID NO: 116583 - DNA, 1060 bp, Homo sapiens
aatgtgaaaaagcacagtacctttgctgtgttctgtgaggtttctgtagtggagggacagctgtccagatctcctgagagagcatcaatggggtcttggtcatctgcaggtttctgagatatgagtagaaataaccatcagtgaagaagcagaaggcaaaatgcaatatggggtcttttcccacatcacttacaaataaaagatgtttctataagaaaaaaactgactgacattctttattaataataatgtattgtaaaggagatagaaaaacaagaaaatcttgatggctttttttccatctactctttaatacacgttgcttagcattctctgagcctcagttttccaccctaaagggcttttgtgaagactaaaagagaggtaaacaatagtcacacacatttatatgcatgctttgacaaagtaccaggcacagagtaggcattcaatatgttttagttttctaaaatgccaaatacccctatggctagaataaaacaaaatttaatggaaatatgttcctatggtctttacctttgaatcctctgatttctttgtaggtggcttcactggtttgtccttaaaaagaaggcagactattggttaagcatagatatctgtaaaggtttacttaggtttaggcagtagagaatctattgtcccatgacttgacttggataaaatggagtgtagacttgcaataactaataaacctgagtccccactatttctttaccagctttgcttaattactattctttataatcatttgtgtagacttgggggaaacatatgaaagggtctggtcctggaagtgaaagaaacactatttgtgaaccttctgccatcatgtattatcacttataattctacttaaagtgttataaaaagttacttgtgtttttacatcttatttactatagcttattacacttagaaagtcatcagggatttttcccagcttcaaaggcaagggccttaaataataaatttcccaaagaacgcaagcagggtgagttggtactatcaaagtgggaagggctctagcaggatgtgg

SEQ ID NO: 116584 - DNA, 1039 bp, Homo sapiens
tgaataaatatcagagtaaatattggtgaacaaatggatgaggttaagtccctgatacatgctgggtttggggctttgcactttacctgcattatataactacatccttcaccactgctcttcattttacaaatgaggagactggcttccatagaagttaaatcatttgctcaaatcaagttagtaggataaacctgttttcctatccctgtattgtgctacttattgcacagaaattgttcttaaagagccaagtctgaatcaaatattcagtggagatgttgcatttccaaggcaggtgaagacagaagagatgattttgggtcaggacaagggtaagagtaatggttaacagctggcttcgctgttgtagaaggtctgtttttagtggagctatcatgatgagctcctttaggattaatgatttgaacaattagtaaaattattgatgtgctttgttgagtagtgctcagtgatttttaatcgactgtgaattaatcttgcattctgagagcgtatgaaacagtaggttgagctacaacttaaagtagagagtgaagtgttttccaggttgctacagcaggaggccatgccttctgctcattgtaaagttgcactgtattgacatataattttaaaacaactctgcatcatttaaaattgaattctgatctttctaaaacccattcctactcccctctttattcccaaactaataatatggtattatgacatggatttctaaggaactggctgtctggaatctatgctgaataaataatacatcatggtctacattcgcttcctgaataccaaatcaaaaattgatggattaatgctgtgaaaatttatgggaaaaggataataaccctttaaggtgaaacagaatcgcacaatggtcaatcttgtggcaaagccagcctatctgtcatgtgagctcaaggggtgaattaagatacccacaaatgaaacaagaacaaacatatttttcaggaggtagccaagagtttcttatctctttaaaatcatggggaacttt

SEQ ID NO: 116585 - DNA, 1066 bp, Homo sapiens
cgcgtctaggcttggtggacttgtcagcgcctgcctggcttcggtccccaacttgagcaccggccctttcctgcatgcccctaaccctcgcaacgctaaacagtgaaaaaaaaaaaaagacaaaaacaaaaagcatctcaacacacacacacacacacacacacacacacacacacacacacacacacacacacacacacacacacacacacacggatccgcgttcagaaaggcgtgcacttcctacgcctgatcccccgcatcgcaacctcgcagcttccccggcgtgcagcgctcatttaccaattcccttcctgggagttgcggcttccctcgctcggccccactcccgtttaccctttccccagctcccgccttagccaggggcttccccgcctgccgctagggctcgggccgaagcgccgctcagcgccagcctgccgctccccgggctccactttcactttcggtcctgggggagctaggccggcggcagtggtggtggcggcggcgcaagggtgagggcggccccagaaccccaggtacagcgcgctcgagccgcgggtaggggactgcgggccgggaggagagcgcggcacccgccccttccctgcgcccgtcaagtggggggctgagggcctggggcacgggaggagggagacggggcacgggaggagggagacggggcgcgggaggaaggcgacggggcgcgggaggaaggcgacggggcgcgagacagggcgcgggaagggcggggggagtcgctggctaggcccgagtccgcggggtgcccggcgggttggcggcgggcccacccctgccggtccctgtccctgtccctccgggcgcgtggccggtgcgcctgcttcacgggtctccccgctgttcggccggcgggagcctccctcagcgctccgcctggcgcctggatgcctgccagtcctgcaggccaccgacgcccgcgcgaggccaaaaggcggggtggggcgggcagctggctcgggctgaggagggcacctgcccatagctgctagagaaacccagaggctttgggttaaagactctg

SEQ ID NO: 116586 - DNA, 3825 bp, Homo sapiens
acccactcactcgccatcacatcaccccgatttaattcgcagcggggcactgactttacactcgtgtgtcttctgtgtttatttatggtctgtttctggaatgtccgctcctgggactgggaccatgattttctggcgcagtgcgggtgtctcggcgtccgggatcgggcgggtcgcagtagggctccacatttgttgagtgactgaacaccgttcccggccggggagagcgccgcagccgggtccacttcaggtaggggctgggctttcccggccccgcctaggccccgcccccagcgcgaacccgctcccacctcgcctgtccacggagcagcagggggtttgactgtgcttttccctcttgcttccctcgctctttctgcagctgccacgaaaacccggaacggcggagcggcgccgcccctcgcggcacctccctggcagcccttggaggccgcgctgggcatgctcagtcagctgggccgcctcagctctcggagtaggaagctcgggcgctccggctgtaaggagccgcggcggggggaaaatggagcccttcaccaatggtgagtgggctgccgaggcgccgggacccgggctctccggagccctgagggtcgtgggcagtcgtgacacgcggggtcgggctgcagccgtctcccccaacaccgcgggcttcccacgagggctgagggaggcagggagaggggatctgggggaggcagggaggttcggggggcgggcggcggccagtgcgggacccggggctggcttgaaggtcagcgccgccgccgctcgcccggggtgcggccggtgggcaaacagcaaagtttgggctgctgtgcgcagaggagtgggcagtgggaaagttggcagctcaggtttgcccccggaggaggcggtgtcggcccgactctcctgtaggagcgttaagttgtggcagctgccgagcccaacttttgtggggcgccaggagctgtccccctgcccttcagtgagctgccggcgtgacttttcctaatagggcggggtgggggtgggaggcttggcaggttaatgttgtggaaggaagggaaacttcaggaaaggcttgctcacctcgctcggtgccgcggaggtgcctggccacagtgccaccctcctgaccctgccgaggtactcggcagggccaccacgcatcccctcactggctgcagatcacatcagtttttcagtcaaagacttgttaatgtcaagggtccgtcacggtggtgataccactgtgtgacaggaagcgagagtcaacgcagggagcctgcaccctgcaaacagccacagcccttcactgaacggggagcataaatcccaccctagttagaaccatggcttttgtgcggaccagaagtgccagagccacaatataggggtgagatgtcttaccgttttgcggtgttgagtgtgtggattcccttttaagatagaaagtaggaaaactgccagtaagggagacgactcactaaaagaggattcagtctctggttgacatgttttgctgagtgtggttggttacttcaggtacagtatcacattaataggggccacagtctatatccctgtttagtttgttagttaccactcaagagcagacagatattgtccactttatcccaaatcccagccagactttgttgtatgctgtgcttcattcatggggctgtgaactactgattatattctccctattcctaatgtagaatgctttattctactgccatctttctgtctgcactgtttaattaggcttactgataacaactttaattctgaattttctttctcattcaggttctatttgtaattactaagacttaaagaatagtctggtgaagttactcgaagaattaaggaaggtttgagctaaaatgaactagagaccatctagtactttagtgtaaaatatgtttaatacaagtcgttaagtccttgtaagtgactattccaatgttcattctttgtttttggaagaatgcttggagttaccatgtttttaaatgtgaaatttcatctaaattaaaaaaaaaatctctgtgatgaggctgactcacccatttggtcaagattagtgctagctgatttgctgaacctttgcctacagaattaaagtactttctcaagttttaaaattggtgtcttttctcttatagaatatgcttctagattgcttctagatgtgggtatttgcaaactgtcacatttgggaggacaatggaaaaatcccacagaagagaacaaaaaaagaagcaatgcttcaactttcatgtaggaaattggatttctgattctttcctatctttcagagttgatgctggagacagcttggcagtgcataattttggttaatgtagcaatcactccttggagccttatttagcatccttttacaaggaaaacagaaacgacaatatctacagtcaataagaaattaaatgttagcaatttgaagtgcttttcaggtttaagatggacagggtatttatttgaaaacttttgaaggattgctgtagaattttctagtgttttcaaatgacatggtacagtagacagttatatacttcatccttttgagtacaaaaaataatgcatgtataatgctcccattggtctgggtgtgatgatgcagagtatttcattatccatagaatttatgattgcaagatttatcaagcctggtattggattttgttacacgttcatcctcttttaatggaatctttcccacttacactttttcatgtatccctatatatgtagagaggtgtatgagcttaacaaaaaacagtttcagtaatttaggaccacatatcttttagttaaaatcttgtcagtggttccatctactgacctatgcatttgtaaaggaagtgaatttagcttatatcttgtcactctagccttcaatactcatctattccagtacgttttttttgtagtttccctgttttctgtccaaagttgccactggtatgacctatttttgttgggccctgctctctacctgttgataattggttcatttgatgaatatcctatgttaacctgttcaggtaacatacttctgcaacccatttaaaatgcatatccctggaaagggcttataaggatggatcttagtgctaggaattcccatttagctcaggatctatttttggctttgtccttgggagggattgctattatgttgaagtctggacatctggtctgggtttggatctttggtggctttttttatgaagagagatgtgctggaccagtacttaagattgttttggcaataatgattatgtcttattaggcaggtagaggtaaaactgttaagtaatagtgatttgtatattacaaaaaaaaaaaaaaattgaaggcaactatctgcttttttggttagagatattagattaaataattctttgatgtttatccagatttttgtcttcatttgcatgcagggttggtatattttgtaaaaacttaaattcatcttaagaaatgcaaatgctaaggttcaccctcagaatctgattaaggaggtctgattatatatgaaatacatactagaaagtatgtatactttctttttttttttttttgagacacagtctcactctgttgcccaggctggagtgcagtggcacaatctcagctcactgcaacctctgcctcccgggttcaagtgatcctcctgcctcagcctcccgagtagctgggattacaggcgcccgccaccatgcccaaataatttttgtatttctagtagaaatgaggtttcaccatgttggccaggtgaactcc

SEQ ID NO: 116587 - DNA, 1035 bp, Homo sapiens
tagataaccagagagattggttataaggaaattatatagaaaataagtggtaattttctgctcagtaattcaatcatacagctatcttttgaatgcccatttacaagtagattttctgctagacacagttacattaaaaaaaaaaaacccacaacctcgtcatcagataatgcttacctaaataagagaaatgaatagaagaacctagttttgttgtcatgctaatatgaaatatggaaacacagaagaaataaaaaagcaataaagttttgtctaagacagtattctaattatgaaataaatgtacagaaactgttcataactgtttgcatgtctactaatttagtgtaatactcctattaggaaacagcagtattaaccctgtctatgaaaacattaggaaattgagatttgaaagagtttagccaagattaccccagatgttgggatggacctagatgaggcctgtggttcttggcagtcgaggtgaggtcagtgcagctatgttttgtcaattagtcacctcatgacttgaaaactgtagggcagcagtccccaaacttttcgggaccagggaccacagtcggggggatgtatgtatactttctagtttgtgatatattctaaaggggagaaggtttggggatgactcaagtgcattatatttattgtgcactttatttctattattattgcattgtaatatacaatgaaataattatacaactcaccataatgtagaatcagtgggagccctgagcttgttttcctgcaagtagacagtcccatctaggagtggtgggagacagtgacagatcaggcattaaattctcaaaaggagcacacaacctagatccctcacatgcgcagttcacaatagggttcgtgctcctatgagaatctaatgccaccactgatctgacaggaggtggagctcaggtggtaatgctaacgatggggactgactgtagagatgaagcttcacttgtttgcctgctgctcactcctgctgtgtggcctgattcctaacaggcc

SEQ ID NO: 116588 - DNA, 1419 bp, Homo sapiens
ccaagatcctctttagaggaaaaatttatagagattagtgggaatgatgaggagaactcaatcttgagagctcaatcaaaaggagatgtttaaatatctttttaagttggtattggtaaagtgctttgaagacagaaagaatgtaatacatgtctggtgtctgcttgtcctataattgtcggaagggcctcaatgatgaaataagggaggctgccatgacacttgagtcttggtgagaggagctagtgtgtccacatttatcaagatcacctgcaggagtttgggctggccccctcttattagtagtttctctgttttttaaactggaggctcagcgccttagtatctagattgggtagctacattatgaagataactcaaactgaacaatagagtattgggtattagtgggaataagaaatgcattgctctttaaagcagcagcctcacttccatctgcatcagtacaggatactgagaggcttggtagcattccacttgtaggaagcacacagaaaaataattgaatatagaaaagagggtctagtgtgacttggggattagataatagagcatgttgaattagatggaaataagcacatgttcactaaagtgtggctagctttgttccagtccagttgttcactgcagttgggcataattctgttttaattaattaccaattcaggaaatattattgcgataaagacttgaagaatttatgcatagaatcttgtcttggcacatcatcgaatgacaatgactattagtagaaaaaatgtagttactatcccagccttttgactaatccataactaattttttaagttggttaatgataagcaaactggccctcagtcagttgtaaattgatgacaaagttgttactataaagactgaagactgtcgtatacctggtgttttatcaatccaatgagtcacatggaaaagtattacaaaaaattatctgcaaggtaattttttgttcagatccttctgagatctggcaaataaatgtattcaccaactgagatttcttgtttaactcacaagttttctgtatacattgaagagttcttataaatttcctttgcagatcccattcagtgatatgcattctttgttaaataactcacagatactcattatgtctaatgtaatttttcattttaaataaggaattataggttaagatgttcttttaagactatagtatagcgaattgatggaatttaaaagtaaactttttatctttagatcttgtgaaagtatttgcagctatgcagatttgcttgagagattaataagcataaatatttaggcatcattgacaatgtaaattactttatattgctaaatctaacaggggccctaagcattgttaaagactggcaccctatattgtgaggaaagatttaa

SEQ ID NO: 116589 - DNA, 1769 bp, Homo sapiens
cacatatgtagctcagtgattattctgtaacttttgcaggttcatgcacagatttaagggatcctcttttctgattctctcccctctgggatttcccccatgctgtatagcctacagggtctacttctggtttctctggatagaaatatgggactcattggaattttacctgttggcatttccacaccactctgtgaccaaagcctgccttcagggcaaagtagagaaaggaaatggaacaatattaaaacagaaactcacccctgtgtgttttgcttcagcaagtttttgaccctataacctattataaagtgaaatgaaaatgtggacacctgtgaagcggtccgagtgcaaaatttgtctagactttcaatttttttccccagtcttttagagttgtctcctacctaattcaacaacaattttagtggcttgcctttttgagtttttccagtgatttcagctgatcttctcagaattgctttcttcatctattttgcaagttaattgaattacctaatagctataccaagcataactcgaaatgccacagctgaacttgggcaagctcctaactccactaagtacagaagtggagccgtacagccatgaatgtcaggcatgttgtggggactagttgtattagttttctattgccaccataacaaattaccacaaacttaagcaatatagtacaaatttatcttaaagttattggcaggtcagaagcctgatacggatctcattgggctaaaacgaaggagttggcagggctgtgtgttcctttctgtaggctctgggcaggatccatttcctgcacttttttggcttttggaggtcgtccacattccttggctcctggccctgctccttcatcttcaaagctaccaaaggtaagtcatgtcctttttcattatttcactctgatagcctcttttgcttttttttttttttttttttttttgagacggagtctcactctgtcaccaggctggagttcactggcacgatctcggctcactgcaatatctgcctcctaggttcaagcgattctcctgcctcagccttccgagtagggattacaggcaccggccaccatgcccagctaatttttgtatttttaatagagacgaggtttcaccatgttggccaggatggtcttgatctcttgacttcatgatccgcttgccttggcctcccaacctcttctgccttttaaggacccctgtgattgtattgggccgtcctggataatctttccatctcaaggtctgtaaccgtgtccctagggattaggacatggacattttgggggctgggggaggattagtctgttgaccataccagttaatcttatttacagaggatgtggagagtaatgattaatatgttgagctgatgaagtagacaagtggctgctgtatgtagaagtaatgttggaacaaataatacgtcccagaatagtttctgtaaggctgattttactctgaaattttaattaatttatagttaatataactacctctgtattttgttgtagtcttttgtgggtagagttgaggaagagataggaatgggattattttgacatggctcatgatcaccaaaatgtgatccttggtcagtttacctaaatatcaatgtaattatgtttatctaatttaataatttgctgaaatcttccttattttttactttttatgaagcttttagccatttatattagatggtgatttttaaaacaacttttgaagacttaagtgacattt

SEQ ID NO: 116590 - DNA, 1061 bp, Homo sapiens
gttctcaagaatcagtgtctagtagaactgaaaggcagtgactcagatcccatagtcactgaaatactactaagtcctcctgatttaagatccagccccacagcaggtattagaaggaccttgttaaccttatagacagtgtatgaattttatcttattccaagcctccagtaaacctggattcagcccttgaagagtttatgcatggacatggaggtaatttttgtttatacttcattttaatatattagattattgctactttcatttcaacatttatggcaggtttcttccctgctaggcaccaggaatacaaagatgaatgaggttatgaacctctccttggaggaattattcatatttggagcaaaatttataattgcagtttacttatgcagaaattctttttttctacagcataaaccgggccttgagagtttcctaaaccttctatcctcaacttctaattcttgaacagcaaaaagttaccaggattgaaatgtatccgttattctagaaaagtaaatgtagagcaggttttggaactcaatatttcatcctaaatgtgaaagactgtataggcaaatagtgtgcataatttcctttttccagggttgaggggctgccagtggtgtgtagtggggagagagtgaagtgactcataattctggaatgattgttttgatctcctcctgtagcctctgtaggatactggcagggcaaccagcataattaacactacacagtctaattataaacaaaactctatgtacagtggctaccaagaagcaagcctgtactggataatcccccaagttggcaggattacttttagaatgattattagatagtgtcgtttactataaatcaagttgtttttctttgattgtccagggacttaccctggggggaaagtgaatataataatatttgtggaagtcttctgggttatttttttcagggcccatttaaggatttctttattgcagttcttataacctttttgtcttaagagaacatttgtacatcttactatgtatggcgtactcttttagggagag

SEQ ID NO: 116591 - DNA, 1022 bp, Homo sapiens
tttcagtgtttcttctaggattaataatatgcatcattaagtctgtgtatagtcagtattgtaccatttcacattctatacctgacccttcttcctttctgcttaatttctcttactcaacttctgtattctctgtgcttttgttgtcttttattttttggttttaagcatacagtttttaaagatagtcttttaaggaaattataagaagaataaagaatgtacaccttttattttaacatgtattatttctggtattctctccttcctgaagatctgagtttccgtctggtagtagttcccttcatcctgaagaacctcctttaaaatttcttgtagtatacatctacttgaggaaaatgtgttctaaatgaattctgtaagctgtcatttatttgaaaatgtcttttactcttgattttgaagcatattttcactgtatgtgcaaagttgagtttagaattttctttgtcttccaactctttaaaaatgctctatcatcttcaggcctccaccgttgacatgagaagttagtgtatgtactgttgttcatctgtatgtagcattgtttccaggttctcttaaaggttttctttttatctttagttttaagcagttttgaccatgatgtgcttaagacattattatttgtgtgtgtgtgtgtgtgtgtgtgtgtgtgtgtgtgtgtatttatctttttgggggtttgctgaacattttggatctggtaagtggtgtttttcatcaaacttaataatattttaactattatttcttcagatattttcttctgctgcattctcacactccttctgtggctcctgttagatacatgttagactgtctgatactgtcccccagatccctgatgctgtgtttatttttcttcaatcctttgtctcattgttcttcaaattggtaatttctaatgatctgtcaagtttatggactctttcttttgctgtctccaatctgccattaagtccatttagtaactttttcattttatttattgaaccttt

SEQ ID NO: 116592 - DNA, 1676 bp, Homo sapiens
attaactatcaaaacagaacatactttttttttttaacaagaaattggggcactataggaagtttaggagattatattcccaaaagcagtatgttagaacccttcttctttcatagtagatgggtagatggcagaatgctaaactcatacctagaaaatgattagaagttttattcaaataaaaattttaaagtagcataacttgtatacagttcaggttggagaggagtcaggaaaaggtaacctcattgtgatccatatgctccccaaagcagaaatgggtgaagtgaaatgaaaagaaagtttattttttaaaggtaataaagacaaaggaaaaacaaaaaaacataacttttcttaatttgtgttgtagcaagttaagctgaggtacggaataccaggtggatgggcatgggaaagggagatgatgacactgcaagcagagggaagagaaaagaaaaagagacatgtggaggatagcgtggaatagctgcctggcctgtgctcaaaatagtaagcagtttgggatggccagagcatactcaggaatggtatttagtgctggctgggatctgaccatggaagatgcttataccagtgcctctcaaacttaagtgcacgtgagcacccgaggatttgttaaaattcgtattctaggtggagacttcagaggctgcgtttctaacaagctgcaatgtgatgcaaatgctgcagggtcacaggccacactgaacagcaaaactgcaaattttatcctaatatttatcaataatatgttttatggatgaagagtttccaccattacagtgtttgttgaatagcacaaaatacatagcatttatcttaagctagatattcagtagttttttgtaagctttgctctcctgatggtgaaataatactcttagcaacttcattgccaggtatgaaataaataattcagggctctcatcttttattgaattagtttgagtagagggatgcaatataatgaaaagagcataaacttttgaatcaaatttttagacctgtgctttaatatcagttttatgactaaatagctgtgtgactttatgaagacgaattaatctatttctctttttctattttctcatgtctaaaatagaatacttgccattttataggattgttgtaagggttagaaatgataggtataaagtatcttcccttgtagggaagattagtggaggtttcaatttgataacttttgagatcccttaaaaactaaaattgtatgaattttaaataaaaaacattgaacgatctaatcctaggaagtactgatatatgggggattatcgacccttctacttctagagtcttttttctcagtgattttggcaaatcggaaggtgtggtttgttgtagtttgtaaaagctcccactgagatccactaacactcatggtgtgcagtatggttgtttcccatggaaatatgttgtacttctgaaagccatggaagcatgaaaaacagattgaattataattttatctgacttttattgtcttttgatctttttaaaaatcatttcttgcttatggaaatttcccatataatttgctgcttcccatttgctgtgggacagaaacattcctctttcaggggaaaacaataacccatcctgttgcttagccatactcaatcttagaaatg

SEQ ID NO: 116593 - DNA, 1134 bp, Homo sapiens
ggcctgttggacagaaattctgggattgcagtgcccaaaccctagaaggggaaccgtggactgtaggtgggcacatccctttgatcctactgactcctcgcctggtggggacagacatagtcagaggaatgccaaaacagtgccctctcaagcccagggcagggtcccaggttgtggggcaggagtatattaaggaaattagtatattatctcagctaactttttaaaaatataatagcctgtttatttagctttcttgtttcataactgtggtatacttttatttatgttttagtttttaatggatgactcaatggtataaacatcttatttaattcagtagctctgagatggaaataagtcttagtgacttaaaaaaattcttagtttaaatgtggtctaggtagaagacatgttattaatattatgagcttttttttttctaactctgtgccttgttcttatgttttggttttttagatcggcttcagctccccaggaatatgattgaaaacagcatgtttgaggaagaaccagatgtggtggatttagccaaagagccttgtttacatcctctagagcctgatgaggtggaatatgagccccggggttcccgactgctggtgcggggtcttggtgagcatgagatggaggaggatgaagaggattatgagtcatcagcaaagctgctgggcatgtccttcatgaatagaagctcaggccttcggaacagtgcaactggttacaggcagagcccagatggggcttgttcagtaccctctgcaaggaccatggtggtctgtgcttttgtcatcgtggttgctgtttctgtaatcatggtgatttacttactgcccagatgtacctttaccaaagaaggctgccataaaaaaaaccagtcaattggactaattcagccatttgcaacaaatgggaaattgtttccatgggcacagatcaggcttcccactgccgttgtgccactacgctatgaactcagcctacacccgaacctaacctcgatgacattcaggggttctgtgacaatttcagttcaggctcttcaggtcacatggaatatcattcttcatagcacaggtcataatatttcaagagtgacctttatgtcagcag

SEQ ID NO: 116594 - DNA, 2240 bp, Homo sapiens
gtaggtgctcagtaactactggattgaatttgtgtttgttttaggtactttgcagcaactcagtttgaacccctggcagcaagatctgcttttccttgttttgatgaaccagcatttaaagccacttttatcatcaagatcataagggatgagcaatacaccgctttatcaaatatgcctaaggtactgttctgttccttgaatgtaaaaatctttgaatgggtctctttctttaagaacacttaaattcctctttgccagactacagttgagaatgattaaaatcatatacattaatattcttccttaaaatacttaaataaaaattaaaatatattggcatcagttgggaagtcaccttgaggaggacttgaggaaagagaaagacctgctggacttggaatgtgtggataggaaatgtgagtgtgcattgtatattaagttgtgcaaatattaatacaatgaactagcaaaagattagagtaatattttctgagacaggatgaatttgctattctaaactgttatttgagagtgttgaataataactctttttggtgttttattggtaaatgaaaaaccaatattgttataatatggagattgacaactagaacaggagcctctttcttagatgttagctctgtgtgggatgcagtgagggtgaaaccaataattgtttttatgccaaacaaaacctggagcctagggggtctttttttgtttttttttttttggtcttagacacctgagggactgtgcagcttgataggagcctcctggacccatgtggctaagggagaggagcagcagccatacccagcaggctatggagccaatcctgtaggcagcagagagcataatctgtaacaagacagcactgtaccagcttactctgcacactcagccatactcttcaccttcatctttctctaaagaggcagatgcctactttaatttgtggttggaaaattctataaggttgcctacattccctcattttgtgtctgctgcagacttctctaatgacttactactgactttgttcccactaagctttcttgggggtcctcaacatggcaccccatgaagccatttcagatcatttgaagggatgtcgcagctagagctccttctgtggatgtatttgtagcagtagagtggagcaatcccaggtcataaggaaggattttggttttggaggtgttctaatgggagaagcagaaccaatgtgactatctttaacttaacatttatttggtcatctttgggactaaaaactccttgaggagtttcactgtgctccatatgtcctcaggatgaaggatggtacaacagactgagactaggagccatgctctttgcagaaattcatactgagaggttataatatgctagcatctttaccatttatttcctatttgaattttcagtttctcagtttgtttgttattgccatttattcctatagttacagaactgtcttttcccctttgcttgtagaagtcatcagtcgttctagatgatggacttgttcaggatgagttttctgagagtgtgaagatgagcacttacttggttgctttcattgtgggagagatgaagaacctgagtcaggacgtaaatggaaccctggtatgttgatgtggtaattgtctgaaagcctgtgtcacaagaggctcagaggacctcttgctttaacgattcctggtatttgctgtgtgaaataaataagcttttagatcacactctgacattttataccagaaatgctacttttttgcttagctgttatttactgttactagtttaatagctgaaagtcaataattttcaagttttaaaaaattttacttttaaagagaattttagtaagacactatatgtatactaaagcttttagaactgagtggtagccactagccttagggggaatatttagatttaaataaataaaaattaaatacaatttaaaattcacttcctcagtctcactaaccatatttcaagtgttcagcagtgttcatgtgactagtggctacatattcgatagctctaggttgtaaaaattagatgagtcctcccttttttcaaagcaaatcctgatgagattcctcttcctaatgaataagattgtctatttagttaagggtctggtttatctgtattttgccaaaattagactcttctgtttttctttatcatttgtacctgtttgtaaatgattatttgattggact

SEQ ID NO: 116595 - DNA, 1046 bp, Homo sapiens
atgccttggaaacaactgtgaagcttcttgagttttttcaaaactactttgaaattcagtacccacttaagaaattgggtaagaatcaaatagtgtgtctgatttttgttataattagaacctagatttattttgtgaatttttttagaaagaggttctgcccaagttgtttgcagagaaaaccaaaaaccattattaatgctttaaaaattgtttgtatttgttaagattatttagatttcatgaatatatctgaagttggagcttaaaacacttaagtttatagggctgctaaaaaggtgctgtataagtgggaatttgcttatggcttagtctgcaatttgactaattctaacttccaagaaataccctatttaaataataaaaactgagtaacgggagctcaggaaagcaagaacatttcagtgctgttcaacatggagctagtcctagagagtagagtattggccgtgaactttgtccttcttgctctgggaagctgattgattgtaaaggaattaggcatctctttcttcactaagggacagtggaacagtgactctaaaagggtttgaacaggtcttcctcagctgacatgtgggtagagagcatacagagctagaataaggaagattccatttattgtgagtataaaaagaattcattgctttcacagtgataaaccattgaataaaatactttgagtagaaaatgcctaagatgagggaaagttgatcacttatttcctgttatgtccagatttggtggctattcctgactttgaagcaggagcaatggaaaattggggtttgctcaccttccgagaggagacacttctgtatgacagtaacacttcttcaatggcggatagaaagctggtgactaaaatcattgctcatgagctggcccaccaggtattagcaaccaaggctgttctgtgtcacacctgtggtctacttcatgtcctggagttattgttagcatttagatgctaataattctttttttttttaagcattgccttcttttataatagaaagatgctt

SEQ ID NO: 116596 - DNA, 1110 bp, Homo sapiens
attatttctgtttaagagttacattttatttaaaaccgacctcaggtaagggaaatgtatattttcttagtagaaattctagactatatataagaaatcagcgtaaggaccagtttttgttctttctctttttaaatttcaagtttcatttaaaaaaatatatgctaacctttttagaatattcatcttggatactcagagttggcatttgtttactttggtaatagattcttaattttcccatatgctgttgtttaggaaatgctaattttaatgtggccaggttataattgtatctttaaatttaaggaatattcatgaagtttacaatcttcctacatttttgaaagcttatatcctgaagtttagtgacactggtcattttttcctaatgatatttcacactaattagtctaattcacataaataatttactatacttttgcatttgatactacttgtgatattctaatcttttcattttttgacagtatgaagatttcttagatgctcgatttaaaaccatgaagaaagattccttaaattcatctcatccaatatcatcatctgttcagtcttcagaacaaattgaagaaatgtttgattctctttcctattttaaggtattgctgtgaacaaaaaggtagctggagtgggtttaaaatttcgtataatttcgtatgtgagcaagctgtgtgatttagattattttaaagattaaatgtttttcaggtattaatggtaaactataaaatgtttgcttctgtataaatcttggtcataacttttttgtgggtttttttctttctctgactctaacttaagttgtatgactagtattccagacaattaaccagatcttatagcgatgcatcttttaaagtcagtttactctccagatctacaggtagaatatgttcagagaaggtcctaagtaagctcttggctgtgttactcagaattgaggtatgctgtcaggtcaggactgccaaaacaagtaagcaaaaagagattttaagaattgaagattcgattttagaatctgaaacacacgccctgggtttcaaggtaaagaaaaagcagaatgttaaaccccattcggatcaccat

SEQ ID NO: 116597 - DNA, 1391 bp, Homo sapiens
taagatttttacctgaacaactggaaaaatggagttgccatttgctgaaatggagaagactgctttagaagtaggtttagggaaagaagggggaagaaacttccatttctaagtgactatgagatatggattagatatccaaatggagataccacacaggcagttggatatgggtctgaaattcaagggggaagaagtctgattagatatataaatcaggggatcatttggaaaccttggagttgggagatcaactaggaaggaaatttagatagagaaaaggggtccaaagatcagatgcaaggacacactttcttcattggaagatgaggaggattcagtagacgagaccgagaaggatggccagtgaatagggagagaatcaagagtagtgtcttgcagctctcaaggaggagcaggtgatcagttatatcaaatgctatcaataggttgataagatgagcctgagaattcacatttgtatggcaccaggaagtttaccagtgaccttgataaaaatacttccggccgggcatggtagctcacgcctgtaatcccagcactttgggaggccaaggtgggtggatcacctgaggtcagcagttcaagaacagtctgtccaacatggtgaaaccccgtctctactaaaaatacaaaaattagctgggcgtggtggtggtgcctgtaatcccagctactcaggaggctgaagcaggagaatcgcttgaacccaggaggcggaggttgtagtgagtggaggtcgcaccactgcactccagcctgggtgacaagagtgagacttcatctcaaaataaataaataaataaataaatacttacagtagagtgatgattagaagatggctcaagagaaaatggaaagagagcaaatggagatggcaaattgaggacaactcttttgaggagttttactacaatgggggaacaaaaaaacagcacggtaacgagttggtaacgaggagggtgaagttagggaaaggtagagagtcttttatttgtttaaaattaggaatgttacatcgtttttgttttgttaatgggcatgttacagtatgaagggaaaagttggtgatgcagaagagaaaggactgttggggacaacagtgagtacttaaatttatagaacaagtaatagctatgaagtgtgatacagaaatgagagtaataggtaataatttagttatgtgtacaataatcttgacattactacatttttatcaaaagtgaaattcattcaaaaactactagagtgcctactatgtagtgggcattgtttttgtcattggagttgagttttcactttttcctctcagcttactgcatagatgaggaaataaatgtgtaacagatacaggatgccatataaattgt

SEQ ID NO: 116598 - DNA, 1030 bp, Homo sapiens
tgtgtctccagcacacaataaattcaatgggtgatttaagcactggggatggaggtgtaggtgccacagaaaatttggcatgtttttctattaaaatgtttttataaatacttagcttttcaacactaacattgaaacagtgagtataccaatagaccacacagaatgactcatggttagaatagtgcacatgggaatctactcattaattctttttcaaatcctttaaaataattttaagacagttgaacacagtccacatctatatgagactaagtagcagtatattataactaagttctacatatgaaagtaaatttttagaatgactgtagtttgaattttagattcccaattcgataatctatagtattctattattttctttctttttcctcacttttttttttaatagggatcttctctcttgttgatgttgaaaacttaccttagtgaagatgtgtttcaacatgctgttgtcctttacctgcataatcacagctatgcatctattcaaagtgatgatctgtgggatagttttaatgaggtaagtgacctgggtaatttatttagctcttactgtaaaaagagaggagttcgtctatttatactttttagcatgtgtgtaagttaatctgtggtacaaagcatagttatttaagaaagggggggatggagcttgctatataaatatttatgaatggagcactaaattttatgtcaagaaatgggagtgctgttcttagttgttggaaaagacgtgtgtgggcttgggtagccagttgtttttttttttcctgtaccttaacttctattcctattttgtaggaaagttgtcttctccgtattaatgaatattactatattttcattatttgactttttttccagaaatctcttttcctatccttacccttttagtttttctgcctcttttgaatgattctgtactctgctctatgaatctcttgcctttgtgactgttcctccagagtagatgatacatcacaagctgactgcatattatcct

SEQ ID NO: 116599 - DNA, 1451 bp, Homo sapiens
ttactttatacttactgtcttaatctgttggcatttagaacatatttctgcctttctcattgactgcaacttttgcatcatggtgtttttccatcccaaactagttcctaacattatcctcaggtttttcagcacccacatcaaattatgcattggcctcttcacttcaatactgcttcgacacccaaaagcaccttggttttaggcaagcttattttcttctaatcctctggttcagaaataaataggtcagagccatgataaatacaagtttaattaaaatgggaagatttgctccatccttttgtgctttaaataaatgggcatatggtgattgaggtgaggcctgccatagtagagtgattttatcaatttaggtacatcatgactttgttgcttacaattcaaattcatatataatctagaaaaataatttgaatcctgagtttaacccacctgctttaaagagactgttgttcaaaaattgcttcttagttattgatactagatgtcttaggggctttgggccttagagggtctgcaaagctctgacactaggttctagattttatagataacttcatatattttctgggaaagaagggctgtgaccactaaagtagtttaccactgttttctagaaagacttaaggcaactgacctgttcatatgtcactcttctgctgccgctgctccctggcactcccacagtattaggtcctaagagactatcattgtggaggtggagggtaggagcataaagagaaacccagactcaggtgcttcacaggattgagtagcagtgtttctgattctagactgtatatcattattcatatcttgtagatgttagtattgtgatttgaaagaatacttataccttcttagggattttaacttgatgaatttagggattttaatgaattcttagttggttgatatatgtgccacttctcaacctagtgcctccctcactcccttagctatcacttagctctgttccaggttacattccttttagcagttgctcatttacctagattagaagtgtaaactcaacattcatgtttcttttttatattaacattaaatgtagtctttatagatggtaggaaaagagggaagggtacagataaattaaaatgtaaaattttttaaaccaatttttatttttaaggaaaaagttttatatatatatatatatattttgtaggtcacaaaccaaacactagatgtaaagagaatgatgaaaacctggaccctgcagaaaggatttcctttagtgactgttcaaaagaaaggaaaggaactttttatacaacaagagagattctttttaaatatgaagcctgaaattcagccttcagatacaaggtacatgccctctttcttttcatgccatctcttttgcactctcaggtggaaatatttttaagtgttttataatcata

SEQ ID NO: 116600 - DNA, 1022 bp, Homo sapiens
atatttcaaatcttaaaggtttttccattatatgaaattttttaaggaatgcttttcaaaaatgaagactgcagtaccttttgtgatttggtacatataaccaaatcgccctttttattgtgtagttacagttgataatgccacctgaaatacatgaatgtgccagtttcattgcagttttaccatagtggagtgttaaagcagcaacaatctaattatttaaaatcctagtggtagttggtaatgtcatcatatctttgatagcatagctggaagtacaaggaattgctactgtctttgagtaaacaaaactctaactttgaatgagccgtaaaaggatagtctctaacccaagagagaacaaataaccccatctccctatatcctgaagcacagctaaaacatggctggagtatttgcaagaaactaataaggaaattttgcaaactttctgatagtatattaattttcagtgctattagaaataattgggcaataagaaatctgcttttattatctgttttttgtttcattggttgatttttttgtttgttttttcttgtttttttttttttttttttttttttttttttgagttggagtcttgctctgttgcccaggctggagtgcagtgacaatatcatagcccactgcagcctcaaacccctgggttcaagcaatcctcctgcctcagcctgccaagaagttaggaccacaggcatgtatcaccatgcttggcttaatttttgtattttttgtagagacagggcctcactatgttgcccaggctggtctcaaacccctggcctcaagtgatcctcctgctttggcttcccaaagtgttgggattacaggcatgagccaccgcacctggctcctctttactcttttttttttttttttttttgagacagagtctcgctctgttgcccaggtgagagtgcagtggcgcgatctcagctcactgcaagctccgcctcccgggttcacgtcattctcctgcctcagcctcctgagtagct

SEQ ID NO: 116601 - DNA, 1050 bp, Homo sapiens
gactacaggcgcctgccaccatgcccggctaattttttatatttttagtagagacggggtttcaccatggtctcgatctcctgacctcgtgatccgcccacctcggcctcccaaagtgctgggattacaagcgtgagccactgtgcccaccctcctctttactctttacctgagtttattctgagcttgttgagctctttttgagagtttaaccccatagactagctcatattttactgctttagccttctaggcccttacctggcattctgtgcttttgccgcacaaaaattctatcagcaactcaaacatgccatactgcctctttaggtctttgcatatgctattttctctccttaaggaacacccttgcctcctcactccctcggcctactcctgtttattcttcagatcttagctcagccattgcttgctccaggaaacctttccttccctgaagacagtttagatgccctacttaggttttttaataacattctctacttctccactcataatatactgtaagtactgttcactcatatctatcctcatattaggtatttcccccattgacggtagtgatcatggctatatgaatcactgtaaatcacttttagcacttagtaggcacacaaaaacttaatgaattagtaaattttagtccataatgaagtgactccagtctcactataaaaatttctaggaaaagaacatgcaaagcctgataaaatgatgttttctttttctcttcctcttcttagtaaagaggaatatacaaaattcactagaatataattgatttaatctagagctggaactgggccaatacatgatgaaagtagtgtctgttacttcctcttctcaactgtgttatttcccttgctgctgctgctgctattttaattcctgccatttcgggtttagagagtccacatgaaaacttctgtccttacgtttgaccctgaggacagctgagccttcttggttcctaatgctccagtgagaattactcttaatttaactgcatttttattttttctattctca

SEQ ID NO: 116602 - DNA, 2795 bp, Homo sapiens
ctcctgggctcaagtgatcctcctgccttggtctctcagagtgctgggattacaggtgtgagctgccatgcccagccctagggttctttcttgataaaagctccataggatatagtgtttggtgacctggagagtgttgatatttttggattagctaatgataaagttaatttccttagtcataggtttgctaaaaatggcttcaacttggagcagccactgctgccatcacaagtatcccttaaaactgcattctgcccttgaaaaaggaataaaccttatttaactgatctttcccatctgttgctgtatcagcaatataacagaaataagtacggaatttttttagtaagaaagactgcttagcttattatgtcctgttaagacatgatcagaatgtctttttcatcttaaacatcttttgcagtatcgatataattggaataacaaagatattaagggcatctgacacatttgaataattcatgtttttgaaattgataaatcctaaggtttcaggtactaatatataatctttagtacctaagctaaggcttcaggtactaatatataatctttaggttgaaaacatatttataaagcattttatataaaaaaccttcactacagaattataatgatagtgaacattttaaaacagcctaaattgttcaaaatagattggataaacttgaaatgaaatattatgaagatatttgaacactgcttatgaagacaatggaaaaatgtgcggggggatctgataggtgaaaaaggataaaataaatgcatatagatctgctgtataaaatattaaaaacaagtataagacaaaaacttggcaagaagtacattccaaaatgctatcatcgtctgagtttagattattcttatctctactcttctttttcttacaattaaaaatttttttaagtatttgttactttaaaagggggtaaaaattatataataaatatctacaaacctttgtctacacttgatttaaaactatttattgtgacatagtcattatttattcattcactgactaattcagcagtatttgttgagtacctgctaggtcattgttataggggctgaggcgttagcagtaagcaaaatagtaagcttatgtagcttatattctattaaataatagtaaacctcaagatgcttagaagcataccccattataattaagtctacatccttgttgccaactttaaaagacatttcttcattagcagttttaaggattttaaaaattcatacatatattttgtggtcagttaactctcagcgcttcattattggtacattagttgacataattccatggaaatttctaacagttctctcagcatttatagtagagaccccagaagtgcctatcctttcctattgttttaacccaattatttcttatttgtcccttatgcaatcttaagccttccctaatgtttattttgctagctttaaataatgtgacttttctaaatggctttgtttgttcttcctttgctaacatgacaaaagacagaggccaaaatgggacacattttacacagttctctcactgtcttcccctgctgcctcatcctacacctttactttctccctccctctttcctctagccataatgaacttgggagccagttcagtgcatggataacatgtatactttctctctgggccttgagcacttgggttccctactatatcttcttcacttggccaacacctacatattttgaggtctcttagaagaatgacaacttagatgtcatttcttccaagaaatcgctcctaactttccctaggagagggaagcattttttctatgtgcattcgttgaatgctgtcttttctttttctgtcaatagcgcttgtatgatattgtacttgcctgtttactttagactgtgagatctctaaaagcagagacatatctaccttgttcaccatttgatttccagcacctagcttacagccaatattgcacagtaaataaataattgttaaatgaatgtcttgaccttcactaacgtgaaaataactgtacttggagacaggcatttttttcttactagaatgattaaatataaaaataaactaaaaaacaaagcactcataatttttttttcttgtccaattgtcttctctctcaatctctcatttttttggtttccattaggtgtcatcaatcttacagaagaagtgctgtgggtcaaagtgaatataaacatgaatggttattatattgtacactatgcagatgatgattgggaagcactaatccatcagttgaaaataaatccttatgttctgagtgacaaagaccgagccaaccttatcaacaacatctttgaacttgcagggtagagtatacttagtttgagattttttctttttttaaacaaatgtcattgaggtaaagaacatatatgaaaaacagtttgaaagaactagcatgtattggttggtacaatacattttggaggattgggaaaatatgtgttctttgcctccagggactttataaaacattagctacgaacatactgaacagttaaatgaaacaggatttaataataattcaagactagatatcaaaaacaggatacatattttgttgactaaacttgatacacgagttcaagctctattttattttataagagaattattttcaaacagcagttggtttaagcatgaagcttagtgcttatgcattggttttgagggacatctctgatggctggagccaccttatctgtactgcttgcctccccaa

SEQ ID NO: 116603 - DNA, 1586 bp, Homo sapiens
actgtaaattcacaatagaccttgtcataacaagtttgaaaaacaaattcccattaaaccaacaaataaaattaaaaaaagaaatcagatactctctatgctatactctctttcctggcaaatataactaattaataaataaaattagtactattcatcttttctaacccaagatattatacttttgctgagttagtagcaatttacaggagacttaggaataaaaaaaaatgagctattgtttatctttctcttgaaatgcctctttaatcttgggcctcatgaaattaatcagagataatcatatttagcttaactttacaaaatgccactgtaagtttaaatttttggtctccaagactcaccatctaaccctaagtttctcttttagcatgcatagacttcttctgtgtgtctctgcatatttacttttcctgttcttttatcctttagcctaggcaaggtacctctcaagagggcctttgatttgattaattatcttggaaatgagaaccatactgcacccatcaccgaagccctgtttcagacagacctcatctataacctccttgaaaaactgggatacatggatctggcctcaagactggtggtaagtctgcctttttgccagcttcttgctgtttatctttaatattgttattcatggttccattttcagccagtaataggctgaaaaagcaaccagttaaattccattttcttcactttcctgcttgtgaaatctttacttaaaatcaagatgttgcttatgatgaagagctgataaaggcttagtatgatatggtcttgtttgaatatcaaaatacagacatttgacaccactgtcaaaatgaggtcacatgagaataatatttctctattcagatcctgttttatttctacatgatgaatgtttgaaataggcccttttgcaaagtagatctccccattaattttctagtggtcattataaaatgacagttacgtttgtattgagaatattctgtttaagggttcttactgataactatctaaaggataatgatgctggtggatatgtttctttgcaaagcactaaaggagtcttagtattagagaccattttacctttcttaatatcaactgcctgatcttaacagttgttattttggatacttttaatattaaactgttgagagactttaaaagcttggaagagagtgaaaaattatttgtttttatctaattctctgaatcagcgcattttgacaacagagtttgctttataaactagtgagatttcccagggacccaggcaaaaggcagcttttagggaaaggaaggcagtattagaccaagaattagaataagtcttttggggttttggtattctcattggtgaaaggaaggggttggattaaatcatttttttaacattttttttattatactttaagttctagggtacatgtgcacaatgtgcaggtttgttacatatgtacacaaccttctttctgcctctgttactgccttaccctgcgtctcctatgaacagttctctcatcacctgcatgattctcagtgaatggagggaacgcagggcagag

SEQ ID NO: 116604 - DNA, 1050 bp, Homo sapiens
ccttaatgatttcatatggagactaactagtaaaattgctccctgtaattcggtggtgtaactgctcaggaattagccacagccatcttcaagtgtcagatttcctttgcttccaggacttcaagtgccattctttccattgctgcctttgtgttttagtaaactctcaatgagtattgccattgttcttcactgattttttttttaaataagatttcaagcatgtgattttttttctcacattcttcatttgttcctatttgacagttatgagtaggatttgaatttcttttgttctccagtcatttggaatggttttctatcataatgctattgagaaggtaaggccagtgaagacaccacataacaatgcagttaggtatgtcaagtgggatcccctgcattgcttgtccgttccttgcatcgtcagcgtagcaagtatttttctacttcatgtcctcccagtgactcaaaagctttaccacttacacattccacaaggtgtctgttctgtgtttcattgcttttgaaacaaacacaagcgagttgacatgttatacaaaccttgagttcttttccttgcagattctttttttctattctcatattcaactccacaagatgcttattcacagtaagtcattgctaggataatggtcttaatagtttaaaaatttccaaataggattcattttaggtattgacagtggtactcagtggtactcactgtcaatacctaaaagaaaggaagaaagcaatgttctgtgaagaacttgagctaaacttctgaagttaagggttttgcttgtggtcatctgtggtacatgattacttgagatgagatgccacgatggtggtggaggtaaagaagtaccagcaggaagaaatcttcctgtgcttattccttcagagggggtatctgttgaatttttttcattttggtccttcttatgtagccatgaaggttttctaaagaatacctaaaaacggccaggtatggtggctcacgcccgtaatcccagcactttgggaggccgaggcaggtggatc

SEQ ID NO: 116605 - DNA, 9890 bp, Homo sapiens
gattacttctagagggtggcatatatgataatgaggaaaaaatctgattccattctcttcccttgtctccctaatacaaataatttaagtggtcataaaattgtttggaagaattgcattcttggggtgaattcatagcaccaagcctttggactctactttatttattgttacttaaacatctccttggttccattttaagttagaaaaatgtatctgtgtgggagtaaaaagatttcctttttaaaatcatttcagatatcaccatacttgattgggaactccatgtagataccttgaatattaaagtacttctttctactgctttcaagatagcagcacagccatcactaagttaaagcttattttaaaagctggggttacctgaggtttatcgtccttttcttcttttgaaattcttctgtgtgaaacttacaggttcaggcattctttgaaaatcagtcagaggcaaccttccggcttcgttgtgtccaggaggctttggaagtcattcagttgaatatccagtggatggagaagaacctcaaaagtctcacatggtggctgtagcatgcacaaccgcacctcattttgttgcccattcagagagcttgtaagcttgggctctgccgcttttgcaaaagccaaggtaaagccaggatcgctgccaagttgtttgcactctttggagttctagttagctcagggcctgactgtatttttcatccatcttttctgaagtgtctttgggcagtatgtagttatttattacaaaattatattcacctaaatgccaaccatctacaaaaacaatgagtaatttttctactttgaagatacacagatggggacaaaaaccctgttttggaattctgttctattcctcagtatccagaaagttactgacacagtaaaacaaggaaagttctaccctaagagccgccatcacttcaggccgctggtttgtcagccatctgttgcttcttattgatagatggcattggaatgtggtacaaagttagctctgaagaatatggtaacgaagacaataaagcatgcactgtaagaactgacctcaggtgtgcagatctactttgatttggggttttgattaattctttatttttctgaaaaaaagtttaaataatgtctgtaactattgtgtttttttcctgccgaatagccaggtgctacagatttttaaaatttttgttgtattgaaaagctaaacaaggccaaaaggttaaattttttgaatatttaagactttctttttcatcttttatagcgttaccataggaaactgttccaaactgagttagctttaattataattattttattcataaatggtgatagtccccagatctgtacacctttatcactccctgccgtagatatactttaggttagtatttctacattcgtggcaagcattttggtaacaccagtggttttcattgtgacttttatcactatcactaagaatgcaatttaagttgccttttggcatcatagatcatagaaactttctctctgaatcatacccatgtgtgaattttcattttatatgatagtgtagcatattagaagcatattttaaaacagagcctttgagaaattgaaaaacaattatttgaagttcaccatagtaccttaaaggaacaaagagaatgtgggataggagtaacttgaattcgtgtttagtatggtgggctttgaatttttttcactatcaaaaatagtgcttttgtttagttaaaaattgtagtttttctttttttgtgtgtccaaactaacataaaaggagtggtcaaagaaggaaagaagaaaaatgagggaggatgtccgaaactgtatggcattttactccttctgaaagagaaatactgtacttgaatttttgagctatgcagacttatacctagattgttgtgtttctttgattcttaggagaaaagctttcttcctaataattcttgagaactttatattttgtttgaaaacagtttctatgtacataaaaagggtatttacccatttgtgagcacttaaaacactccacagagtcagacagtgggaaaggtcaccctttttttattcggcaggtatcaagttagaatgtatggaattgtgaataaaattatattttattttatgaaaatatttttatataataaaatttaaaaggctggtaagctaaaaaaatagtcttctttaatcctagtgtgttttccccaatttagtcttttctaaaatttatctgttttagagtagaaaatattatatcctgagaatcacagaatcatctaaatatgtcttattcaactgaagtgattgtaagtctttattcttgtgctttggttaaatgaatgataatttagttgatagtgaaagttaatgtgtttttatatttttagagtgagggaaaaatactaaacttttgagagttttgttgtcgttgctggttttttaccatgtggtactaaattccactttgatacaaaatttaaattttgtaacttctcaaaatcacttaagattcttcagttttacctgtgcttcttgacatcgctcctataatgtatgttagttaactctgcatatggcaaatcttgtcttgaattatatcatttctctccctctctctctctctctgtgtgtgtgtgtgtgtgtgtgtgtgtgtgtgtgtgtgtgtgtgtgtgtagtgtggggggtattgttatgagtaaaactttatcaaaacttggcctgaaaaagagataactcatgatccattgctatctttattactcaaaggctgttcattcccataataccagatccataatagttgtagtttttttgatgttgttgcccttaccttaattatttgtagttttagtaggccttgcctcagtttttcccacagaattccataattttaatgttgaactaacccatctatataggacttctaaaaactacgtcaggaatgtaaggttaaatgagaggtagaacttgtagtgtaataggtataatggtagctttcaaagttttatcttctcaaaacattgtcttagccagtgtatttctgagaactcagactgaagcacagaagtcacagtatgcttcttttatttaagcacacagattcatgacacaagtacttgttgaacaagtgttctcattgcagagagatctacttgaatataaaagggtcatcatactagattattaaaaaagaattggaaatcttgagttgtggaagaaatgtttatgctttggagatctaaaaaagttatgaatgtaggaattagataagtccagtttgttctgttaatataaaatggttagatatattaaactgcaagtagtatcagcttcaccataagcttgggccttcctccatcttgttttatttaagtctctttaaatgaaattttgttgtcattgtttcagcattcatgaactttcttactatcacaggttctactttaattttccttgccatatgtgtttccattttgtgggacattagccaccacaggaacacaagagttgtcagaagactcctgggtgtacagagcaaatcaagctgcatcagtattataggataccaaacagaatcctttctattaggaaataagaaatcagttaagtgttggctgggcgcggtggcttatgcctgtaatcccagcattttgggatgccaaggtgggcagaccatttgaggccaggagttctaaaccagtttggccgacatggcaaaaccccatctctactaaaaatataaaaattagctgggcatggtggtgcacacctgtaatcccagctacctgggaggcacgagaatcacttgaacccaggaggcggaggttgcagtgagccaaggttgtgccactgcactccagcctgggtgacaaagcgagactgtctcaaaaaacaaaaaacaaaaaaaaaagagttaagtgttgattttgttggattactgacagtttgttgagatggattttaaaaagagtctatttaaaccaaagtacctggaaccataatctgccatcagattgctaaacattcacataatccccatgtttcatggggcttcagggaaggcaaatacatctgagatgagccacctccaaggacagcatttcctgggctgcaaaactagatgtggattttgttacttaggcctctctaaaaactgaggccatggatatgacatagcttttcttctcacctatgcctttgttacttttgtatttattggaattaaatctctttttaaagagcttccttcccccttcatcccatttgtatttttaaaaactaagttatatatatatttgcttgtttttgcattcttttattttgtgctccattccctgctttgccagttaagtactacctgaaaagtagcggttcaaaagtatggtaaatctcctcccttaaccttattgcctgtgtgggtgacagctaatggaaaagttgatcgatttttttcagtggtttttttgggagtatatactttaaaaatgtacatacatgtttttgatagtttttatattatttcattttgtatatttttttcctgatgaagagtgatatatcatcctatgaaaatttcatctacccttcccattttacctgtatgggcagtagctacagactagttatttggtttccttctttggaagaaggtggtgatgttgagaggagagcaagctatattcttttaaaagtgtgtacagatgtttttgctattttgtgttatttcattttgtatttcattcatccattttgtggacgtgtagataaaacgcggtggtccaaaagcatgacagatgtcccctttgcgtttctccttattgttcgcatggacaataactgacagagtagtcctagttgctgttgttttgatctagtcttggggctggggttgtatattattctttcaagtgtgtataaatattgtgccacctttttatacttcattttatacttgtttccttgtatggatgcatatatacttaatgaaaattgaggttcagagtatgacaaatctcttttcccttttccttactgcctatttaggcaatagctaatagagtagtttgttttgttttggggtgtgggggagagtggagtatgtacttaatgtatataaataaacttgctactacattgtattactaatttggttcacactgtgtccttctcatggatgtgaaagtaccaatgaaatgtggagatctcgatgtataacagtctcccattctcctcatcccttattgactgctgggcagtagctaacagagtagttgtcaagtggcgtatttgaggtgagggggagggacggggaaggtaggaaaatgcacttaatgtatatacatgtttttactactacattgtattaattcatcgggtgcccagactgaaaggtacctaatgaaccatggagttccggatgtataacagtctcctcttttccctttcccttattgcccatgtgggcaatacttaagagtagtttgggtttattgaagattttttgctaggagagagaaaattttttgctaggagaggtttcaaggtaagagtatatactttaaacatgtatataaatgtttttgctacttttctgtcactacctttcttaccttgtcctttacatggatatatgaagaaaattgaggttcagcctgtagcagctctcctcttctgcccttcccttagattgtctgtgtgggcaggtgtctaagagagtagttgattagcttcagggattctttggtgggtgttggggtatatacttttgtatatgtatgtacatatttttatttctttattatagtgtttcattgggtacccggtccttcacttggatgtgtaggttcctaatgagccatggagttatggatgtataacaatctgttctccctttacccttttaatgtatatgggcaataattttaaagtagtttggatttttttaagttttgaggggtgggaggggtctaaggcagaatatatcctttttaaaaatgtatatatacttttcattaactatattgtattatttcatgctgtacccagtccattgcttggacttacgggtacctaatgaaacgtggaggtccggatgtatgaaaatctcctcttttcccctttccttattgcctctgtaggcaataattatagagtagtatagatggtttttcttttttatccatctgcctatctccaggaggatggggtgtgcacttttagaaatgtatataaatgttcttgctcctttttcctgttacttcattgtgtgccaaggcctttccatggatacttaggtacgtaatgaaaattgaggttcattctatgaaaaaatctccccttctccccttcccttattgcctgtcttggcaatggccagtagagtagttatttaagggattttgtttttttgtttttttgttttttttttggtaggggaggtggggaatttctgggtttgtcttttttttaatgtatataaaagtttgctagttgttgttattgttgttctttcactctcaacacagttttttgtttggagttgtaggaatcaaatgtaatgagggacccagacccgagagtgtggtaaatattctttgccttcctcagagcctgtatacacaagcaagtagtatgtgagcactacagggcttgggttttggttttttgcttttgagggttttaatgaggagtgggattgttgagaggaaaaggcaagatatataatttttttaatgtatataaatgttttgctcctttttgatgttaacttcattttgaatctggtcctttgtatgaccacttaggtacttaatagtaataaagttgagattgactctatgaaaaatatcccatactccccatccctcattgcctagggggcaatggtagaatagatgtttggtttcttttgggggtgtctgagtgtatatgtgtgtgtatatacacacaagaacacacatatttatatactatacacacacattttaatgtatataaatatttgctacattctgtgtgttatataatgtggtacccagtcctctgctgggacatggatgtacataatgaaacatggaggtccagacgtatgataactctcctgtttcccttccctcattgcctacaggggcaatagtttcatatcttgggttttttattgtttaatttttttttatggggaggggttctttgggtgggtaatagtcagggggaaaggacagtgtctatactttttaaagatgtatataaatgtttcatgttattggttttgtacctagtcctttgcatggatatataggtacctaatgaaaatcgaggatcagtgtatgacaaatctcccatcctcccctttccttattgcctgtgtcggcaataggaagtagaatagttgtgtgttgtttacttacttgtctgttttagagagatttctatttttggtaggggaatattcttaatatgttttcatatctttatttcattttgtagtcttttgcatggctatgtagggacctaatgaaagtcgagtttcataatatgacagctcacttcttttcctacatatttcctcacttagcagtagctagtgtagttattttgtggttattttatttcattctctaggatctattccattaaggatgcaagtgtgtagatgcatatatatcatttgcttctttcttccgccattattttcctttaacacttagtcccttgcaaggggtctgactatacctaacaaaaataaagacctactaaatccctgccatctggctggaaggtgtagcagtgtattaatgtaactaatagcaacaggtgtgcagcagataagacaggagaagacactcagctatggttgagttgtgaaagctaattagatccagcatttcttatgttgattcagattgaatgaggtagtgaaaagggacctgtgcttttgtaaattctagaaaggcaagaggacaatattgaataaagctgtgtttaaacttcattgctcatatatcttttagtaactggtaaaccggcgaagctgataagccaataagagtgctgtctagaacgcatttgcaaaccgttaagagtagcttctttttgaggcctggacttctgattcatctatagaagtctattatgattccatcaattgcatagcttgtgtacctggtagaaattgtgtcttggaatgaccctttcgagttattgacatggctctgatgaatagaacatgagccccaaaactaaatccaaaaggaattttctatctttcatcccccacatgtggcaagacaagttggccctttcttacccagaggtcttttgtgtgactgcatctttctcctccgttctccattgtgtgctttccattttgtctttagtgcctatactgttaggtgttttcttcactggcattcacaaatttaagccattgctgcctcattagccttgtattttgtgtgcatatcatgtatccagacctgtatgttcgctttaagcattcttatatcacactgtctcctcatctaccatatggtaaatgttaaaactccacatttgtctgcatcagggaaaatgcatgggcacacatcctccctccctccctctctgctctcctcccttccttcaggcctcttagcattgtttgttttcccatttctgatactactactccatgctgaagatttgccatattactattttggaaacattgagtgatagaactcctagaaaatttgcaaagaaatgttacatactgtatatcaaactctcagattctagtgttgaaaaagtagcctatactttgctattacttatacctgctgccatagaaaaaaataagtttattcatgacacatttacatttgatcataaataaaagaaaaaagggcacctttttggagttagtcatggtagtcattagtgatatttctgaacagttcttaatttaaaatacttcaaaggaagtaaaggtcatggcttagctgaaggaaatgctccagaaattggactgtgtaaaccatcagtacaataatacgctgtgtatgtatgtgtatataaaatgagaattatggcataattggagcatttgcattaatcaacaaactcacattgagacaaaacttagttttacagctgtcttgattaaagccaagtgttccatgttgctgtgaagaatagcctctttcaaatactttggaaagtagttacttggaaacttgtaaaggtattacatttttatatttaaacacctatagagatcttcaattccttgagtctgagcttgtgggtggaattctaaatttgtatcataatctgtcttttgtgaaacattttgaaaatatgtatatataatattgtatatgcaaattgtgttgtttcacttgtaaagggaaaaggcttatttttctttatatttctgataacttgttttgcatatgaccagcactgactgaaaggcatgtgtagctgcaaacactgttgctttttttgtgaaatgaaaataaaagtatttaaatacaaacattgtgtggactctttggattaatgtatatataaagtggtatctcttcttaggttatgacctctaccagggcagctcctgtactcattgtcttctgtggttagttttttatttcaccagtatccagtgtctttattgcatatacctcagttgacatttgacattcggaggtggctaattctttgttgtgggggctgttctgtgtatcataggacatttagcaggatccctcccatgccaattgcaactagttgccaatagtaactcttgtccccagctgtgacaactaaaacctctcctccagacattgccaaatgtcccctgaggttagggttaaaac

SEQ ID NO: 116606 - DNA, 1027 bp, Homo sapiens
cctaattacttccacaggcaggttgctccagcatgaaacagggccccaggggacagtctcacctcctttgcctcaaattccctgaagcatctcttttcaaacatcagtcaagtgtgagccaagtccttggccttgccaatgtaaaggcaatttcgtcccttgggcaaaaattgccaaccttaatgggttccagctgttgcatggttgagtgccctctcagtcagcctacagcctgccctggcatttcaaagggctcctgccaggtctgtgtcacccccacgcaaaaggtgaagctggcctttgaaccacgtggccttgccctgtggatgtgcattacctccaagggaaaggaaatgacttccttctggctgcgtggcctggccagaggcctcaggagctcagattacctggatcactcgagaggctggcagcggagagcagcccggatcaacatcattaaggcacgggtttcagcaacacaagcattgctcagaggacccaaggcagagcgaattttttcctctgcaaatctctgtagctcttggggacctttacactccaacatattatgaggtgaaaatcctgtggacatttgggctgtacagagaaatgatcagtatttggtattcacagtacagatgtgtgtgtggagtggggcagaggagggaaggcaagaatctaatccagtgtgcacattatgtctagtttatcaccaggattgccttgttgtgataacagggagcctggctctccctgctgggggaacatcagttgaaccagcagactttcctccctctgtgcttagctgacattttaaccctagatcgctagagaaatggcagcatttattagaaaccagatattcagatatttttatgccctacacaaaaaatctttgccccaatttactaaattactttgtttctatatgaataacatgtttgttattatataacatatattatgttatatcatagacatataacacattcatatgttatataatatatatagcatagccatataa

SEQ ID NO: 116607 - DNA, 1067 bp, Homo sapiens
aaaactactgtaactgatcatgtattttggaattagacttgataataaaagattatcatgtatcacatatctcacaccaggggaacaattagctacataattgtcataccttaatatcttttaaaggtaacagtaattttcaacacattttattttaaaatattattttaacaaaagttacattcctctccacaatgaggctaaatgtcacccacgaaagaactttattcccttatattcctgaaaagaaatcagaattaacatttttatgttgaataaattttaaaatttaggaaatgttctatttaaagttaatttctttcataaagccattactctttacattgtcatttccaaaaagccacaatttcccatgctggatgtgatgaaagttaggcacacctttactgcattagcagcctttgacaatgacttcctcaaactgacaccatcttaattagatgcagggacagggatcagatgggacaatatcaaatttactttgtgccctacaagttaaaaactgcacccattctgtaaattgaatatagaggttctcccttggccactgtcagcttttcttgactggccaaaactgcccattcttcctggaatggtatgaaagcttcagcaaaataaataaaagtcagaatctttgctggtccctttaatgctgatttgatagtaaatcaatttcagctgagacataagggctgtcagtctatcatataaacatctttaactatagcctagagaaaagagggttgaagagcaaagcagattttttttttccttttctatatcttgttctgaacaacacactgtgataaaggggactagagtggaagattccctatttaaacacatgaagctctgggtcctagccttttttggttataagccctttgagaatctgataaaagctgtggatcatctcctaggaaaatagaacaaaacatacatattcacattacacagttccagagtatgtggaccccccaaagtccagagattgccctaggggatctttagattcttgtttagaactgttgattttgaacacaaca

SEQ ID NO: 116608 - DNA, 1050 bp, Homo sapiens
gtctgtcaaggtagttaaaacatttctattttaaaagaaaaaaaaaagaatcctattgaaagattgacaaaatagacaattattacactccccatagttctttatatttttttctctagtgtccatgaaatgtttgaattatggtttcggtttttttttcctcctgcgatgataatcagttgatccctattttgatctcatcccgttaagcagctgtgagaaaccatcatttcgtcaccactcctttggcacttatggcctgtgctatttagtttacatttccctcatgtggctctgtactaagtgttacagcttcaatgtggtgtttttgtccacacctaagttgtaagttccaggagggcagagctgtaccttgtacttttctgtaacccccaggtaactcccacaggaacacacacctagcagtgcacaatcagacatttttggattgccaatggttgatttttcttcctcgcatgaagggggtaagattctgcccactgtcaggtgttctcctttacgatgaaataaactgtgccaagacccttttaagccatttatcttctgactccattatcacaggctaattacatgcagggttaagttgatagccagatgatacagaagacagcatcaagaaagtcggggctctaaagacaaacacaccctctcggctagagctctgccttgggttggccctatcacactctctcagaatcattccatatgccatgttggcacaatggcttaaattgcccatccttacattcatccattagatctacccccgactgtgagtcaccaaagtcatgcacgcaccatgctctttagagccaaactctgtgccttgtgcataaaccctggttagatagctgtggcaggatcttgagcattcttataatgactgtttccagggaaggaagatgcattacacaaagccacatttacacttatttgaccattttgactaagaagaactgatcagcaaagcaaccagcatgactaatcctttattggttgtctaaaatcattggtcctctaaagtctctt

SEQ ID NO: 116609 - DNA, 1058 bp, Homo sapiens
atagtgaacaatgaacaaaaacaaattcaaaattttactaatgtaaagctgtatattgtgattgttaaaacacttttttttgcctaggagttccagatttaaatcctggttctacacttcccaaacctcaggtaccttctgtggcctctctaacctcaatttttttacttgtaaaatggggacatttaatagtatacctcagtgtcgtgaagactaaatgaagtaccacttgtaaagagtttattacagtgcctgacatatactgtatggttagtactgctaaaatgacttcttaaggttaccaaaaggaaaattccacaagctgaccacctttcctattgtgatggtcactggtatttcagctatgatcctttgttgtgtatttatccagactgaaagatgtttttctagtaaccatcttgcatcgtcttagtctccccattaaataaacttttcctacaaactatgcggtttatatttgtgctaactttgtggtattgatagccattggtctgttctttggcacatagctggctatctttgaggtttctccaaaaccatagatgtttaatggatactaatcagagttagtgcagctcgagataatcattcttttagccaactgcttagtaaattttctgacaaaatacatagctgtctaattaaaaaactctgcctgatgctgccttccaggttgctacttacaaaggatagagggatgagttatgttaggttctcagagcactttctgaagtgtaggtttatttcactgtcacagattcagcactctgggtgggctacagttcgccatgcccagtcttctttatccctccttagaacatctccctagagagcatcaggccatatcttaattcgcccttgctttagtttatgaagtactggagccatcttatgcacctgtgtaaggaggctggagattaaagttcagaaaagccatgggttacacagttgtgtaataaccaggagtatggggataactccaaagctacaatacttttatagagaactgtgtcattcacaaaacctatgttgttaga

SEQ ID NO: 116610 - DNA, 1070 bp, Homo sapiens
ccatgtgaaaaacattagtctctaggttgcagattttcctaccctagtggagctgactataatgagtactgtctgtttccattatatcttctgtttgtgaaggtggaaagagtctcaaaaatttagatagggagagacagatttatatagttcagtgaaagaagaggagaggattattagaaaagggaagatgaattgtggggaggtgataaatttcaatggcttaagcattctactgtttttaaattttgatagtgactaacaaaatgctggaaaatgaaaattgttaatgtatagaacttaacagtaggtagttttatcttcacagaaattttaaaatataatgatctttctgaagtattttatgtcttcagttttgctgcatgcaaaaaataatataaattaatcaaatgggattcattacattatacaaattaactagataaattgtgggttttttaattttagagatgaagaaaatgtgggagctatgaatcagtatagaacaagaactctgagtatcacttcttcaggcagtgctgtaagctgttcaacaattcctccagtaagtagtcattcaacatgtactgaatgtttattacatcactactgtgatctgattgccttgtctcattaaacaataatgtatgcctttcaggtacagacttctgttgattgctttttgacttgtcttgaaaccagtactttctttgattttaataaatgaatgttgctcaaaggatgtggtagagttgtgtcctgccaccattatgtgtaaaatgaaggccaaatgactttttgttggtaaaactcaaaacaccttctttttcaattgtcctgattttaggcagcctgttgactaaatttcaagtaattttttcttagaatacaaactgatgagtttcaaaaaattaatgtaggtcacttgataaattgatcaggtttgaggtggatgagtcattcttcatatgagctgaagattaatgagcttggtcactgtgaggattataaggtgtgtaagcctcagacacttggacgtacatgttaatggtataaaattttgttgttgt

SEQ ID NO: 116611 - DNA, 1717 bp, Homo sapiens
acattcattgaaatttgtgtttttcctttatcaaggaccaggaggtatctttaattgattctcaaaacataactatcatgtgcattctcaaagctcagttttctcatatttattttatacacttaagatattttctgatctgggatgagtcacataatctgaaggaaatccttagccccctttgaaagttaatttacaaagttaataaacataagctgaggtttttataacctttttatttatattgttgcttttcagttattttattcttaaaatgacagccagcatatacctttcatatttgtttacctgtgtcatttaaatattacattttagggaaggaaaatttatttttaacatataagctattaaactcacttgaatcataatttatcagagtagtagatatttgctcctcttagataaacattttttctctctttctatgcttgacgccttttttttctaggagagaagacactcttgatgtggaggtttctgccagtggctacacaaaggaaatgcaggcagatgatgaactgcttcatccattaggtccagatgataaaaatattgaaacaaaagagggatctgaattctcattttcagatggagaagtggcagaaaaagcagaggtttacgggtcagaaaatgaaagtgaacggaactgtctagaagaatcagagggctgctattgcagatcatctggagaccctgaacaaataaaggaagacagtttatcagaagagagtgctgatgcacggagttttgaaatgactgaattcaatcaagctttagaagaaataaaagggcaggttgttgaaaacaactctgtaactgaattttctgaggagaaaaacagaactgaaaattacaacaggcaagatggtcagagagttcaaggaggagtccctgctggctctgacgagtatgaagatgaatgccctcatctaattgccttgtcgtcattaaatagagaattcaggcctttcaggtatagacttctgtcgattgctttttaactttagtcttgagactgatactttgttagattctagtaaaagaatgtttttttcaaatgatgtgacaaaattgtattctgccaccttgatgtataaaatgaaagccaaataattttttgttgttaaaaactcaaaatagcttccttttcaattgacctgattctaggcagcctattgactaaatttcaagtaattctgccttaaaatacaaactgatggctgggcacagtggctcgctcatgcctgtaatctcagcacttctgggaggccaaggcaggcaaatcacctgaggtcaggagtttgagaccagccaggccaacatggcaaaaccctgtctctactaaaaatataaaaattaaccgggcatggtggcctgtgcttgtaatcccagctacttgggagactgaggcaggagaatcacttgaacctgggaggcagaggttgcagtaagccaaagatcgtaccactgcactccagcctgggtgacgagcaaaaaactccgtctcaaaaatatatatatatatacaaactgatgattttaaaattattgcaggtctctggatacattgatcaggttttagatggatgagttattcctcatatattttcctaattacacatctgatgtgtgtttgagttatgtaaaggcatgtaaatattaaaacatgcaataaatgtactttctatatgaaaca

SEQ ID NO: 116612 - DNA, 1539 bp, Homo sapiens
ggttatatacttaaattttcactaatcatgggagatttcttaaggcagcataaattagtaatactgataccatacatgtcaatgtacttcttatactaatagtttgtatcttgtaatattcagtcagtaaatgagcagcttggtagggatcatttacacattttcccaaaagggtagtaggtgtttttcaggatatttatattgaaggtataggaatggaatctggttgcacataaatgcactccttaatgtattgattattcataagagaggaacaagaagataaagattgggctatagcatgaggtctaggcgatagcacaagttctagacaaatattcacaatctttaagtttatcacgtgctattgatctgtctaggtatgctcaaaatggtctacactgaaaaaaagtatttaaaaacaaagcaaagaaaaatatctgggaagtgggaagtggtttggttcttgttcacagaaggtaagcaatagacaaccttttgaaattaattgctggggtagtgtagggtgaaggagtggatgccaaagaaataaccagtacgatctgtgtcttaaagttgagaagataacacatgaaacagaaccttttatttatttatttatttatttatttattttcaagacaaggtctcactctgtcacccaggctggagtgcagtggcacgatcacggctcactgcagcccctacctcctgggctcaagccatcctcccacctcagcctcccaagtatctaggatcacaggcatgtgctaccatgcctgctttgtagagacaggaccttgctgtgttgcccaggctgctctcaaacccctggcctcaagagattcacccacctcggcctcccaaagtaccggggttataagcgtgagccaccactgcaagtctaagaacaattttttttttaattatatactgaatttagagaaacttcagtaagtgatagaatagttgatggaggaggtttcaggtagtgagtggagctgagtggagccatgaagcttggatattatttgaccctaagacagtgcattttggcagagaagtggtatgggcaatgacatgaatctatgtgagtcctatgtgtttaggtgacactgaggtgactgtcctgactgcgtttcttggtgtgtattggagagaatattgggagaactaggactgtacaggtggattaaagagttttgaaaaccaggaaaagtttatatttacaaactgaaaagaaaatttacagccaatgtaaaaaaaaactttttttgaggtgtagtcttgctctatcacccaggctagaatgcagtggcacgatatcaactcactgcaacctctgcctcccgggttcacgcgattctcctgcctcagcctcccaggtagctgggactacaggcatgtgccaccacgcctggctaatttttttgtatttttagtagagatggggtttcaccatgctggcaggctggtgtcgaactcctgacctcaactgatccacccgcctcggcctcccaaattgctggggttacagac

SEQ ID NO: 116613 - DNA, 1701 bp, Homo sapiens
gataacagatatacaaaaacagacataaattctaggtcaaattgatatacaaattgaacttaaattcctccttttatcttgtcacaaacacttacagacctgtctgtaggtcacattttgattatcagtacactggagaagaaatgcaaattataggaagaaattggaagcttgtgagcctgggcagtttatctttttccaatgaagactttattgttaaatctttcttatgacttgaacttacgtgacttggttgtacaatgtaactgaaatatggtctttatgctttgatttttgtctagctgtccagggctatcggttgacaaatgcaggatatgattacctagctttgaaaacactttcttctaggcaagtagttgagtctgttggaaaccagatgggtgttggcaaagaatcaggtaagtgctaatagtactgtgcaaagtattttctttgctttagtttatgttttcccttcagaaacctttcctcttttaattttcccttttttctaactaaacagtaagttggaaagttgattggaagcagtacaaatcagaaggtgtccttaattagtaggttattattttctctgaacgtctatcactgaaaattcatttataccaggaattaattttcttctaataactcccaagatatatcattatttatgtgcaaatataccagaatccaaaattcaaaacacttctggtccgaaggttttggataaggagggatactcaatctttattaggaaaaatgacatttttgatacaaataaaattagagaaagttagaattgttttaactgattggaataaacgtgtaataatggttgtttttgaaattttgtctctagatatttacattgttgcaaatgaagaaggacaacaatttgcattaaagcttcacagactaggaagaacctcgtttcgaaatttgaaaaacaaacgcgattatcataaacataggcacaatgtgtcatggctatatttatctcgtctctctgccatgaaggaatttgcctatatgaaggtatttattttattttgtagtcatgcattttttagccaaataatacatgtgtctcaaaggccttaatgacaagtgtgattctgttgtccccacatctctctaaccttagactcaattcctacagacagactcaatcttaaataactctgttgattatttgggctcttttaagtgatttccttctacgttaaggtattttaaattgttactaatgcataagggcaacacattctgtaatgctgacaagatgaaagagccaaaagtaattaatgatgctgttacctcacaaatatgtatgtgtggatgtatatatatctattcaatatatgtaactatacatatgtctgtttctaattgaaaacaccaggtaattatcatctgtagaaaccttagtgtctcagataagttggctagttttttgtttcacataaaggaacaaacatttatagatttatatgtatattaaaaatggtaaaaattggctgggtgcagtggttcatgcctataataccagcactttgggaagccgaggtgggcggattacttgaggtaaggagcccagcctgaccaacaaggtgaaaccccatccctactaaaaatacaagaattagccggggatggtggtggccacctgtaatcccagctacttgggagactgaagcagga

SEQ ID NO: 116614 - DNA, 1064 bp, Homo sapiens
ctcaaaccaaattcaatttttttctaccccctttctcttttcccaagctctataaaaaaaaaaaataataaaatcttaaaacttgcttttcctcatcacttccaattgtggctttccgttccctttacccttccacatctaattgccaagctctcccataatacttcctaaagatttttattccttccttccagtaccactaccacttaccctgttctggtggctctttcctctgagctggacttctgtcttagttctccggagtaccccctcagattttgccatctctaagccaatttgcatattcctggtacattaatgtccttaaaataaccctgttcgtgtgtctcccacgcctaaacatcttcaagagcttcctgctctcatcaggataaaatataaaagtatttggtctacattttaatgccttctctatcctagaagtatcttccagccgcgtttgcatgaattctatatgctatcccatctgagctgctactgtactcagctattctctgtggtcagtactttcttgcatatgtgccattttcaaatctttttctttcactaatatccccttgtctgttttctctgtatgcccacatcttttaaaagtcagtctctagttttgcatcttccttggaactgatccctcagctagaagtattcttattctgccctgagctacctttttaagcacttatcacttcttaacttctaataaacttagatgtataccattttttaaaatttccatcatgagataaaaatttctcagaggtaaaaagcacatatatatatatatatatacatatatatatatatacatatacacatgcagaagagcatgtaggatagagatatatatatatgtgctttttacctctgaggaataaatttaaaaatatatatataatatatatattatatatatattatatatatataatatatatatattttatatatatatattatatatatatataaaatacttttaagttctggggtacatgtgcagaacgtgcaggtttgttacataggtatacacatgctatagtggt

SEQ ID NO: 116615 - DNA, 1024 bp, Homo sapiens
tacatttatttaggagccgttatcttttggtaaggagtgaaccccatgataaggactacctatattgtgtaattatgtaataggatatgcgatgtgagtcacactggttcttgcattatgttaaggcttcaagttttggatttttaaaattaatcttaaatagcgcttaagtattaaactatcaaatgcaaaatcagtgtgaaatttggaagacaatgtttactttgcctctcatgtagattcttctaatcagctggactttctctatgaaaacctactatcacttcggaaagataccttcctttcctgctttctcagcacactcattccttagtgtctctgacagaagtaggggtcaaaagtaagagtgttagaggacgggggaggcagagacaaagcatggaaaataagttaaatttaaaagttaaggttttggtgagacatcaaaatgatgccagatttatcttccaaaacattggcgctgcaatatttaaattatttgtaaagttcaccaagaaatgacttagtcattaaatatgacattccggtctcagttgaatctcaccagtgttggtaccctttcttgggcctctcttcccttttacttctttggctcctcctatatcaataatcattgtttgactagctgcccttagctttcaatatgaacttgccccagaattctgctcccaaacattccttttcttccattatctcctgctcagtgatagcatccacttcacatcttcaactctcacttctataaaataattgacaatttttccttctaattataacttcattcctaaatataggcccctttcctatttaattttctctctttcttttttttttttttttgagacggagtcttattctgttgccaggctggagtgcagtggcacaatctcagctcactgcaaccttcaccttctgggttcaagcgattctcctgcctcagcctcccaagtagctgggactataggcgcacaccaccacgcccagctaatttttgtatttttag

SEQ ID NO: 116616 - DNA, 1794 bp, Homo sapiens
taaaaatattagcagggcgtggtggtgtgagcctataatcccagctacttaggaggctgagggagaagaatcccttgaacctagagggcagaggttgcagtgagccaagatcgcgcccctgtacttcagtctgggtgacagagccgggctctgtctcaaaaataaaaaaaaaattcatttctatgccttcttatgtaagtacagaaagaaaaattccgtttaaatggagatgttcattggttgaagatggttaatcaaagacatgctgcattcaagtaaaaagcagacaaaggcttgaatatcgaggagttgcagagccagtatgggtaactattctaaaatccttaaatcgctcctgggccctcgaagtcctacccgcgtaggtcagcccgaactatcaaaatccccacttcctctggaggtaaggacgtccgccgcgctctccacgtgtcaccttaaactcccaccccaaccagcgcaggcgcacttcgaagcctcctagaccaacctaagagaagtactgagcaagcgcatgagttccattaaccacgccctccggagctgccggagcaggcgcaattaggagtagagggcgtgcttgtgtgattacagtccactttacctttaacagatttggttgtctggactctagctcaggttcttttacccctgtcttgttggaagtcactttgcctagagtagaagttgtttgcgggaaaaatttgctcctcccattaagtaaccactttgctctctgaggcggaacgtgtcattgaggcagcaagtcctgacagatatggaaaaaaaaaggcacattgtagagaatatctacactccgccaactcagtcacaacgcaaaaattacacaaaaataaaacgttcacttgttacatactatgtgtttcataagacatacaagtagttttattttcctatatcaatgagaacagcacttctaactattaacaaggacctatactaagacgcagcgcgtgcgcgagccatctggcgctgtaaagcgcttagaggctggaataacgacctgccttacgctttgcggctgtcgtcggagaggcatctgggttcggactggggccgccatggggaaagtgaatgtggccaagttgcgttacatgagccgagatgacttcagggtcttgaccgcggtaagaaacccgccgttcctgttctcccttccccttaacactgtgtgacctcttcctgttcctgcaagttttctgggatctgagcaggcacactctgggacccgggacgtggcagaagctgggaatggagaagagagcattcagaaagtcggatttttaaaaaggttttgtttgggagcttaccttcccccagatagagcaaaggtcccgtcttctaataattgttttcttttctgctgctattcgctttgcgctgaagagaaacgcttgcatctctgtggcctggaaacttctctgatcctgagcttccgaccagctgtgaaaggtttaagcccccccccccccccgagatttgataatattgacttccctactaacagactcagtcgcatagcagtctttctgattcattcagtcaacacatatttgtcggttttttagtagcaacattaggaggttcacttgttcaaacagacaagtggagagagagacacagatcatcaagtaaacgaaaaataggataatggataaatgctatgaaaatgataaaggataatggcatagaaagtatatgtatctggtggagaggaggggcacaagttattggcctttggtagacaatcaataa

SEQ ID NO: 116617 - DNA, 1251 bp, Homo sapiens
caagcaggtagaattttcgactattttctattgttatataatattttaatctgtaaagctaatttctggaattttgtattttttttttttactggggtttttccccttctctctttatacacacacactctttctctctgccatccatttttttttatcctctcttttggaaaaagaacaaatgcccagaatggacagaagcagaatgatggcaccattcaaaggcaggaagagccgggagagatctgatggagtcaggatagagatctggttctggctttcatccactaacttcctactctgtgcagggtatataatggaagtaaacaccacccacgtgtatcccttgtccctggcatgcggaatcatccatacctgttaaaatactgaaggggtttcctttgatctctaggggattacgtatcatttgagggaggaagcacgtgttctgtgaggttgtgaggcttaggtctaagcactgtcatttactaatgtacccctgcttttgcttttggtaatataatcttatgttctccctgccaaccttaaccatgcccctgagggtggcagggcagcagcaccccagagagatgtgcttaggaccccagaggtggcctgggtgagtgaggatggggcagtggacatgggtcttgaaagagtcagtagaggcgagggtaaagagcatgaactgctagtggcacgaaggattctaaggtttaaagacctggctgggagctaaaacagagatgatggagttcaagaaaacactccctctctggtgaatggggagttttttcagtggactcttggcactagctcttagggccctaacccctgtttcctgctgcagtatgggtcagatatattctttatcacatgaagagggtgcttacatgtacaattttgtggatatcctatcaaataaatatattccttttctaatttaaacaaaaaaaaatgcctgcttgacaattgatctataaactggcgtatttgacataaaattaatatctatcatgtttacaaacctaatcctgcacatagctggacatagaaaaactaaaaataacattttttcagaatttgaaagtaacatactgtaaacacataaaatagaatttacaatttaagagaaaaaaattacaatatacattttagtttataccatttcagtacatatatgtgtgtaaatatatacgtactcatgtatttatacaggaatatatgcatatatgtttgtaacctgtgttt

SEQ ID NO: 116618 - DNA, 1325 bp, Homo sapiens
ttatgtcaaatacgccagtttatagatcaattgtcaagcaggcatttttttttgtttaaattagaaaaggaatatatttatttgataggatatccacaaaattgtacatgtaagcaccctcttcatgtgataaagaatatatctgacccatactgcagcaggaaacaggggttagggccctaagagctagtgccaagagtccactgaaaaaactccccattcaccagagagggagtgttttcttgaactccatcatctctgttttagctcccagccaggtctttaaaccttagaatccttcgtgccactagcagttcatgctctttaccctcgcctctactgactctttcaagacccatgtccactgccccatcctcactcacccaggccacctctggggtcctaagcacatctctctggggtgctgctgccctgccaccctcaggggcatggttaaggttggcagggagaacataagattatattaccaaaagcaaaagcaggggtacattagtaaatgacagtgcttagacctaagcctcacaacctcacagaacacgtgcttcctccctcaaatgatacgtaatcccctagagatcaaaggaaaccccttcagtattttaacaggtatggatgattccgcatgccagggacaagggatacacgtgggtggtgtttacttccattatataccctgcacagagtaggaagttagtggatgaaagccagaaccagatctctatcctgactccatcagatctctcccggctcttcctgcctttgaatggtgccatcattctgcttctgtccattctgggcatttgttctttttccaaaagagaggataaaaaaaaatggatggcagagagaaagagtgtgtgtgtataaagagagaaggggaaaaaccccagtaaaaaaaaaaaatacaaaattccagaaattagctttacagattaaaatattatataacaatagaaaatagtcgaaaattctacctgcttgcacaggtaatatgatacacaacttcagagaatggagtcagcaggagattgtggcagaggccacagctttagactaagtctttcttttctttttttttttttaattatactttaagttctagggtacatgtgcacaacgtgcaggtttgttacatatgtatacatgtgccatgttggtgtgctgcacccattaacttgtcatttacattaggtatttctcctaatgctatcgctcccccagctctccacccactgacagggcccagtgtgtgatgttccctgctctgtgtccaagtgttctcattgtttaattcccacctatga

SEQ ID NO: 116619 - DNA, 1028 bp, Homo sapiens
gccaagatcgcaccactgcattccagcctgggggacagtgtgagactccatctcaaaaaaaaagaaaaaagatgcctgaaagactatgaacaacaaaatgataatggttgcttatttcagggtaaaaaggttgaatacgacctttattttcttccatatagtattatttttaaactgcagctactctagccctaggcttctatgattcaaaaaattaaaaactagtggatatattttgatttgtcttacatcatctgagaaagaatataagacattcaaaagtctagatgtgctcggattaaaaattcctatttgtgaatgttggctgtgctggttgaagagtggcaaactcaccaaacctcctccatggctgatgctgatgtaaatccaaaggcctaccctctcgcagatgtccacctcaccaagaaactactggacctcgtgcagtagccatgtaactacaggcagctttagaaagaagccaaagaggccaccaaaaccctcagtaggggcatttctgggttcattgtgggggctgcagatgccaagctgctggagatcattctgcacctgcagctgctgtgtgaagacaagaatgtgttctacgtgtttgtatgctccaaacaggccctcgggtgggcctgtggggtctccagatctgtcatcgtctgtcctgtcactgtcaaagaagctcacagctcaagcagtagatccagtccattcagcagtccattgaaagacttagtctaactggtgtgaaatggtatctcactgtggttttgatttgcatttccctgatgaccagtgatgataagcattttttcatgtgtctgctggctgcataaatgtcttcttttgaaaagtgtctgttcatatcttttgcaacaatggtgatcattaaaaagtcaggaaacaacagatgctggagaggatgtggagaaataggaacacttttacactgttggtgggaatgtaaattagttcaaccattgtggaagacagtgtggtgactcctcaaggatctagaa

SEQ ID NO: 116620 - DNA, 1082 bp, Homo sapiens
gagttttgaggtgtagtttaataaaaaaaaatgtaaaggtaaaacacatagaagagagagcactaagggcccttgtgttacaacaggaaatggtttcccaaaatgccactgtgcttctctagccttctctgagtaggaaaatattctgaagatattctacagaagccagctgtttggatgcctcgatttaaatactgattccgcaactaactgacttcacagctttggtccaggtattaaatttcttttaatcacggtttgcccattggtgggacagtgctagtaatagtatctacctcagggttattatgagaattacgtaagataatctacattaagtactccagtacagtcaatgttcagtaatttttttgtccttttttctctcccataacatatgatggatcacaattttgtctgctacaattatttattcagtttccactgcctggatgctgggatatacaaaatatagtctctgctctggggaccctaaaagataagcatgaaccagacacaataacccataaatgcaaatactttgtgataagatatgcattgtatatatttttacagatcagtaagtgaaccacaagtattgcaacaatttgtaatcaatttcccagagcaaaaaacatagtttttacagatatataacataataagatgcattaagtatgcatatttatacattgaattatgcatcaattaatatgatgcattaattaatggggagatgttggccaaagtgtacaaactttcagttatgagataaataatttctggagtcctaatgtacagcatggtgactatgattaataataaagtattatatacttgaaatttgctaagaaagtagatcttaagtatgctcaccctgccccccacacacaaaggtaactatgtgaagtaatggatgtgttaattagcttgatcatggtaatcatttcacaaaatatacatatatcacaaaatcatgttgcataccctaaacatatataatttttatttgtctattataccaggataaagctgggaaaaaaaaaagagatacattcactgttgtctgccttgtatgtctc

SEQ ID NO: 116621 - DNA, 1055 bp, Homo sapiens
aagttacagtaaaaacagataggcatccttcattagggacctagtggtttgggcaattcaaaatgtgtctaataagtgagctggtgagactgaaggtttgcccctcaattatcctagtccattgattagctcatttaaacatgtgtggaatatcagcatgtccgtggttgataagaaattcctaattagagattctgagtaacatagcgggtacagttgccaactacgatttggatgttagtggattttaaatggcaaccctgtgctgtttggggaaaggcaaaggcgagggcggtatcaagtgtctctcagccttgaggtcattcttgagattagataccacttcacacctaccgataacaaattggaatctatcatcagtctcataactgcttttctgtctccacttggcagcctctttctttgtagacaattgtctttttcctcactttcggacccatccgatcataaaaggagaaagtgagctgccattgaattaatccgtagaaatttgtggaaaatttaaataatctgtagaaatttgtgaaaaagccactgagcaacaacaaatcgtggcataattacactgcataaaaacccaccactctcattaattacactgtaaccgaacgttgaagtttgcccactcttagacctctccttgccgctttcaggaagggaaatgtcaaactagaacacctgagcctcgcacagctgccagcgaattccggcggcagttcgcgggtaccttcccagcccatcctatctgctccggaccgcgggtgacattcagatttccaacaccgccccgagcttgctttaccagacaccctcaaacgactcggaacgcggttccgcagatgtgattggctgaaaggggacctgccgcgcggcgctctgtaaaagcgcctgcttcctccaaggaggtggagctgaagctggcagggccagggcagggaggggtaattaaattaaaaaaaaaacttggagggaagatgaatcggatcacattaattcaaggagaggtcaaaggccggtacctttgtaacgccggc

SEQ ID NO: 116622 - DNA, 1059 bp, Homo sapiens
aaatgaaagctctagacccacaaatgctttagcatgttcagtaactggtgtgaaaatactgtcacactgatcacagataatctgacccaaaaatagagaaatctgtagctgcagagttttaattctgcccttggggaatgaaaagagtatgaaaagagtacctttagttgctttattttattttattttttttaagcaaacctctgcaattcctgaatagagatccaatatgggagttacttgcttactcatacacttcatggccttcttggctacatccttgagattgtttctgctccgcattgtcttggcattttgacaggaggcttactttaccgcctataacaggcaaagtgtgcgttgtcgttataaattcatgaagcctggatatttctgggtgtatgctacaaattagtcattatatagaagcccacaaggcagctgaaaatgctgacccaatcgcactttctatttagccctcttcgctcccatcatctctgtagcagaaggctgttggaagccttagccaaagcaaaagaaccccgggagatctgtttgatttgagatttgtttaagcagtcagcacctacctgctatgaaagagggaaaggtttaggccgggcgctgtggctcacgcctgtaatcccagcactttgggagactgaggcgggcagatcacctgaggttgggagttcaagacctgcctgaccaacatggagaaaccctgtctctactaaaaatacaaaattagccgggtgtggtggcgcgtgcctgtaatcccagctactagggaggctgaggtaggagaatcgcttgaacctgggaggcggaggttgcagtgagccgagatcgcgccactgctctccagcctgggcaacaagagcaagactccgtctcaaaaaaaaaaaaaaggaaaggaaaaggtttggggggttgcaaggaaggtatgaaaagggagctgggaatctaaattccacttttctttccttctgaatggttccatctgcatttccatactgttcgtttgatattttatgactatttgaaataattataaag

SEQ ID NO: 116623 - DNA, 1028 bp, Homo sapiens
aatcaagtaaaggtgttttaactaattatactataatttaggattttacaccttcctgaagtggggaggttttaaccatggttttgtgcctagtgctgcttttccaatgctttctgaaggaagttatgcaattttggaaaatcaaaacaatgttcatgtttttggcgtaaccttagagtaatctttttcaaaacctatgaacaaatagcaacatttataaaatattttatttactattcccttgtaatctcaacctgtgatcactggactagactcatgttcactcacagtggctcatgctttaaagttgtaagttaactaattgcatgcagtttttcttccagtggcttagtttgagaaagacacaggaacacaatgaaaccctgtatctgaaggcttcttaaaataggagtacagtgtataaaatagaacaaacaattcccaaagaacaatgtgattttctcatgtagctcaggaagttatgaagagtttacaaatgtttggtcttatcttctttcccataggtgactgccaacagccagcccaatgtcgaatccagaaatgcaccacggacttcgtgtccctgacttctcacctgaactctgccgttgacggctttgactctgagttttgcaaggccttgcgtgcctatgctggctgcacccagcgaacttcaaaagcctgccgtggcaacctggtataccattctgccgtgttgggtatcagtgacctcatgagccagaggaattgttccaaggatggacccacatcctctaccaaccccgaagtgacccatgatccttgcaactatcacagccacgctggagccagggaacacaggagaggggaccagaaccctcccagttaccttttttgtggcttgtttggagatcctcacctcagaactttcaaggataacttccaaacatgcaaagtagaaggggcctggccactcatagataataattatctttcagttcaagtgacaaacgtacctgtggtccctggatccagtgctactgctacaa

SEQ ID NO: 116624 - DNA, 1036 bp, Homo sapiens
ggcagtcagtgctaattcagccattagtaagtaaagtcacttttccactaaaatagtgtcccgactaaccacctccttccgtgtcttttccaaccacaaaaccacacacatagaccatctcatcttactttatttcttgcatttattgtatccaaaaaaattggtttagttttttaatgtaattgacaagactcaagcttttgaaatacttacgactgttctcttgattccaggacaccctcccctgtgtctaaacatgtgtggtatactttttaaataaattaaagcttattttacttggcattttgtggagggaattttacaacacctcgggagatatctgcagacaccctggggtgtcacaaatttaagactagaagtcattgccctaatcaaagacgactgttacactggtctagacatcttaggggaactccaaaatgtttatacttcaactctcagtaaaagctcaagcttgtcttttgccttaccaaattccatatctcaaaataaacttttctccctctggtttttgtatgtactcaaatcatttttttataaatatctcagaatatgtatttgctataaattatatataaagttatagaattatgaagttataagagaaacgatggccccaaatccatcattactgcagagtcatatggcacatgaaagctgggaatagtctttgggtaactgaaagaaggcagtccattgagaatggaaaaagtcatcaattgtgcaaataattgaggacttggcagagtgaccttcgaacaaaactatagagattaatcagagcttgtaaatggggaaatactcattctcttcacaagaagcagtattcaaattttattcttcatgccttccatccggtcatgtcacttctgttattcagtctttcagaattctattgttactgattatggtgaaaatatgtgggggataaccttatgaatattgctatatatatggaacagtttacactgaagtatttaagatcattttatttcagttgaattctgttgtaatt

SEQ ID NO: 116625 - DNA, 2250 bp, Homo sapiens
cttcagtttagtttactgaccagtctagagtccagagatgagagctcctaaagtctggctctcatgttttgaggattccagaaaagtcctacactcacagtgccaaatggcctgattaaacacagataaatgtttcttccaaaatatattacgcacaagtagtcaaggtgcacagccatttgagaagtctgctgttttaaaacctgtttgtggcattttgcaaggctgctgtgctttggatagatatctctgtacctcttggcgaggcagtacctgtgtatttccctctttgttggctacctaattttcatttaatatgttttttttttttctcccggtggaaaggagaggcaggtgcctcttaaaattatttcacagcaaaccttcgtaagttcttattgcctatttcatgtagaaaggttgatttgtagctgctgtctttctcttcctaataaaccttgtgggtggtgaagatctaggagagtgaaacattaaaaatgaatgaagagaactgaagtagtttgtctaaggtgggggttgagaggggctgggtggaggaggtttaacaaaaggcattgatgttttaaatgcacagaaatgccatctatcaataataaatggtgtggcatagaacagatgtgccaaattgagttatgacagcatatatattagttcatagaggggaaaagtaagtagcatagctaacgtttttaaattatctgtgagcttttgaaatacaattttatgtattcagtttttactttctagtggctgctagctggaaatattaaaagtttggtgttttttaaaattccaattaaattgtgcttgtttctaaagtaagaattaagaatgaataaattttgcttttctgaagaggaagacagtctgaaatgaatttcttgcccttcattggctgagtacttgccttttaaaagctcatgttgtaattgttatgaggaatgaaagtgcattataaaacttaagtcatgtgaaactattacccagtgttttctaaatttacattgattatatctctaggtacctgctcagtgcatatttaaactacaagggactactcaggaaacccactcatgctttacaatcaattcacccccctcagcattttgattcaagggataattctacacatatgctctgtgtgagaattaccttgcttggttgggaaacaacaagagaaatatccacttgtctcacagcaaatcactactagtaaattggaaagacaaatcttttaggttaactaggatattttgtaggtgtagatactagagcagaaaacaagttttgagcttctagataggtaggagttattgttaatgtcactggcatagcagaggacaatactgtgggaggtgtttgaaatgaatcctgagttcctgagttggaattggtgtgcttaatgaaaaaaacagccgtggtgagacatatggaaccattccactcatctcaatatggacccttgcttgctttttggaaacttgtttggaatcggttatctttgctttgttggcccaacacaagtaaatcctctttgtttttcctaaggtgaacaaaaaagtagttcttgcagataatatcaagttggtttaaattttaggtttgttagactagaaagacgaattatttagccgtcattgaagagtttaatctttgagtagatgttacaggtgaaaatgagcatagtgattatataaaaagtctattactaactcttattttagccatctgtattgttgactttcaactttttcaggtgcaaaattttcttgaatcaatcttttcatctccaagggatcccagcatgccttaaaaaaaaacacttgtcaacggattttagagccaccaaataaatctattttatggtcccgttagatatctagctcaaaacccccattcactctgaaaggtcctatggttggatgcacaacaaatttcctgaaatcatctctgatgcacctcctttgggttgttaagaaggtgttgaaatgtgagaaggctggtagtgaaatcaagttgtggctcagggtaattaggaagggagaaaacccagcattttcatagtacattgtctggcttttagttgcagctgcacacagcggatatgaatttaaccggttgctacagtgcagctggttcagatctggctttataactggctgaagtaaaatgaaatggctggaaaattccagtcaagtaacaccagtgggaacaagtggaattaaatag

SEQ ID NO: 116626 - DNA, 2286 bp, Homo sapiens
ggaaattttgcattccatatttttaaaaagtcgggaaaaattaatatatgtgaacacatctcattgaggtaaaacttaacctcagcaatctggaatattattggaaccaggaaggttttttgtttattgttttttgaagcctttgaacagtaagcaacctcagtgtaataacatcagaatactttttattcctttattgataaagaagtattttcggtagttaatgatcactactaaaagtaaacttgaaaactgagatttatagtatttatgcttttatagtaagtagaagaaacaaattagaagacatctttgtattttagtgttcattacaataatttctttgagaacctctgtcagcactatgaacacatcagttgtagaatggctgttatttgaaggggtcaaataattaaaaggaaaaggcagatttatagtatatatttcacaggcttatgcaatatagttacagttgtgtgtgtgtcagtttggaaaaggcactcattttagagaataattctcattaaactgccacatttattttttatcaagctgtcacatgtttgtatggagtaaatttcgtaatgattcatgtgtcgagtcttactatataactagtcaaacttgaggaagcttttaataggcatcagcaaccagtgaaaaatttttcagcatagactgcattctagcatttttaaactttttcctgcttagaggttggtaaaaggctctggtctcaggagtatttcagatagttgtaataatcttaatttcagcttccagacaattaagatgcagtcatataaatgatgtgtaaaataaaaagcagctaattatctaaaatagccatgtgaaattagatgctattttaggggttttgtatggttcgctttagttttatgaatcaaatagtttttccaaagagatatatccagtgatttttgagttaattaagtaagttttataatgcaacactgaatttctatacaattaaaaacatgttttaaggtatttttatgttttttagttatcttttatttggaaacattttaatttgcatgatttgtctaaaattctcaatttttctttattagatattacagtgacagagagaaacacagaaaactggatgatcacaggagtagagatcacaggtcaaatttggaaggaagtttaaaagatagatctcattctgatcatcgttctcactcagatcatcggttacattcagaccaccggtcaagttctgaatatacgcaccataaatcttccagggattataggtatcactcagactggcaaatggaccacagagcttccagcagtggccctaggtcaccactagatcagagatctccttatggctccagatctccatttgaacattcagttgaacacaaaagtacaccggagcatacctggagtagtcggaaaacataacaaaaactgatacttcgtctttctggacttttcttttagccatatatcataaaccaacacagtaattgccttacatgacttgaaagatataaacagatcttctatcagtagcagtattgttacttctttccaggatgcaaggtctattatcccaacagaagagaaaatatttttatatttaaggattatgctgcactgtactacaaaattgtagtacttttttttgttttcttttttaaagaaatggaaaatgtttactattacagggacctcaacactgccctcccatacaggctggataaaactgtttttaagtcagtgattttagactgacctccatttaaattatgtttatatatgaactttactctgacctgtgatcatgtttcaggaaggaatgaaagagagttctttcttaataaagaaaaacactcaaggactttgttcatttccaaagctacttgtttacattgtacactgcgaccaccttgccgcttttcatcacaagcttgaatatttaaattctgtacttatatctgtaaaatagccaggaatttcctgtttgtgatctattatgcctttttacaaaaaaaatggctgtaaattattgtaaatattaaaggaactttccttacttccttccctttctcaggctttttttgactgttcctttccctaccaactcaggccttcttattaaaaaaaaaaaaatcagtgtaataacactttttaatgatttgtcttgatggaatcattgtttagaatgtaaaaatggggaaaggggccacttaattccattagtcctctttttatactgaatattttattagatacatgttattccct

SEQ ID NO: 116627 - DNA, 1001 bp, Homo sapiens
tcacaaaggtttggaagaatacagtttatatatctagctatattgattttaatagttttgctaaaatcattttaccctgtatttagtggatagtagggtattaagttatactctgaaatattttactatcttttaatagtctatatttaagactccttagaatagtgtgctacaatataaaaaataaccatttttgtagaagctaagtaaaatccaaaacttttacttactcaaagactgattttaaatgataacagaaaggcttgctctcctgaagaaaatctaaaggggaaagaaccctgatgtataagatttgtgaagtgagatttaattgcttattttgctatcaaacagtgttataatattatactcatgtaaatatcattgaaggaggtagaccttgttgaatttaggtttttaatacatgtgtttatattcttgttttctcattttaaagtgtaaagaaagaatgaggcctgttaaagcagctttgaaacaacttgataggcctgagaaaggcctttcagaaagagaacaactagagcatactagacaatgtttaataaaaattggagaccatatcacagaatgtctaaaagagtatacaaatcctgaacaaattaagcaatggagaaagtaagtgatacacttttcaggaagtgttaaatttatattatataactgtctttttttttttttgttttctttcctgattctgaagtttaggtaacaagataatttttaaagaggtaacctacagatgattgttttaatttttctccctttaatgttaaatttttttatttatgagtggttacttatgtatcatggtatgtaacaagtggcatctctgcctttaaagaaatagtgaaagctgtttcattaaaattcagattgcattttatttgaaaaagtctttgcaatttaccaaattattatcagtaatatcttttgaagttggtgttcccacaaagtttattgttgcttgaatttagcaattt

SEQ ID NO: 116628 - DNA, 1423 bp, Homo sapiens
ataattataatttatgtatttatttataatttactcaatgtatgtattcataatttatttactgaatataattatatacttatgtaattacataatataacagtatgtatgtgcttaatagtactgactcttgaggcagaatgctatttggtaagtaagtatgaagattaaatgaattggtacatgtaaagtttacagatcagtgctgtcttcagaaaagctcagaaatcgataagtgattgttgtagatgttgttcctaaattcagacatgtgaagcagataagagtgagactaaaaagtccaattgcagagcaaaaccaggaagaaataataatgttagagaaaaaagggctgagtgatacgagaccgataatgtagtttggctttaactaggactaggaaatgtttccttacaagccacaactgaaggaaacacttatagtctgatatatagatgtgtcatgtttatatatagttacaatatacacaaatttatatataaatatatattcctatatttcctttttagagatttctagcatctgaatcttttatactagttggagcagttaacatacttcagtcacttgttagacttgggtgtcagctttatcactagtattaatcaaatgctatacttcaaagagggaaaatttcaccttctaaaattatatttgttttcaacccattatgtccttctagatccccagcttatcctcttgtcctactttctcttcttttgcaccgtgactagacagtgttgatttaatgaacccactaatgtatttcctactgattccacaacatgccctaatatagttcaactattgttcatgctctttaaatatattggttttttaccatcctcttgttctccctactttgagctgttgacattcttccagtcactgggagtattggagacattcaaagctgctgcagctcctatcttccattttatttatttgagccatattttttatctctggacttttatttttatctcctctgcaggttcacaggctggaatttcttctctctttttcaagggtaaccgtttttgtttttgttttttgtttttgtttttgttttttacctactctgtattgggtgggagtcaggggaggtggtattctttagcttttttgaagtgaaaacattaaacttttcactggagctacttccccttctctatgtggtctactaatgaattaggtgaaattgtatctcttgccacctttttttccccccacatttcttttttaatcttcggactttttcatgtaactgctggaatggaaaaattcctgctgtgcacaatgcatgaatttcctctccattaatcttaaatgatattgtgtgtatcatggaaatgaagactggaatagttcttaaacgtggactctgtagccagactttctg

SEQ ID NO: 116629 - DNA, 1102 bp, Homo sapiens
gaaagatataaaggaaaaagattttaaagaaaaaagagaaaacaaagtaaaagaagctatacagaaagaaaaagacataaaggaagaaaaggtatgcaaatcataataaaaaatgtagaaagtaaaaacaatcagcatatttacattttaggagactaaattgcatatcagcccttattagtctcaataactgagttcttcagaagcatgtttgggtatgcagtagaggagaatagtaggtctgaacactctttaatgctttaccttcagagtaacattacagagtagctttgattgtttccccaaataaaattggggaaaaaaacaaattaaaatagatgaggatattcaatgagaatgagcacttgtagaataaaatgagacagtaattattttctggaagtgttagtcattttgcctttgttgctattggggttttgtttttgttttcttttcactttttctttagttgagtgaatccaagtctgatggtagggaaagatccaagaaatcttcagtgtcagatgctccagttcatatcacggcaagtggtgaaccagttcccatttctgaagaatctgaagagctggatcagaagacattcagcattgtaagccttagactttctgattattagtattaactcataaaacatttaagttgaagtttgtcatttatagcatttaatttagaactgcatttgaatttattgtagattgataaaagcaatgtatttgaaatttgaagggtgtcttttttttttttttttttttcttttttgagttagcatctcactgtcgcccaggctggagttcagtggtgcagtcacggcccattgcggcttcaacctcctgggctcaagtgcccctcctgcctcagcctctcgagtagctgggactagaggcatgtgccatatacccagctaatttttagttttttgtaaagatggggattttttatgtcacccaggctggtctcgaactccttggcgtaaaagggagataagcctgggcatggtggctcacacctgtaaacccagcactttggaaggccgaggcagtggatcacctgaggttaggagtttgagatcaacctggccaac

SEQ ID NO: 116630 - DNA, 1052 bp, Homo sapiens
ctgtgaagaaaaaattaagtagtctagattcccctgtaaaactttcctcccagtgtatgctttaggtcttcttctagaaggatgacatcttgtagtctaggaatttctgtgtacattatatataagtacacttttactgagaagggaaggtgtttaaggattatataacatttaatagtggatgttaagtacacttttgtatatttgaaggaaatttacaaccttatgctttctattttcattttgaaagataatctgagggtttttgaagtttagaattcattctcagaaaaattaaatttttggctctggcatacgtataaaaaatacattttgcattgagtttattcctacaaatattaataattgaaacttgttggtgaactatatatatatttaaatggttaagcattttttagccagtacatttctcatgttatttattaagacaatctgaaaaaatttattgctttttcagattcttccagatgatcccgataaaaaaccacaagcaaaacagttgcagacccgtgcagactacctcatcaaattacttagtagagatcttgcaaaaaaagaagctctttctggtgcggtaagttaaagcccacatgcctaagaccagtttactttttagtaaggtaaattttgtttacttcaccatgctaaacatctgaagtcaatatgagcttatataaatggatttttctgtaattaagtagttttatttgatgttgccatatttaaattttaccttaaattatctcagcatacatgttaaaactgatgaatcatagctttcagaagtaggattctgttttttttttctagttttagagagggatagagaaaactcgtttagcgtgcggagtactttttgagaagtcaagccttacatagcctacatgactgttttacttggagtcattagaatgcttaagggacagcgtcataggttgccaagcttactgaaaaagaaggaaaaagacaccaaaaaggaggtgattggaaacttagagcaactgttagaagtttacctgtgaccataatgt

SEQ ID NO: 116631 - DNA, 1006 bp, Homo sapiens
agttgcttggtgttttgtagaattatgttttatacttttaaaaatactggtttttttaaaaaaaatcaaggtggtagactcggaaaagtgaagggtccaacattccgaatatcaggagtacaggtgaatgccaaactagtcatctcccatgaagaagaattaatacctttgcacaaatccattccttctgatccagaagaaagaaagcagtgagtgatttattttctccattgtaagatttttgttattcaataattgcaaaatgaatgtgctgaatttttatggtgttattggctagttttgaaaaaaaaaaggaagaaataaagcatattattttgaagttctaatgactcacgtttttcaaaattaatttttcagttaaggcaattacaaacttatcattagttattaactttgatgccaggtatactatcccatgccacacaaaggcagctcattttgatatagactggggcaaagaagatgattccaatttgttaattggcatctatgaatatggatatggaagctgggaaatgattaaaatggatcctgacctcagtctaacacacaaggtatttatctatttctgattctgttaaccattcatgttgaatttaatttattctaattcttgcttttaaattatgttggaaataatggaaatctggaaaccaaggcactagctggttgtgtgaccttggtgcgtttagaagatgctttgcatgaaaggatcaaatttaaatgatttctgagattttgcgttactgtgaaattatatgttattaaggcattaggtgtattatttttcaaattacgaggttaaaagtcttattccatcattagctttaaaaaaatttttgatgcataatagatgtacatatttttggatgcatgtgataatttgatacaatcatataatatataaagatgcaatcagggtaactggaacatttatcaccttaaatatttatctttaggaacatttaagtgattcttttctagc

SEQ ID NO: 116632 - DNA, 1042 bp, Homo sapiens
tcaagttatcttcctgccttggcctcccagtcatgctgggattacaggcatgagctgctgcactcagccacatttttcttttatgatgtaaattactttattgatcaatgtttcttcacagttctgatctcctcaggaaaaatgcctagaggttatgttgctgcgtcagtagaataacttttggaggcttttgatataatgtctgattaccttttaaatcaaaatatccaccagaggtatatatttttctctgtttgctctttaattttgtttatggaatgtttttgatacatttaataacatttttaagattccgaccatcttttataatggtttttgctcttaagatacaagctgtttttacactaaggttgggtaaatattttccaattccagattagtttcaatggaagtgaagggaggcgcagtagaagtaggagatactctggatctgatagtgattccatctcagaagggaaaaggccaaagaaacgtggaagaccacggactattcctcgggagaatattaaaggatttagtgatgcagaaattaggcggtaaggtgttataagacaatcgcttcaacttggttttagtagagtgtgaaactaaaatgtaaaaacgccgtaattttcaaaaattgtgatgaagttttagaagaggcaaatctgttatttgagtaggaattgggtggttctgcttttgggtatttgttataactgaacaaaacaagtttggtgtctaatctttgcatgttatttatttatcgctaaactgcttagactacacaattttttttattaatttgactcaatagtgatcctttcgaataataaaagtagttttgatgcatttgatttttaaaaattctcacggtgtttatgactcccaaagttactaattttttgtggaaattctgtatttttctagtttcttaacaacagggtaatttcctttttgaaagtaaccctgttaaaagcatttctgatatgttcaagtaggaattgagatgaggtaagattggccaggcaggatatattta

SEQ ID NO: 116633 - DNA, 1123 bp, Homo sapiens
atagtaccttaaatgtgctatcttatgtaatcctcacagaaattagtgtgctctcaaagagctctatgtctctgccagtagctctttagatagtgtttttgtgaccataaaaatgatattagattgttctacaatacttgataggtggactggtctgagaatttctgcagattatttagcatgttaatagtataaattacttttttgttgttctgttaactgctcttagttctgtgatgctactaattttgttgagcagtagggcaaaataaaatcattcctagaggattattagatgtcatttggtttgatctgctttgccctaatgaagaaatgaatctaggttgtttagaagttatatttggtttagtccacagccatgttcattatcctaaggagcatgccagttcttccccttaaaaaaaacttttagggatcaatttttctgtaacagttactcttaaaattctgaaatttatcaggttgccaacttctcaaatatggatgaggatgacattgagttggaacctgaaagaaattcaaagaattgggaggaaattattccagaagatcaaagaagacgattagaagaagaagaaagacaaaaggaacttgaagaaatttatatgctcccaagaatgagaaattgtgcaaaacaggtgattttgcaattttaaagatatttctataaagtaagagtattcaacctgggctgattttgtttgtttctacgaggtatcagtccatagttttcttttcttgtaatggccttgatttgataatgtttgcctcatgaaatgagttgagaagtgtttcttcctcttttattcatcttttcaaagaacctgctcctggtttcattgatttttgtgtgtgtgtgtgtttttaatttcatgagtttccacaatttattatttcttcctttctgcttttgatttaatttgctgttttctttcttttcttttcttttttctttggtgacagcatcttgctctattgccaaggctggagtgcagtggcacaattctggctcactgcaaccttaacctcccggcctcagatgatcctcccacttcagcctcccaaatagctgggactacaggtgtgtcccaccacacccagc

SEQ ID NO: 116634 - DNA, 3045 bp, Homo sapiens
ttcatgtaatgacttttttgctctgggcagatactcagtagtgggattcctgggatcaagtggtagttctacttttagttcctttaaggaatttccacgctgttttccatagagttctttttttggtatatgccttttattttttaaggaaataaaatttacagttagagttgaagtgtcattcctttcctatcccgttttctttctttttcaccagaagtaaacactgtattgaatttggtgttaataacatatatatttgattttggagtctttttgttgattggtcttgctagatgtttattagttttaaaaactgcctttctgtttaattagtaccatactgcttacgttcagaaaatcaattgaaaaatttttcattttgattattcaatttcttacaggatttttgctttttgctgtccacaagagctggaggtctagggattaatttagcctctgctgacactgttgttatatttgattccgattggaatccacagaatgatcttcaggcacaggctagagcccatcgaattgggcaaaagaaacaggtatttttaattttaatttatattatattgctgttttagaattctttttttttttttggaagtgatttcagtttatcctctagaggataagatcactgtaacagtcatactactgtttaaccgataggatactgaggagcttggtttaccaaaatcacctggagagtctgacagaattgagataactatgcatatataggatcatgtattctgttttgatcccgtattctagtcgtaactataaaatgcagtgtttttcattttataataaaaactttaaaacgtctttacttgcttattttaacttgaaagggagtttgagtagcatatgctacctttctgttagtctatattttgtccatgtgcttacaagattctccacatgtaaacgtgaccccattttataattgtaacaacatacccttaaatggtggtactgaacctttacctagagaaatagggaaaatttactgcagaatctttgacctagagaaatagggaaaatttactacaccaattcttttcaattttggagagtttgttttatggtgggtttcttattaacttggggagtagttcatagaattttgcattatatagagtgatgaaacattagaatcaaggcaacgagtataagaaggctatcagaagtttacatgccccccccccattttccccagctaaatcataacataaaaattactgtcattcctttaaaaaaaaataagcaaatgcaatctccttatcaaaatattaagaaggaaggaaggatatagtttcaaaatagtcccttaagttgaggaactctagctttaaacatgttttttaaattttcattttgcttttaaccagtgaaaacttcatatagaatgagcttcaatttgtgtgccagtgtttaggcacttgaggttagcaaaacaaatcctttatactgcaatttgtttcctcatgtgtatttttacaggtgaatatttatcgtctagttacaaagggatcagttgaagaagatattcttgaaagggcgaaaaagaagatggttttagatcatcttgtaattcaaagaatggacacaactgggaagacagtactacatacaggttctgccccatcaaggtggttacttgattattaaaaaaatgtcattttagagtcagtaaactcatatttttgatatgttacatcactgtagatcattgaggaaatgtattcagagttgtactttttatattttggaagactttggactaatttctagttagaagacatacttcaaatacctggtttcatcgctacagatttgtaattttaggggtaatctctttcacttctatgcttcaagttccttattttaaaataaatatactgcactaggcaacatagtgaaaccccacctctgcaaaaaataaaaaacttagctgggcatggtgacacacaactgtagtcccagctactcaggaggctgaggtgggaggatcagttgagcccgggaggcggaggttgcagtgagctaagattgtgccagtgcacttcagcctgggtgacagaaggagacactgtctccaaaaaaaaaaaaaaggattctaatacttgatttgtctaacttcttcatgtaactgttgtaaaggtgaaaatgtcagtaattaataaaagtgctgtgtaactgttatatttttaactgttaatgttaagcatttttgtttttcctgttttagttctactcctttcaataaagaagagttatcagccattttaaagtttggtgctgaagaactttttaaggaacctgaaggagaagaacaagagccccaggtaaaaaaaaaaaaaaaaaaaaaaaaggcctgcctcagaatatgtgtcatatatttgacaggatgaaaggattcaagtatatttaaatattgtctttttaattataggaaatggatatagatgaaatcttgaagagagctgaaactcatgaaaatgaaccaggtcctttaactgtaggagatgaattgctttcccagttcaaggtagatttaaacaaaattttccttgtaattacataaattgagaggaattgagttatgtcatttagtggtttgttaatctttctttaagcataatcaggaagattgctgtgttatgtaaaaactactctctcttgttcagacaaaccagtagcaaactgatttgaaagagaccaaacccatttatgaagttacatttagttgggtggaaagagctgttgtttcctaattagcaactagaatagtgtttggcaaatagcatgtccttaaatacttaggtaaataaatgaatcagtgtgatctcttacttagatttccatgactgaaagctttcagctgatatttttttgaagcagtttttgacattaacttatcacaaataagaaaactcaagtaaatcagtcaaagtaagcaataagctactatatattgatacttaatatccctggtttgttgagggtcaatgagttgaaaggagtcct

SEQ ID NO: 116635 - DNA, 1011 bp, Homo sapiens
gtagcctttagctattcctcttgtccttccatttgccttcctcttctgccctgtgttgatttgtttttaaacaaattattgtgtacatagtcaaacaaaaaattagtttgactaattttgagtgttaataagcgccacttctctgttgctaattccttctcattcctaggtcacttcctggagagaataatttttaattttatttggtttaggtcatgccacagtaatgagatgccactattcttaaaatttgtactaatatgtattttagtggaaaagaaaaattattttaattttttaaaactttaatagacatgttttcctactttgagtaggtgataattaagagcacttcatttaaaccacttagaatacatcatttaaaatgtttatattttttcttcgcagagttaaaattcatatagtaacaaagcaaaggtaggcatatggcttcccaaaatactagtttaattcgtcggttaaatgcatggatcatagtagacaagttatttctagtctataaccagttaataattataaaatcattgccatttctaaagtgaaatagcagctaatgtttaataagcgttcagtatgttgtaggcactgtgctacatgttttcctgtgttctctcactgagttctctatagtctatgaaggagggactactattatgtctgttttgtttaaagcggaactgacatggtgaaaaagtttgtggagaaaagtcaaatcacttgctcaagataccaagtgaataaaatactcatttgctggctgttgactagaacccatgatgcttcacatcaataattttcaaactttagtgtgcatcagaattaactggatggcctttgctaaacaccttcagtaggtctggggtaggactcaataatttgcttatctatgttctcaggtgacactaatgctgttctagtaaccacgctggacttaatcagtgtttttaaaactgaattgtaacctgttaatggatctgtgaatcagtttaa

SEQ ID NO: 116636 - DNA, 1096 bp, Homo sapiens
agtgagcacaggaattgttacatgtagtttggagtagtaaaatatcaccaagatgttttctataagttacatatgtattgtgtaattgcaatctagagaaggcagtcgtggctaaaaccaggtatcctcaggtttcttttaggtccatgcaaaataattcagtttcattagctgtctaatgcagtaaaagttgtaagaagattcagataaataatgcagctgaccatctttttagcaaatttgaggggaaaggattaatacactgtaataattatgttacattagcctgttctgtgtatagctaatggttcagaaaacaagttgtgttctcatgagtattatgaaagaggtttggtccgttgtatatacagctgtgaattttataacggtacagttttactttggtactatcgttggctttttttgtttgttttaatgcttttagaatttatcctggtaattgttctgctaaacatcgttttcataatttttttttttaagatggattttaactaggaattacaaagccctcagcaaaggttccaagggcagtacctcaggctttttgaacattatgatggagctaaagaaatgttgtaaccattgctacctcattaaaccaccagataataatgaattctataataaacaggaggccttacaagtaagaatttttaaatgttgtttctttgtgataaagttctagaaatgttgatttcacttacaatcgaaaatggctcaatgctttaacttattggataaaagttctctttagttaatggtgcctttctataatggtctcagttattaatctttgtagaaaagactttaaaattctaatttatgtaattattttgatgaattttctaaaaataggtctctcaaaccatggcctataataacttatccagcaagaaaatcccacagtatgttcataattatgaaaaaatcgttaatagtaattgtgctgcatttgtgatttggtaaatggtaatctaaaggacatcttgacctcacatcttaacccttcctggtacttctggaagataagtcagaagtgcgaaggcacagctgcaatccagccactgtagtgcat

SEQ ID NO: 116637 - DNA, 1061 bp, Homo sapiens
ttttccataaatatttttctgtgtatttctaataattgatttttaaaaatactagtatcacctgggcccagtggctcatgcctgtaatcccagtactttgggaggctgaggcagacagatcacttgagcctcaagagtttgagaccagcctaggcaacatggcaaaaccctgtctctactcaagatacaaaaaacttagccaggagtggtggtgggtgcatgtggtcccagctgcttggtaggctgaggtgggaggatcgcttgagcccatgaggcagaggttgcagtgaaccgaggtcatgccactgcactccagcctgggtgacagagtgagaccccatcttaagtaaataaataacccactttaaaattttcacaatttaggaaattattgctctctcagcagaatcaatttcttgataccaatattcagtatcagtgttcaagttttctctgttgtctcaaaaaatttttttacgtttactcgaattgggattgagataggttcatatatggcaattgatttgtctctgagtttattatctataggtacttcttttttgttaaaatgtatacgatggggaaaacagttattctgtagaatttttccacaatctagattttgcatagtacttccctctaaaatagtttaacagtatcctctgtatttcctacagattggtaggtagatgtaggtgcttgataatattcaaattaataattatgagaagagtatattttgtagtacacaatggcgattatctaattttgttatggggttctttaaaaaaagtaatgcattttgtagaatatttagaaagaaaagtcaaagtaggaagaagacacattcacctgtaattctcttagtgctagtcatatatcatggatgttgaacttaaactcttcaaggtactttttggcaactaaggtaataagatactgccataaatttctggaaaaattcttagaatttttacctctagagaaattaataataaattttttctggataaggaaaaatattctttattcttgattacctcttagggcattgagcattg

SEQ ID NO: 116638 - DNA, 2076 bp, Homo sapiens
ttctacagttcataaaagttgtacaaagaattgtacctacacttggaataagacactgttctgaatttgtgtcatagtttttttttcatattgacattaatagaggcttctattggggttaggctaaaaatcttttgtaaaaattttaaatgacactgctgatttttctccgttaattatcagtttataagctaataaaaactttggcttgatattacattctagtggttaaatttgtcatagaaggaatatgtgctgagttacttatgtattgtaatcttgagattacgattttttatttgaaaattagacaaagtttgtttttaatttttatttcattttaataattgagttcagattaaatgggaaggctaaatttgaattccgtttttctctcaaaatactgtttttctattattttaaggcattccttggaggtctaaattgggcatttataggtgttgatgaagcacaccgattaaagaatgatgactcccttctgtataaaactttaatagattttaaatccaatcatcgtctccttatcactggaactcctctacagaattccctcaaagagctctggtctttgctacatttcattatgccagaaaagtaagacaactttacaattttaatcatattgtgtggatattatgtttagtgggaataaacccaggtaataaggtcagtaagagtttttattgccctaaaagattagatcacagattactaagaattttttaaaaaggaaaatgaggtcaggtagtttgtaatactatttgaatttttcaattttgttaataaacttaagccatgtgtaataaatcacgacagttgattttgcacattttcaaaatataccttgtttgaaaaactaacacagtaccattctttgtatttaacagtaggagtaacaacaatgaggtgctggtaatccctttttctaaatgaggaaaactagactagacaaggctaaataagttcccaaaggtcactacttgttctctttcagtaggtccagaactttaaaagtatatttttttgagaaatattttagtgataattactcccatacttcaaaatacttcatattcacttgattcaagaatcataacttataaaacaactaattatatttcatcatgcatcttcttgggagggagatttttagaggtaactaagtttagctaatttttttttctaaaaatctgtagtattttgtttataaatgactcccctaaaaaaaaaagttcatacacaacatacacaatttgattttttctagtaattgttccaatttcttaaattttaaaggttttcttcctgggaagattttgaagaagaacatggcaaagggagagaatatggttatgcaagccttcacaaggagcttgagccatttctgttacgccgagttaagaaagatgtggaaaaatctcttcctgccaaggttgagcagattttaagaatggaaatgagtgctttacagaaacaatattacaagtaagctgtacacagaacacagttctgaacttctaattctgaaaaccttccatgtctgtgtcctgcttttggtgcccccaccttctctacaatagtgtcttagagcagttgcaattctcgagtttcagaataagtttattctgtgtcgttaggaggcaaaaggagatttaatgacatatccaaaattatgagtgacaacactgagtaattcatcttctgacacataattaattgctttcctatatatcatactgttatcttataaagagtttaagtgttaggatttccacaataataaaggtattatatgattatgacaattaacagaggccaaaaaaagaaacttagaaaaaaattttaggctctgctgctttttgaagagtattaacaaatcatagctggtataaattttgtatgtcaagatctatacagtaggacttttcaaagaatcagaaaggaaaatctgttctaatatctgtttaaacatttaattgcataaaaggaaatatattgctacatgcatttggagtttcagaaacatttatattctatggtaaatctataggtgcc

SEQ ID NO: 116639 - DNA, 3340 bp, Homo sapiens
tcgtgatccgcccgcctcggcctcccaaattgctgggattacaggcgtgagccaccgtgctgggcctccagctgaccacgtttcatatattgtggataattatagaataatgctgtgggatctcaggtggatctctgtctttttattttttctaattcgaaaaaggaggggattatattagataattctgaaattctcagttttatttatgagcaatagaatttcccataagtttctatacccccaatactttatttaaaagagtatatatttttgtactcatattattgaaattttgagttgaaatataatcctacaacagaattaattacatggaaggatcttgtgcttttgttttcagctactggtgctactacaaccatctatgcagttgaagcagatggtgacccaaatgcaggctttgaaaaaaacaaagaaccaggagagattcagtatttaattaaatggaaaggatggtcccatatccacaacacttgggagacagaagaaaccctcaagcagcagaatgttagaggaatgaaaaaattggataattataagaaaaaagatcaggaaacaaaaagatggtaagtatgctgtatatcatatacttcttttaatagttcaaagattactaaacctttatgttaataaagaatacatagtaacattaaatgatagcctaaaatagctatagactttataatacagttggctgtctttgtccacagcttctctatccttggtttcaaccaaccatggattgaaagtattcggagggaaaaaaaacaacaataacacaaattaaaaacaataccatgtaacaactatttgcactgcatttacgttgtaaatgtaaaattgggtattataagaacatctagagatgatttaaagtatgggggaggatgtgtgtgggttatattttaggtaccatgtcatttcatataagggacttgagcatcctcagattctggtatctgtagaggatcctcaaccaatcccctgcaggtagtgagggatgattttattccatctcaaggtaaaactcctagaggtatacctatctaaacctatccttggtaacagtcacatagagtgtgtctcatacattataaattacaaatttttagttaaaaattaatgatgctttattcctgtttgagtttctttattactcaaacttggcccacacagtggcaaaatgggagattttgtgctacaaatagtgttggggatgggggagtgaaaggttatttatgggagatttttaagtctattcctggattaataatttttcaggttgaaaaatgcctctccagaagatgtggaatattataattgccagcaagaacttacagatgatctacataaacagtatcaaatagtggaacgtataattggttagtgataaatgattctagttaaactttctttttatgcttgaaataatctgaaaaaagtcataagtttgccacttacatatcaaacacagtagcttgctcttactaaaacagtattgtaaactagatagctaaattttacttgtgtagcctttactaagaattatgtatctgatgattaaatgtaaaaaaaaataaataaataagtaaatgcctgattctctcacagctcattccaatcaaaagtcagcagctggttatcctgattattactgcaaatggcagggccttccatactcagagtgcagctgggaagatggagctctcatttccaaaaagtttcaagcatgcattgatgagtattttagcaggaaccaatcaaaaaccactccttttaaagattgcaaagtgagtattgtctaacattttaaattattaaaaatatatttatacattataaatatttacaagcctaaatacaagagttggatcctgatttcagatagactaagggagaatatttcttggttaataggtcttacaggaagtgaacttctgcaattgctgtgtgttttttagttttagttttataattttttatttcaaactttctcttaaaaaaattgtaaatgatgttttcgtcaatgtatcttcttaagtgttgtcttttatcttgttgagcatcactatgtcagaaagatgagttggttatggtgattgtcaggaagggttgggagaataaacagaaaaaaacccttggaaactagagatatgctcaattttaaagatagtggatattttcttagaaggtagagaaaaaggagagtgatataggaaagtatccagaactaccttgcacaatactttctgcatccttgtaacttacccagagttactagtgatgtgttgagatctatggactactagactttctttccttattacaagaattacattcttcatagggataacttggaattcagaaattgaacggtaagctaagccagttttatggtttgtagcttaaggctggagtgatggttttgaacaatttaacgtaggttttgcttgtgaaatacatgagactcatattttggcaggaagttaattttctctatacatttttgtttaaaaaagaaggcaaaatatttcactgttcatttttgtagagtagtagaaaacagtattgactgaatcctcaggtacattttgagtaatggaatctctgagcttgatgattagagatgaaatttaagaatttatggtaaagctgaggctttcatcttttagtataatttcttatatttaataactctacataataatgtttatttctactaaaggtattaaaacaaaggccaaggtttgtagccctgaagaagcagccatcctatattggaggacatgagggcttagaattaagagattatcaactgaatggtttaaattggcttgctcattcttggtgcaagtaagtatattttgaatcatctatttaatttgacagagtaagaatttaccaatacaggattcagaaaagatttccatttacataaagaataagactctttggcagtttatatgctagtctttgtatttcctagtttgtataaacaatacttactacatactaggaagaaaatccagtggagttggagtttaacttgattgttgcctttttaaaatatgtttttattcagtttaaaaatcaaaatgcatatctgttctcatcccatgctattcctggaatatttctctttttcctagttattttaatatccatttactcttctacattttttttctatcttctatggcccccactctacttttgtgaatctcggttgcaatttagctatagtttttttttttaatctgtgttcttcctatatactttttacttatttaatatatctggactctactactagtagatg

SEQ ID NO: 116640 - DNA, 1069 bp, Homo sapiens
agggataaaacttgccatataagtacaaataaaaatactttataaattttgtctgcagtgaagattggcaaatgtctgggtcaggatctccatctcagtctggttcagattcagaatctgaagaagagagagagaaaagcagttgtgatgaaacagaatctgattatgagccaaaaaacaaagtcaaaagcagaaaacctcaaaataggtatggtctcagtttggtgctgaaaattgattgtggaaagtatttgttctttttgtatatagtttctcaaatcttgtttttttttctctttgcactttcctagatctaagtcaaaaaatggaaagaagattcttggacaaaaaaagagacagattgattcatctgaggaggatgatgatgaagaagattatgataatgataaaagaagttctcgtcgccaagcaactgttaatgttagctataaggaggatgaagaaatgaaaacagattctgatgacctactggaagtctgtggagaggatgttcctcaacctgaggaagaggaatttgaaaccatagaaagatttatggattgtcggattgggagaaaaggaggtagtttttaaaaaaccatttattgtttggttatttaaataatatttacaggagtagagggctgggcacagtgggtcgcccctgtaatcccagtactttggggggccgaggccgatggatcaggagttctagacctgaggtcaggagttctagaccagcctggccaacgtggcaaaaccccatctctactaaaaatagaaaagattagctaggtgaggtggtgcgcacctgtagtcccagctacttgggaagccgaggcaagggaattgcttgaacccacgaggctgaggttgcagtgagctgagattgcacgactgcactccagcctgggtgacagagcgaaactccatctcaaaaaaaaaaaaaaaaggtaaagtatttaagatttttctacagtgttgaaagctaagagggtggattttttgttgttgttgttttacttatgttttataaaagctactttgcttagcctgagtaccttcttaa

SEQ ID NO: 116641 - DNA, 1050 bp, Homo sapiens
ttatttcatagcccaatctaatttaatctcttaactcctgttaccctctcccacctcacttgattttttggaaacataatttctctatgtgttagacttctgcctgaaaaaagtcattaaggtttgccttgttgttgtaactataaattagagaattagagattttcattcatgtcattgatactataataaattttagatgtatgttaggaaactatttttcagtgacttttcagtgtatatatccatagcccttatttctcatctgctcattctctgcttactagaaaatatttacttttgagtttatcctgggttcaacacaactaagtaatcatctttgaaattagtcatgttaaaagttactcttcctagtatctctccacttttaacagttttaaatttcttcagttagaaactttaaggagatagaatcatattgtactttaagcagagtttataatacagttttgtcttggattgatagtttagaatgctgaaaggaactgttgttttgctggtcagtgcttaacaaagcagtggaactacctggttttcagagttgtacaaatgagaagatgttttccaggttttctgaaaccttttatagtttttatttgtactatttcatcaaactttgtatttatgtgtgtgtatacttcatcatgatgtaaaatgtattatataggtcatggtccaaaaagtttgaaagccgttgcttgactttggccactaattgtttttttgttgttgttgttaatgtttagcattcagtcattacctactactttccagattctttctacagtcatgctaaagtggacagtggtctataaaataactaaaataaaggtcctgacttaatgatcttcaagacctagttaggagagatatatgtataaaaataattgtaatactgtgaaggaattattagtaacatgagcaaagtattgtgggaacatgagctagggcaatgatctgtgcctggggaaaccagggaatggctacctaaaggacatagttttgaatagtcttattttttaatagtct

SEQ ID NO: 116642 - DNA, 1001 bp, Homo sapiens
ttctgatgttggtcaagttcatttttctctcacccctttgagtgtaattatgtgataaatttataataaaattagattcatttgtcacaatctgcattccatcctgtgatcatcatcatactggttgatttttaaaatttgcatatattaatgcttattcaatgatgcacagttctttgggttttgacaagtgcatagaatcattttttctgtactccagtaatgtacagaacaattccttcatcttaaaaggtcccagatctactgagccagaatttccattttaataagattcccaggagaattgtattcatgttaaattcatatgcatgtatatgaagctattcacctgtagtcattcagcatcttgccatgttgtaaagttatacattaacttcaagaaagattattataatctaggggtgataatggaatagccagtttaaatatgcaattgagtatattcaaatttgtggggccaaatgggcatgcaagtgaggtaaaaagaaaatggagggtagattactagagtcatttaatgagctatttggaaagttttcatagcatgctttaacttttgtaattttcataatgatgagaaatgtagtttgaaaagaaagaacaaatgatatatattcagaagggtgttggagaggaagtttttttttttgtttttttttttttttgaagagtcttgctatgttgccaggctggagtgctgtggtgtgatcttggctcactgcatcctccaacaagtgattctcctgcctcagcctctcaagtagctgtgattacaggcacgcgtcaccatgcccagctaatttttgtatttttcgtacagacggggtttcaccatgttggccaggatagtctcgatctcctgacctcgtgatccgcccgccttggcctccctaagtgctgggattacaggtgtgagctcccgcgcccggctcaggaagatgtttatggaagtcatagtcccccattaaagaagtatgcaa

SEQ ID NO: 116643 - DNA, 2555 bp, Homo sapiens
ttaaaatgtacagagaaagccattttgagggacgaaaggaaggtgaaaaggaaagaacgaaaaggggagtgaactttttaaaggaagaaacgggaaaggcagtttgttaacatacttagattttttaagacttaattgttcagtaaggcactttgactagggttgagattaatatttaacattaggaataaatgttgagtagaacggttactttttagataacctgttcttgcagagtctactggacagtagtctagagaattaacatcctgatccagatgcagactttgctatcattgagttggtaacaatctgtttccctccctctcttgtggaatggaaataatcgtaggagtgaattctctttgctgaggtcggaggacagctctgctctcagttggctgtctcggtactttctggctggggaaggatctgacgtctccttcccccgcttcttcctctccctcccctgccagagatctcctttgtttattcgtggatggcttgtaggtgattcttcagtgttgtactgaaatctttaaaggtggaaatggtgtgtcttggttcattattcttgccccaaattttttacgtaaaaaatcagatatagtgtatattctattaccttttcaatttttttcacaaaataaaaaccaagtgcaaactggttaagtattatttaaatgttatcatcccactatccgtttacctgttaaataacacatttattttgagctatgcatttttgttgagagtatatggtatcttttatttgcctgttcctcccatgggagcgttttcagaactttctcactcaagtgtatgaagttcttggtgataggagtgagggcttgattaaaggtaacctcctcccacccccccccccacttcatttattcgaccaagttatctaataagactccgttatctactcttgggatgtatgcatatgttacatcgtatcaccttgctttaggagtctataaaaacattgttagttgcagttagtctctaaaaatcctttcactccacaaatattttaattttttctgtccgaagtatattagcagtagcatactaaattctagttagcagtcaggagtgtagttattacaagtctagatattttaagtatttaataaaaggcccccacttcttccttaacagctgtagtctaattggcctacgtagatttatacgttttagacagggcttaatttaccttttttctgcaggaaattttgttaatttattaatatattttctttaggtgaatcaaaggagagtcccagaaaacctgtgactgttgaagaaaattcatctgtgaatttttatattcaaggagtcagtatttatattcatcttttaaactgggaagatttatattttactttaaaacttcttgataataatttacaatgaatggacacagtgatgaagaaagtgttagaaacagtagtggagaatcaaggtaagtaagcactttgttatcaattgtttactatgaagagagttgaaaacttgacttttttctttattgttattgttgttatttagttttcctcataggtagcagagttttcaggttttcctcttagctatccaaatactaaaaaaattctgatatacgaaccttttttcataatacaggttttaattatatttttcattcagatacacagtagatcttaaatatagaaagtttttgtttacttaaatctatttggaagtttatatttgagctaataattaagctggagcatgtataatagatttaaattgttttgactgttagtgaaatttctagatgaaggcaataaaaattttttcactcatctttttctggcattttgtcttctatacctgtactgtccagtgtggtaaccactagccacatgtggctatttgaactcaattacaaaatattcagaatttacttagtcatactagatatatttcaagtgctgaataatcacatgtggctagtggctaccatattggacagcacatagaaaacattctatcactggagaaagttttagacagtgctgagccagacatttgttgaaatattactgtggcccttttttattttcagattggagttttaattatctgtgaaggagttaagagttcttgcttgggtcaagtgtttgcaaagaagattctttaaattctgtagctctcaaattttgagttatctgcacattagtttacaatccatgtagttatatgcattatcatatatagaaattaggaatgtgggcactggagtcaaactgtttgcttaccctatttctacctcttattagttgtgtgaattagggcaaattacttaatctctgaggctctgatttttgccccataaagaggggattaaactattgtttatcttatttaaagttcacggctgggcttgttggatcctgtttgtaatcccagcactttgagaggctgaggaaggaggatcacttgaactcaaaagttggagaccagtttaggcagcatagtgagactttgtctgtaatttataaaaaataaaatttaaaaaaaat

SEQ ID NO: 116644 - DNA, 1078 bp, Homo sapiens
ctatttttataacttaacatcaaaatccaaataaaagagttggattataatattcttattaactttactaaagcccgaacgacttaaaaaataattgcatccggtcttacagtaatcccaataggtaaatgttacataacttgctacaatgaaaaaaaccaaagaatataaacctataagtaacttatttaactgcttaatcaaaccagtgaaatcactagctaatgtgctgtatttgatttatgcgcttgctcattgacactcttaatagaagctctgtgttggttgatggaatcaataaaggtgagccttatatcaagtgattttgatccatgtattacctttgtgtttatcgtcttaacttggaggacactgatgaatcattttattaataatataattgatttggtagacaccaccctaggaaaatttgttttgctaaaatttctaatgattacatttcatacttatatcttctaagcacgtaaagcacattatgttatttatatttaattattggaaacctcaaaattgacatcaacactggatgtctgtgaatccaatagctcccctttcctcctcaagttcccagcctgtgggctctattatctcactgaatgactcttaatgacagattttttttaaacagcttctttctctaagtcaactaaatttcaagacagagagccatattccaattggaattagcaaaataggaatttattggctccataatctaagagtgtagatccagatactcaatttttactgtaaagatgctgcctgtcttcatctctcggtcaggtaactgtactcctgtccatatgagatagtccaggtttatgttgtttgcctggcagcctgtttagcatttgtcctgacagaagtgttctactatggatgataaagtgtatggtcattctatctgttgattccagcattgggcttatgcaatcttctcctgtggcagtgagatgggcatcaggaaatccagccttaaattgtgctagcctgtatcagcttgtcatcagggcagaaatcctaattatgtgggtcatgggcagttgttttggttaga

SEQ ID NO: 116645 - DNA, 1356 bp, Homo sapiens
tcaactaaagtcatttatgaatattatatgaggataaactttattatgaatataacctagtctttactcacagtagttaaatataaaattcctttaaatagttagaatttctgtttaatagataatttctgaaataatttagacaaaataagcatgtgttattggtgttctttttaataatttttaagactaagtacttttattatattcttccttcccctccaaatctttctgaatagttttaaatgtttttaaaattgttctagaaaggatatttatggtatttttttctttttcttgcagataagaatgtgccttttgatgaaagaactttatctttctacaatgaagagtggaatttctatgtttaaggaataagaagccactatatcaatgttgggggggtatttaagttacatatattttaacaacctttaatttgctgttgcaataaataccgtatccttttattatatctttatatgtatagaagtactctgttaatgggctcagagatgttggggataaagtatactgtaataatttatctgtttgaaaattactataaaacggtgttttctgatcggtttttgtttcctgcttaccatatgattgtaaattgttttatgtattaatcagttaatgctaattatttttgctgatgtcatatgttaaagagctataaattccaacaaccaactggtgtgtaaaaataatttaaaatttcctttactgaaaggtatttcccatttttgtggggaaaagaagccaaatttattactttgtgttggggtttttaaaatattaagaaatgtctaagttattgtttgcaaaacaataaatatgattttaaattctcttaaagtggtccaaattatgtgtttataaaataaacataagactatagaattaaaaattaatatatgtatttgtaatttgtcggaaaatctatcaaaatgttattctattttagcaactactatgtaacatatctgctttgattagatatttcagaaatctgtgaattttacagccatttaatatctttactgtatagtaagatgtagaaatggcaataatggcatagttcaaatacttcattgtgttatggaacaggggattgaggaattaaacacatagactttggagtcagatctatattcagagactgacttcacgatctctgaacaaattatttaacctcactgagattcaatttttcacattctagaagttagaggagaacttataggaaaagcatgggtcatgaactcagttgcttactgagaccagggacgtaatttaaatgtgcatgtaagtcaggattggctaggtcagagagagttaacatatggt

SEQ ID NO: 116646 - DNA, 1057 bp, Homo sapiens
aggaaatttatagcaaccaaagaaatagggcaagagaggcaggtgaacacacatgatacctcaattgacaatcttcctcccaccaagccagacacgttgtaaatgctgcttcctattggagcccagaaaaaaggaaaaggaaagtttaggctttctttgtcctttgtgtggaagcagggaattggattgaagactttcatagttgtaacataaaggcaaatcctgaggaactcactgatggagatgtgaaatggcagtaaggaagaaaacagaataactgaacaaatatattagtctagggccacttaatttagaggaagaaaaaaaatcaacccatccatagaaatagtttgataaacaggtcactaaatcattggcgtttataaagattcttagctatcaagggctgcattgtattttatatactcagttttataaggtgatactttttaaataagcgctttaatgaaaatggttagactgaaaataattttggtccttaaaaggagtcaggagcttttatatataaggtacatattttaaaagaatacctcctttataacagggttttacagacactaccataatttataatcattattttttacttttgggttcacctagatcatatgagttgatgtgatacttctagaacaaaattattcatagtgcgttttttgtaatttatgattgttaagtaagcttgacttataaattgacattgtaattgtgtacataattggatatatgtgttaaaatttaacatttagatttacttaattgtagaaaatacaaatgtaaaacttacacatggaaagaactgtatgcagttgactttactatgtaaattggagggaaacaaagttttagatccattttctttcaaaattttctttattgtaaagtatgcaaaatatatattcataccatttattaaatcagaatgtttatacaaaattgtcgtgtttgagcttattaaatgacacaggtttgaaacttgccttatctctgtgaacataagcatattttatggatgggaaagggaaattagtatgct

SEQ ID NO: 116647 - DNA, 1023 bp, Homo sapiens
cctaagaattgtaaattggcttatagtcttatgaaatgggtataaaagtaaaaaatatgtcatgagttttgaaacttattaaatttgttgaatttattttttttgaaatatattttcagctacggtcttaatcaaaatttaaagagatttgtggagatcatgacttgtatgtatatactcattctggtattgaatgaaaacaatttatcatacctaagtaaaaaggatacctagttaattcaatcagatgttttttattttcaacttatagtaatgtttaaactcctgtaagtttaatctatatctggactgttaatgaatgaaaacaatttatcatacctaagtaaaaggaatctctagttaattcaatcagatttttaaaattttcaatttatagttatgtttaaaactcctgtaagtttaatctatatctggacaggacatttttaagtaagtcaaaattttcagattttcagtcttaccttgtttaccttctattccttcactatagttataataaatatatgtttttttcttttactttgcatacaatttagaatgcaagtggttgaaagacttatgtttacttttgctctagaatcctttacatggtaactttaatatctgtaagaatgttagaaaaatataggggtttgagagctcaatttcttcttcctaagactaaatcaaggttatctctttttttggagttggggagaggagggaagagataaagtaatagtcaaagttatctcttgtcatagataaatatgtttaaggattgaataatttgggaagcaattgagcctaactgtagtggcctatggggtctcttgtgccttttgtagtcttctgagtgaggtccatgggagtatgatatattaatacttggaaactctatcaaactggcttcacgggactttaccagtttgacttcatcatttaaagaaaaatgaattaaggctagttaactataatttagtacgtagcaagcatcagtcttgttggacacctgaaaattca

SEQ ID NO: 116648 - DNA, 1006 bp, Homo sapiens
atacctctgacgtcttgattcttggagtccaagcctagactgctttggtaagcagcaaaggaagaaaacgcaagatagtttcctgaacaatctcctgatgcaactgtttacaggtttcatgtcagcacccaaggggagcttatggccagagactcccacagtctctgtgtgttcccagtgcttgggctcaagggaggcgcgctgcgggctgaaggctcaggtcagaaccgcaggggcttgggcggaggcggactccggtcgaaggctgtggggtgagaactctcgccccctctactcggccgccgccgggtggcacgcccacgccgcgccttccggttggtccttgaggcgacgggtgaggcacagctgagcgccaaagccacaggctggggcgctaacgcccccgctcagcgctctgcgctccagacagctgcgagctggagtaggaaggttcaggcggtggcggagagtgcgctggaggctggagggccaggaggcgggaagcttcccgcacgggggcgctgtcacctgcctgtgggaggagccagagagggacctggctctgctgctctgaagcaccggagtcgggagaacccatccagacatgaagagcgccaaaggtattgagaacttggcttttgtcccctccagcccagacatcctgcgccgcttgtctgcgtcgccctcccaaatcgaagtctctgccttgtcctctgacccccaaagagagaattctcagccacaggagcttcagaagccccaggagccccagaagtcaccagagccatctctgccttcagcccctcccaatgtctccgaagagaagctccggtcactgtcgctgtccgagtttgaggaggggtcttacggctggaggaacttccatcctcaatgtctccagcgctgcaacacacctggaggctttctgcttcactactgcctcttggccgtcacgcaaggtaaagtccagcgcccgcttgaggctcgggccagtggagagcgaggt

SEQ ID NO: 116649 - DNA, 1016 bp, Homo sapiens
ataaatactattttgtgaaacttttgtttcaattatatatgctgtgtttactgggttgagagacagatataaaatatgtatcttactttggacagaggtacattctgttacctgtttcctcacaatcgagaaaactctagactggccagccgggcgcagaggtgcaggcctgtaatcccagtactttgggaggccaaggtgggtgccttgagtccaggagtttgagaccagcctgggcaacacgacaaaaccctgtctctaccaaaaatgcaaaacttagcctggcatggtggtgcacgcctgtagttccagatacttgggaggctgaggtgggagggtcgcttacaacctgggagggtgaggttgcaatgagtactccagctgtgccatagagccagaccttgtctcaaaaaaataagaattaaaaataaaaataaattctagattggcctaaaacatggggaaagagtagaagtaggagctaacatttaaaatgtctgctatatgccccattattaaaatctttacaaaagcagctgcactgttatatatagtttacatattgaggaaaccatatcccataaagaattagtaactgtcccaaagtcacatagctaataagtgaactgccacttaaggatctgaactcggctctcttagccagaagtcttccctaaactttgcattttctgtcttttaataactacagtgtatctccatcaggttaaattattgcatagcaattttaagagatcaaaattcaaaattctgtgatattcgtgaggcttagaagattaatgctgctctgaaaacctagattttggaggtattcaaattaagcatggtatgtaatcttcctgggcttgctttctacaaaaatggactcaaagtaggtaactattttgatcaccattttatctatggaatacgaagtaatttacacaaccagaaaattttgttttgatgggatgtgattacatacaatcatggcttaagactattttgcagctgtgact

SEQ ID NO: 116650 - DNA, 2085 bp, Homo sapiens
aggggaaacatagaagataggaagaaagtagtcttagttttgaaagcacagccctcctggtattcaagctaccaactttgcaatgtttaccaagcagtttttcatctgtacaacaaccttggtgaagatgtgtctggcttcttctcctaaatactttgtcttcatgtctggtggcttggtctagcattttcaactacaggatcacaaaggaaggaaactggaggagtgacctttcaaattcttgagaggaggaaatggatgtttacactgttgttggctagaattttgaagcctttcaaaaataaagttgctctgtatgccccagattttatagagagaagtccagtgccaagttgaaaataatgttttgtaatggtttgtcaccccagtggcttggatccccctgccacctacctgcccctagaggggctgtgatatgctagaagggctgtggctgggtttaaaagaagaaatgtttatgttttcttgtcctagtaaactatagacatcagaatcataataattgttcccatttgttgaggtcattttgtagagtggagaagaaaaccagcttccttctggcattagacatttgggtcaagtcttaactctgcctcttactataatagctgcgtgaccttgggcaaattactgaaaaacgctctgagtgcctcagctttatcctttttgaaacagggatgtattggtgtcacttcatacagtgtggtggttgtaattattctttgagattaatgcacataaaatgcatagaaaatgcttggcacagggttaactgcttaataaatgttggatatcattattattgtatgttgtaaaccttacctagagtacctctaatgttttctataaccctgcagtgtaaaccttcatccctattttacagaggagaaaattgaggcttataaaggtaattgttttgttttgcatgtgagggtgtttgaaaatggcctgttttgtgctgtcttcctcatcctgattcttgccctctgtggttctctaccaacaccaagcttgtgaaatagagcaaaaggggattgcattttgtgttttctcaaacttatgtgctaggatgcttgtgcaattcaagagatatgcacatggttctcaaataagtaaactatacaggcccctttcaaaggaaaataccctcacttccagtttgacttaattatacttgtcgtagtattacttaaatatattcaaagttggagtaatgtcttagtttatagcacttatacagctataaaataaaacacatttacaaattaaatgccaacaaaactataacacaaatacaatttgagaaattacattaatttatgtgacggatgttgatgttttgctgaaagtaaacttcaattttgggttcatctatagttaggatggattttatgttcaaactgtgtctaccttttaatttcatgattttaatgtatcacagattttcaaatatctggagtttcatatgattcaacctatcaaaacaatgtattttgaaataatatgtcatataccttggtggtaataatatcaaggttttggcagttcagagcaataggacttcaggaatgccaattttaatgggtgttacttgacaaacttggaaaactattttacttccttgggagtcaagacattggctcaatatttaagtgcagatctcatgctagacccagccctgagcttaggaggcctagagtcagacttcctgggttcacagttgctacactgtttttacatacaaattcctatgaaatttacattttgttgtaataaactaaaagtactgggtccataagtatgaagatatatagttgttgctttgtattgtatttgattgctatttacagtgcagtgacaacgtagaggagttcacagtttaccatatgctgtattaggagttagcatacttttcctgtaaaggaccaggtggtaaatattttaggctttgtaggccacatgtgatctctgttgcaactactcaactcttttcttatagcacaaaagcaacaatagacaatacataaaattttatttagggacattgaaattaaattttatatg

SEQ ID NO: 116651 - DNA, 1177 bp, Homo sapiens
atgtttatattcgttctatcttccccataagatggtaacattgtcaaaggcaaacagtttgtctttactttaaaattgcccagagcattctatatagtattttagacaaggagcattcaattaatgtttacctgacaagtaaacaagaggaaaaattaaggtttcaggaaggagactgtaacattaccaaaaatcatattaaggattcagaataatcaaaactggcatttggtctccctggcatttagaatgaaataaaaactagaccccatatgatggataaaatgaatcatgggactgctcaagtagattattattattgttttccttccaaagcctggtctgtggcattttgttccagaggaaacttgagagctgtggtgattaaatcttaccaaattagaaacctctgaaatgagtcatttttattttcattcacttcatttttacatggaagattgcatagacaagcaaccaaatgaacgaagcttagttttctggtgggttggtgatgacagttttctcagtttgtagttgtcgtggttcccatggtaatattttatatgtagatgctatacaggtcaggtttacccgtttgtgtttttggagggaatactttgtgtgcatttgaatcaggcagtccttaattctcagagatctactaatagtatgaatataagatcagaatagaatagaattatctgttgtggaaaactccttggatttgccgtcagaaaacctgatgggcttctctctgtgcctctaacttgtcttctgcaaagtgaaggaattgagtgaggtactttataatacaaagattctcaaccctattggatccagtgtctcctttttcatagcatatgttttgcagtgccctctttattaccaagaaatgaaatttatgtgtaatataacctgcctaagtgtgtaattcaaaaatatgcatatatatgtgtgtgtatatatatgtgtatatatatatatgtatatatataattcctaactttaatataaaagagcaatacaggaataagtaatttataataagataatgtgtatttcattcaatatgtaaatgtttagttatgattacaccataagacctaatgaagtgttcaaaagcttgatcctatatgtagaataacagtatgtgtgacagctacaaatgcagattgat

SEQ ID NO: 116652 - DNA, 1042 bp, Homo sapiens
ggaaaaaacttggctcttgttttagaaagatacttgaaaggaaaacatctatgtttattgagaagtgagaagtacatgcaaatctttcaaacataatatttgaaagtgaaaatcacgtcataggatttagagatattcccaaagtcaatatttggttcttaagttccaggtagtggaaaagtcagaatcagttaagtacccagagcacttgctcccttcctttctccatttctctctctctctctctctctctgtgtgtgtgtgtgtgtgtgtgtgtgtgtgtgtgtaattttatttattactggtgaaactggtacaggcaacatgttggcttttttgtcaatcagtttttttttttgagaaattttgcttttgtgaaaaatctgccttttcaaagttttctttccttctattatactccccatatttttggtgtatctgagatgctaatggcctttcattttcaagtttttatttcccagttggcagtaccacttttacactttgaagatggaaacttggcaggaaaattgtatgtcagggtgtatttctgtgtggggttgcaagggcaggaaagaaaaaaaactcaaataagaggtattttcattgagtatgatcttagctggtggcatatataattacccagttatttctctcatgaaatgaatgtttatatttgttgtcatgaccaggatcagctacacagtttgtggggcccagttcaaaatgaaaatgtgggtgtattaccagatttagcaaaaaaaaaaaaaaaatagagatgcccagttaaatttgaatttcaaataaacaataaataattttgattatgtccagaatatcctgggacaaatatgattcagttttctatcaccataaattagtttaaatgaccattgcttagatctgtcttcaatttcagtgaaagcaaaggttaaaactcatctgagttgcaatagaaggtgttgcctagaatcattgattttttcaataccaacaccagtatttggaatcatccctttatttggtccccactgaagttttc

SEQ ID NO: 116653 - DNA, 1114 bp, Homo sapiens
gtggtgttacatctgatttttgatgatatgaagttaaatattatgctggaggagggtcatacttttacctgagacatattgctttgttcttattccatttggctggaattcttcctattaagtaactactattttaataacaaagttgtgagtgttgtggtggcattattaaaatacatatgtgtcatctgaaagtggagataaaatgtgttcattgtcaggggaacatgtcagatgcagtgacagaaatttggtggctcagtgctctgttggttgacactaacggtcagaggctaggtgtgaagaaactggaagagtatttatggatgacattaccaaagagagatggactttgatagagaaaagttagctaatactggcattattgggagttataccttacgtcataggtataaacagtacttttgttttttaatttgggttttaaaagcatgtggtgaaagataatgaaatagatccttggctgttaaaaattcagtatagagactgaatttgaggataattgattttttaaaaatcagaagacatgtttactggaagttggaattttaaaagcaaaacttatctagcaatttgatttctggatatgtacccaaaagaattgaatgcagagactcgaatagacatttgtatgccagtgtttattgtagcattattcgtaatagccaaaaggtggaaacaacctaagtggttgtcagcagatgaatggataaacaaaatgtggaatatgcatatgatgtaatatcattcagcattaaaaaggaatgaaattctgacacgtgctacaacatggctgatccttgaagacattacgctaggtgaaataagcgagacacaaaaggacaaatgtggtatgatttcacttacttgaagtacctagagtagtcagattcaagacagaagatagaatgctagttgctcggggctgggaggaagagagaatgtggagttactatttaataggtacagagtttcagtttgggaagataaacaagttcttggagatggatggtggtaatggttgtgcaacagtgtgactgtaattaatgggactgaactgtatacctaaaaatggttaaagtggctaattcta

SEQ ID NO: 116654 - DNA, 1119 bp, Homo sapiens
tttctgaatgcaagataggcatactgtagtaaattcccttctttcaaccctgggttgaaatcctgtcaattaattagttgtatttagtcttacaatagataaaccaggtagtttcacatagcctgtttctagggttttatctaggacatcgtaggagtttcttgaaggaaaatatagctatagggaacattttaatttggatctgcttcattactccaaatattgttgaaacaacaccagatgtcatctttactgggcaatatacaaacattgggagaagttgtacccatactaataagggtgaacataaaaaatggactattgctcagatttgtgttctttacagcagagtgtttgacaaactctttgatccttcttttttttcacaagtggagattagagccatttattgtttgggggttgtaatttatatttaaacatggtatgtatggaatttaggaaattcaccttagacatatgaagcttaacattaatgtgtgtgtatatgtgggtttgtgtatatgctggagggaataagaagtgacaaaagtaatctaaaatcttaatgttgagaaaaatattaaaggtaaatgaaatctttattgtcataaactgctctccaatccagtactgataaacgacgtggggaaagactatggaggttactttcaaaacaaacatttaccatgttccaggaaatacatgtgtttgtataaaaagcaggtagcaattacataaacttttttcttctttatctatttgccaagcaattggctgttaaggtctttttggttgcctttgggcactttgtgtgcactcttttctgcttttaaaaacataatgcatggtaacccatttgccactgactggcattgtgaagagttggaatggggcagtgtaataacatgaaaggctgatgacaaatttagtatttgtaatttggaatctcttctcagtacattagaagtcttccctatttaaaggaaccctgaaaccatcattttatcaagtgaagagtttgtaacacatgattaccattggttttcttacaaatcagaatacagcttcagtttttgaggctcctaccacagttattatggtggtctcttactggctgac

SEQ ID NO: 116655 - DNA, 1063 bp, Homo sapiens
cactcaaatttgaactcagtggaatttttgagataaagatgtgcattgcagccagatcagtgcccaaagtacctcgtggtatgggtgatgggagacaatcacaatgtaaagagttctgtttctcgtactgtatatattagagctggcattttgccactggactatatgatgagggaggaatattgtttgtgagctttgcatttaaagcataatttctgaagctgagttctaattttatttattcccttaggtaattactggttttcagcatgcgaaggaggtatattattgaattttttgaatggttaaacttgtatagtagatgtcttttctttaaatttaggcactaaaaattctcccgcatcaaagtagcttgtgattctcatttgtggctagagagttaatcatctttcgataatgctttgaagttagctttacttctttttttcttcacccagcatgggttcatgaataaaactaaccactgataggtatagtgtattattgctcttgcctatggctcttgctaataaaaattgcaaatctggttagtttgctggaatcaattcaatgtagtataggaatacatttttttctgttataaagccctctcacagaaaaaagataggaaggaaagcatggtgggtgaagggaaaagaaggtaattctggatttaaaatattttagcttttctgtctgtatcgtgttttgtctataacttatgtgagtttttacttctcactgtcctagaatctttaaaattaaaaatcctattgcttaggatgaaattactaaaaattcctgtaaattaatgtatatgaatctgctgttgtgtggatgaagtagcatagcaacgtcaataacttcttttgagaaaatgtgtgtgtttgtttttaaaagcagctaggtaagaaaccatcaactgaagaatagggtaggtgatgcaaccattgctaaaataacctggaattctgacagtttctaaaattatgtcagcttgcttacaagattacttaatcactaaatcacatcggatttggcattttaacaaacaggatgcttt

SEQ ID NO: 116656 - DNA, 1051 bp, Homo sapiens
aaatatttatatctgtacctgcattgcgtccccattttctcatttaagagtagcataattgttttttttctttgtctttcacagcaggacgattgaagtcattaaggtggatggtttctacctgttggttagacttttctacaaaactacggtatctgctaggttgtggcttatttcaccactgtactgaatctcactactttatacaggtcagggcatctcaccactgaaatgtattgttgagtaccttcatcattgtttattgagcttttcatagggtttttcatatagaacttgtaactgcttgttcattcttctccatgactctcctcttactacaccctcagctcagttcctttaatgagaagacattctaggaagttctgggtattaagctggagtggtggaggtctttgaaggaggtttgatattagaaatcagattcactttcacaaggagcatttaaatcattttagccaattaacaccctaacatgtgatttaacaccatcaagtccccaagttgccaagaatgtggcccatgcctatttcccctggtatgctgtctagattgctgaataatgtttgtcttctattaattaagaattctgtacttggcaaattaagcatgtttgcctaaacaagtctcacaaatgtgataggaacattagacttctgactctgtattttggatgttttgttttgttttgttttgttttgtttttggttatctgagagtctgagttacaaggtaactcagaaaccagctctctcaattaataggtcagaatatgaagtttgtagtagttactaacccaaagacagataagttttaatctctatttcagctttgttcagtgggaattttggtcacttggaggccataaatttgacatccttcaataaaatcaaagtcacgtagctagtttgtggcacagcctggactagaacctggttcttttgatttctagtctcactttcattttttcctagtcactttattataatgttcatggaaaccgttacttgaatacatttttataaccttgtaa

SEQ ID NO: 116657 - DNA, 1058 bp, Homo sapiens
tagaacacaaagaaaaaatatcaataatttaactttacaaaaatacaacctaaatatatatatatatatatatatctccacatatgtgtaaatgcatagaaaagagactgaagaatattaatatggtttggctatgtccccacccaaatttcatcttaaattcccatgtgttgtgggagggacctggtgggaagtaattgaattgtggaagcaggtccttcccatgttgttctcatgatagcgaataagtctcatgagatctgatggtttcataaagggaagtttccctgcacaagctctctctttgcctgtcaccatctatgtaagacgtgacttgctcttccttgctttccaccatcattgtgaggcctccccacccatgtggaactttaagtccgttaaacctctttcttttgtaaattgcccagtcttgggtatgtctttaacaccagcgtgagaatagactaacacaaatatgtacaaaattattaagagaagttacctttatttgaggaatgggtgttgtgtgagttagtctttgacagtttactcaagtactgctgtttagtttgaagcctgaaacaacaacagtgtaatgagttaatgtatcatttattgaaccaaaacaattaggaatgggagaaaaagcaaagaattaatgcacagtctgcattgaataatttttatgagccatactttgagagaaacataacttctccatttgatatatacaacaatgttaggatttggtaaattcgccataatctagagacattcttatcccaccatcaggaactattccaagggaagaggaagaggagaaaaatgtggttttaagaagcaaggtcctaacatggctctaagaagcaagtcagcccactaggtgaaaagaaagttctacagcttgatcagtggtactgttgtacagtatcctaacctaaagcctaattatgttttaaataaaccaccagagcctaaggacttgacccatgagtaaatgcaccactaaatgtgacatacatgataaaacactttaatgttactggaattgtggtttc

SEQ ID NO: 116658 - DNA, 1032 bp, Homo sapiens
tagccttgagttcaagagaaatacggcatgttagtgctatgttattatttatggagaaaggactttcacctttgtgtttttttcttaaccttgttttaattgatcaaataatttaaagtgtgttttctcattatatttgaatgcattaatatttaataatatcattctttcatctctgtcattcaacttatcttttctatttaaccgtagatgaaggtattgtggaacaaaatgcaaattctactatgccaaaaaagcagtaatctgtacaacatattcttattttcctagatatatacccagcataaccaatgtggaagctgctttccccattggtatctatccctgaatcaatgatgcagtcatctgcaccagccattatgatggtggaaatgactggccagtcaagcattggccattaattttgaatacatccttgaaaatcatgttgaaaaataaaatggtcagcttcttttaagtatctgatatacctctggactgattatggggactactgattattttaaagctttattttgtcaatggaattttacaggttttgacaatgaccttaatatatttttaaataagaataaatatgaaaaaagaataaatatgatctctatcaaatgtgtaaattttgtatctttatgaatagtttatttaaaagagtaatgctctgtttttttctatttggtttctatttttttcaatctttaaaaacataacctttcaaaagggtaacggtttctggttgggattattagaagtatgttgtttgctttatccagagttttacataatgttatgagttagtcgcaccaggatcaaagaagtttttttaatttgtatgatttcttcagtgttttaaagagggatgtaattttatgacaatagaaattaatgtggattataatgggaagcaaatttaaaatataaaataaaatttatgcatatatgctgacttttaaaactccacttcaaaggaactacctcccagcaagataatttacataagccctttatttagga

SEQ ID NO: 116659 - DNA, 1109 bp, Homo sapiens
agagatggaacacatggaccgtgattgataattgactgtatcccgcctccctttccgcaatgattggttcaaaagaaagtgtgtgatttagaccattcaaatcttaggacttttgctgagaatgtatttttctgttgcatgtgagcagtaggcttgtcttgctagggtctgctgaattcatgagggagccatgcctataataaaactaacaccatagagggcaatgcagagagattgaaagaatgtagtgcttggtgacgtcactacttatgcagtgttcagttatgttagcctttctggtttgaataaagttgagttgggttttgtcttacttgcaactgaaactactgggtaaatgattcagttgctctgcctgacagctcagaactgcttgttgaatatttcttccatttttttcccatcactctctgttgaccatgtgccatgagtatgtaacttggttcagctgacatacagatcttatactttgtaaacttttatgagaaatggtagactatccattgaatatgcccaggaagaggtggatacagaaccttcagaacctctttccttctgaatttggtgttctagtgaggaagaccaagagctctgatgccgtaagtacttttgaagaaagtattattttcttaaaatgaagataaaaccaaagttttacacaagtccttaagaggaaaggaggtgaaaaaaagcaagacagaataatgaaaacgtattagagggaagaaacaaaaggtagaagggaaataagaagagttgaccgaaaaacaaaatgaaaaaaaggtccaagaaaatggaatgatcaagaacaaaaataaaaggaaaaaaatcaggaataactagactatgaagaaagaacatctaaaaatcataaaagaatagaggttgaaggaaaatgtaaaaacaaggaaagacattgagttaaatggcagaggatttttttttttttgatcgcagacaatcaagaagagcaacaaaatttaaagaaggaacagagaagaacttgagttgggaattgagagacatcatgttgattaaagaaatgtattcattccacaagatttttttaaaataaagtacatcttaagttt

SEQ ID NO: 116660 - DNA, 1041 bp, Homo sapiens
ataaagggacgaatctgatgtacacattagagaaatggctctgtcttagcaggcaaaagtcacctcattcaacaaagctcacagcacttttaaagaggagggtatataaaaatagcaagtacatttctttgtacaatgtgtcatactcccaccctcagcgaatccagtattaaatgaaaacatttgccatggcaacatcgatttacaaagggcaaatgatgtttctgagagattggagtatttcctttcatagatttcagaagcacacacagttaacactttagcaaccttgtttaataactatatatatatataactataaaagctttacttgattatttttaagtattggagataaaatccaaaacaaaacaacaaactcctaacaaaaactgccatcaaagtagattcaagcaggaaaaaaatatcactagaacattttagccttcactatttatgggaataacaattatttcatgtggtaagctgtgctaaattaaatctgtgaatgatcattttgctatgaaaatgaaaattctgtttatcttaccatttctacagttgacgttatcagttataatatttagcctcctcattttggacatctttaaaatattttatctatttttcataaatgctaaggcagaattcacagattgcagttgtagtttcatctatttgactcagactatgaaggcagacacagtagatgtaagaaagaagatagattggtagcctgagtaaatgcaagtattgaagaggtgaccttagtggggtcaaacaagtttagaagttaacaaatagtctctatattttttctcagcttgtcataaccactccatgatacaaaatggagaaaattgtggccagaggtgaggaaattaagtacctgccctaaatagtttatagtcaagagcaaaaaatttgtcttactcatttctttaactctgccagaggtgaatactgttctactatctaacctttatttaatgggcacagtaagctgggatctagaagcttatggcttctgagtgtaaggga

SEQ ID NO: 116661 - DNA, 1147 bp, Homo sapiens
atacatttatttgagttttacaagattatttgcatattttacatactgtctttaacaggaaccatttcaggcaatgttatatggtgctgataccagttatcaatgcgtaacaaatagtaaaagtgcaaataatacatgaatacattaattttcaaattgtcgtttgttatatatgtagcagagtctcacagtttatagactattcttcaagtaggcaaagaaaataaatattttactttaaaaaattgatctaatttagcttattacacctgtgacctctgggtatcaagggaagaaaaccttcaaaatatcagttaaaggtatctcactttcttctggttcaagacagtcacctcaactttttagtaagctatacctcctcttcccttttttatttgtcagtacagtatttggttgatggaaagggaggtcttacatgaatggccttgggcagtggaagaggtcttaaatgaatgggattcattgcctctgtttccttaattggtgtcaatttcaataactgtgattatgaaattaacctccatttggccagaggaatttcttttacttcttccttttatttagaaaggtattcccctatgtcatgctttctccctttcccagcttagctttagccctgccaacctccttggagccataacagaatgcttgctggggaaccaaatatgatttatgtgggagaggaatgtgaatacattcaaaatactagtattacaaatatgtaaaacctgaaaacccaaaaccttgcacagaactgtaacatttataaatatgctgaagtctgttgggttgtttctaaaagtcatctactttaacattgtagtttttattcttttcttactctttcatgtgaaaagtatctgcttttgtagtatatcacttcactagttcccagtgcatcataagaagttaaaatcactgtgtgctgaaagggtaaattaggtgtttaggttcctaagtttgtgttggtatcactagtctatggaacagaaatagtttccagggttggaagtcaacaagcatccattgaaattctctacttggtggcatattcttgctggagtctgtgtaatatcaacattgctttaaataattttccttaccttattttattttgactatttga

SEQ ID NO: 116662 - DNA, 1036 bp, Homo sapiens
tatgaattgtgaacggctgtaactcccaagtgattctttccttccaaagcatcttcttccatcccttgtgcttactatattctttggtaatagaaaaccaagcctcaagttatagcaagtccattttctggccattctctcttcattaatattttaaatgatgacatgaaaacttcaagatttgatttttaggcttcaagttcttactttcattgcagtaaaagaaaggtttgtctcttctgaaagttataagccaagatggcacacagtaggtttggcacatagtgctatgtttttggtcagacacactgtgagtcatggtgctatagtttggtgtagaacatttttttgttttataagtactcatgtctcacatacacattttagcaataagtgatgttttcttaattttatcaaacagaccaaaatagctgaaagatgcatttttgcacacacctgagatttaagatcattttggggctatttagcattttatgtgcaaaggtgactcgtaaacagctacttcatactggacagcattttgatgagaacgcaaaaggatgagccaaacccacactaggaaagggagttcatagataataatatatttttaattttttctcttttaattatgcacttgtttattttaatgtctttcaacaactattattaggagaaaacgagaaatgtcattccataacttctaatatcttttaacaagtataccatgcttattgaggacagtaattttatgtctttcgtatttttgtaaagatacattttccacttttatttttctttcctggtaaattgcttcttcatatacatcccagtgactatcgtactgttgttattctaagatggtcataaatttgtgttatgaatttttgtgttcatattttgaccactcactgtggcttctttttcactacaatgttgagcagtgttttatgatactcagcactgtactgatgtctaaaaggaaatatactgtgaatacatagcctgcagatttcatttaatacccatataatgc

SEQ ID NO: 116663 - DNA, 1036 bp, Homo sapiens
tttaaaatcagagacagagaacagagttcagagtgacagaatgagaacagcctaactaaaagggatcatcaggcctcacccttccgttttacagaaatgaagatcgatgctcagaaaggttgcatgacttgcctaaggtagtccagtgctattaaaaaccaaaacaatttaattcatattggttttctagtttgtgtatgtaacaaagttcatgctctaactatgtaaaacaagtaatagagtcactgtttttaaaagtcttttgagccatagttatgaagtgaaatgaactcatgcacagtagaattaatattaataaagatcagagtggtttacttcatctcatttgtgccttttcattttcatgtctgaagtaatccatttcccttatcatgtagagatatttctaaatcaggttgcttgataatcccactgatttcagaattgtaatcggatattcttcatgttcttctctaaccttcattatacacaagcagcttgatgtgagtcatgcgaatgattttaggactatttagtacctcccaaatgatctgaaagaagcctattatccttcagtatttttttcttgcagcctcttcacataattgtgagctctctgattctctagcttgctgcatttcaactttgttaatcatctttagtatggaagacaaatgatcctcagtcatctcattgattccatgggacacctgtttattttaatacctaaatatggccattatgtatcaggaattacactttcattcatagggttatgagaagatatgtaaagcactacagttatacttcttttttaaagaatatattcagaatgttttttatcccttaaaacgtggatttttaaaaaagtaattcaacattgagcagagcgtaagtgatgtcttttttgggaaaagaaaagctttcctacatgcaatttagtttttcagatttacatttagttcttctagtttttttgagaaatccttatgctttacctttattgatccctttgcaactcatgtttttttaatcg

SEQ ID NO: 116664 - DNA, 1050 bp, Homo sapiens
gattgttctatatagactgtaacttcacttattttctttgattttctcttggattctccatgtagctatggcaaatattacttattttttaaaagatctgagactccaaaattattggcctaaataacctgactttccccaattcctatttaggatgcctgtaatagctatatatgtgtattatatctatatatcaatatctatgtatttctgatttctactggttttccaagtggaccacacatttcagttcccgattttcctgtcacaaggaggttagtcctctaaccagtttgccactgatctggttactcaggaggagacactaagtattttatattctacttttgttgccaattgtagggaccaggttgaccctaaatttattctttgcataatatacatggatatattagaagtccattcttacccatattttaaagaaaggttaactggatttgctgttgcaggcttgctctttgcagtgaatgggaagcctcattttggggaccaagaacctgtacaaggatttgtgatgaacttttccaatggggaaattatagacatcttcaagccagtgcgcaaggtatttacacacattgtctaggtttcaattttcatgagaagaagactaaaatataaatcttggcattcaatctgtacttgaatagctttagaaaaacttttaagaagatgtgataactttcttagcaaggttgatgggagtgttctattttattttttattttatattttatttagaataaatgtctttgtctattcctagatcaatttcttcagatgcaaattagcacgtgtgcagttctaaggttcttagtagaactgcacctgcatatgatggcaggtttttaaattcactatagttagaatacaaaaaataaatcagtcgctttctggtttcatccaagtagagaaaacatcacaacatgttaagtgtactcttaaagttctcttagacccaacagacatcttgtttgctttctttattgctatgactgtgctaagcaacaagacttgaaaatagcactt

SEQ ID NO: 116665 - DNA, 1009 bp, Homo sapiens
ggaagcatagctgaccttagcacgtaaaatcctcgctctacactgggacaggattttgttttgctattgagaattcttaaatgaaatagataatttttttgtctcagatagataaaataataacgatagttgccattaactgagtcttatgtgtgccgagtgctttacatagtttgtcatttattcctctcaacaattccaggaggtatgttagattattatcaccattttacagagttagaaatggaggctttgaacagtcaagcaacttgctctattaaacatttgttataagtaaacgtttgaatctgtgttaaaaaccagatctgtctgccttcaaaatctgtattctattgtcctgtcctgttcttcctcgatttcaatttcttcactaacattttcagtgtctgaaagtatccattcatttaaaaaattttggtgtacctacttatatgtctgacaaaagttagacatgatctctgtctttatggagcattgtgatgcagaattaagtagtgcagaacccagaatactgtacttactgcagcacaggtttatttaaagcaaatgactaaactgatttgcagaaaattttaaaatcaaaggttgctgttttaaatgttaaattcatatgactttcagagtagttgttgtgagggtattaaactgaacaattggtagaacatctgttgattacccaaataagtgctatgaaccaagttaagtagtgggaatatatagattaggtcctcattctttaaaagctcccatgcaaccacaatatagacaatgttatggactattaattttctcacgtggaaaaggaattgtggttatgtaggaaggtgttcttatttttagcagatacatactaacgtacttagagttgaagtgtgttgatatctagtactttcaaatggtacagcaagtgtatgtgtgtgtatgtgtctgtgtgtataaatagcaaatatggcaaaatgttggcaattgtgagtataatggtgggcat

SEQ ID NO: 116666 - DNA, 1890 bp, Homo sapiens
aaaagaaatcaacaagaaggttgtgtggaacttggaataggctttttttgtgtaatcttataaatgagccaggttgcctttgccagcctgcagaagcctatttattccctattacctggatgtactattggtggaaaggagacaccatttataacagtgtttccattggaaaatgcttttggaatttcaggaaaactggttatgtgtttgcgtttaggctaagcagcaggagcaggagctcccatttcctctgattttgagagcagagatttactagtttatagttgggctcctgagggaacccatgaaaagggctacagtgatggcttggaaatattaagttcaggtaagggggatctgaatactaggtgggactgatggatgatccagggtgttattttgaggatcaggtagctctggccgtgaccagtaaaggtatggaagagatgattatcccaggcagtagtgttcatgatagtctcaagcagtgtggtaagactagaaaaggtgtaaagaggtctccaacaacagcagtggcaaacgggagtttctgtggcttcattagacaagaggtaagtagatacattctaaattgagttatttatatttgttccttgccaattaaatttgctagaaaactgtcataacaacatttaacaaaatattaaacatctaacatttactgagtgcttaatatgtgctatttgctgtggcatctgtattgcaattgtcaaaacaatatatgagattcataatcccattttacagatgatgactagagaggttcaataacttgactaaggacacagagctgagcaacttgcagaaaaagttttcaaacccagttttgagtctagagcaattgttctcatagtgtgattccaggacgacgagcaacatcagcatcaccttggaacttttggaaaggcaaaatattgggccccacccccagagttttgagattagtattaacaagccctacaggtgattctgttgcatgctaatgtttgagaactactgcattgagtgtggacatttttagtagcataacactcatttcagatttagaaatcaggtttaagggatatttgtcttttgtacagttagattcccaaacctggctgctcatccatttgtaaaaatacagtttttctagttaagaattactgtttaggaattcctaatctgtgataagcccagtaacttgtgtttttacaagtctaccagataattctgatgtaaccagtccattttgggaccactgctatagaaggaattctaaaaataaagtaaggttcaacactgatatttgaataatgtatgtatctttatgcccagacagttagcatatgttgaaattaatgactgaacattgatcaaaatgctaaataatatggaagtgctatatgtataaactgtacttcgttcaagtatcagcgctttaagtgaaataatacaaaccattttgaatgtcctgcatctcttatgatgctcataaaatctcatcttggccgggcgcggtggctcacacctgtaatcccagcactttgggaggccgaggcgggaggatcacgaggtcaggagattgaaaccatcctggctaacactgtgaaactccgtctctactaaaaatacaaaaaattagctgagtgtggtggtgggtgcctgtagtcccagctacttgggaggctgaggcaggagaatggtgtgaacccgggaggaggagcttgtagtgagccgagatcgtgccactgcactccaacctggggacagagcgagactccatctcaaaaaaaaaaaaaaaatctcctcttgtactacgacatatatcctacttaggtgacagaaatgtatttgaatttattttatatttttagttttctgagaatt

SEQ ID NO: 116667 - DNA, 1027 bp, Homo sapiens
agaaaatggtagtatttgtacagtatcctggggaaactgaagagagtgctactggaagcaactggccagggtataacagctgccttaaaggctgaggcaattaatttcttggcatacttacaattcatttatggtgagacaacatgttgggaggctctgaatttacaagtaaggtacttactaggtaacagtgcctaataaatgttccttcccttgagatttatgttgtggagggatatacataacccaagctgttaaataacaaggttatatgtgaccaaaggtcaaaacgaatgattcggagaaggtcttgtaaattgttaaggcaagttttgtagaggagtatctattggatacttgagatgtgccaaccaccagaagacaaaaattctgcttcatcggttttatctcctttttattataggaaatttcctatagtacttgttttcaaaaactggttctcaaacttggctacacattggaattacctgggaagacttaaaattacccgaactctactctcaatcattttgatttaagtgatgtggagtatagcctagacgttgggatacaagcactcttagtatattatcttacatataacatcattaaaatgacctatgagctatgtacaatttacagatgaggaaattgaggccataagaagttaactcacttgctcaagatcagctaattggagtcagtcaggttttaaacccaggtattttaacccctgaatccatgctcttaaccactagcctgttcagtttttttttttttatatgacatctctaagtatctctcatatactaaagtggaataacagaaaaaaaaagaaaggcttccttcactttatgtcctttagaggtccaattcctctgtccatcttttataaactcttcaaaataactgtctgtataacttgtctgtatttcatctccttctattttcttgtttgtttgagacagagtctcactctgttgcccaggctggagtgcagtggtgcaatcccggcttactgcaacct

SEQ ID NO: 116668 - DNA, 1244 bp, Homo sapiens
gaagaactgggagtctgatgtttaagagcaggaagcaaccagcacaggagaaagatgcaggctgggaggctaagctagtctatctagccttttcacgttttttttttttttttctgtctgccttatattctagctgcactggcagctgataagatggtgcccacccagattaagggtgggtctgcctttcccggaacactgactcaaatgtttatctcctttggcagcaccctcacagatacacccatgatcaatactttgcatccttcaatccaatcaagttgacactcagtattaaccatcacagaatagtaggaaacacagcccaataggtctgcacagctacaaccattagttctgccattgtgtcatggacttattaactgattctttaaattttatttgtatgtattccagactttttccaatgaatactctaaaaggctaaaaaaaattaattttcagctttacctctaaaacagtattgttctcactttgttagaacactttaactagaaggaagtacaatacagttttaaaataatgtcataaaatgtgtgtatacacactcatattcatgtatgtatacatataagtacatacctatatattgcattgacatactggacctggcatttcctatcattgccattctgaagtagatagacatttattacattattacatgtttctattatcttttttattggtggtttatcacactaaaacagaaaatgtcaatttatttggctatcttcctactagactaaaagctccttaaggaaaagagccatgtttactttgactttatataaccagcacttaatactatgccttctataataagtaaatagtgtttgttggataactatattcatttcaacaaataatgaacaattcattcttttagatttacatgttagagtcagtagggagtttggtttacaggagtgttcatggaaactatggtttattgagtgtttaatatacgccaagcacttatgctatctcacttagtctttacagggttacagggtgttactatactcccttttttatagactaatagcaactagcacaagtcactagttaagcactgacagattaaaacagatgtacctgactccagaacattccccttccattatcgaaatatttgagctgtttttagatggaaagagtaaaaaaattgaaagaaaccaagagatatttgccatttgataggaaacagaactgagatcaac

SEQ ID NO: 116669 - DNA, 1037 bp, Homo sapiens
gagtctttctctgttattcaagctggagtgtagaggcacagtcatagctccctgcagcctcaaactatttggctcaagccatcctcccaccttagcctcccaagtagctgggattacaggtgtgagccaatgagtccagctatgatagttctttaactgatactcatggacgcctggttatgtggaagagtttgaatgtcagtgaatcacataaaattcttgcagaatttagtgcacatgtactttttttttctggggaggagatccatagattttattagatttgttaaagagtttttgacttctacatgtttaagagctgctgttaaatgaaatcttgttctgactctaatctttttttgttcatttatgtatgagaccagaatatagaattgttatgttccctaaaaaaactgtttacagacaacttttacaaattgacttaatgtaatttcagattaatatttgtcagtggcttttaaagctgcattccatttgtctgttcttttccattccattcagatatttcataactatgtgctaagagatttagctttaatataattttgttataatttgagtaattttctcttaattagtttagctattttgggatgaggaatttaatgtgtagtctttttgttaattcatatgtttgtcaaattgctaagatgtatattactgaagatcagttttagtttcttaatttttttgcttttattataagtaattttcttatgggagaaaatgtattttcattttgacaatatacatcaagttattgggctgattttacaagtgtcattaaaaattattttttacatgaatgtttttggagtgcactctccaaaattagttttttcattgcattttaggtaagaagattgctgtatcaactcaagaaagcagtaacttcactgtctttgtattttgaattgcaacaacaactttgatatcaacaatgaagcaatgatatctaagaacaaaagagtatttgccaacagtcatcataatatcaagtgattgtataagcagaa

SEQ ID NO: 116670 - DNA, 1067 bp, Homo sapiens
gagtggatgggttttgactgttattatactttactggtgtgaggaggataaataaatgctagaggtagttaaagagggggtactttcttagtttgaaatttcattgaaaatagcaaccatatttattctgaaagtgtttttgtttttaaatttgtttccagacttttgtagaaaactgttttttaaatgtttattataacaatgatataatttttaaaaattcctttgtttgttaatgtgtcacttttatttattaatcacatgccttatctacttttggaaaacaaatgaagatagctgtactttggagttcatgtaaagttaacccgattttttgtttcatttttgttttagccaccagaaaggcagattgtggttggaatatgttccatggcaaagaaatccaaatccaaaccaatgaaggaaattcttgaacggatctccttatttaaatatatcacagtagtagtatttgaagaggaggttattttgaatgaaccagtggaaaactggcctttatgtgattgtcttatttctttccattctaaaggtattaaggggagtgggggagaaactcctttatcctctctgtttataaaactaatacatattaattgtagactatgagataaaacagaaaaataaacattaactcactttcatggacaggtaatattaacattgtgatatatttctttccagtgtttgtcttctatgtgtattatcatttaatttagtgtcatagtgtatgtgtaattttatatttaacctttttcactattatatcaagaagtttttttcccctaccatgtcattcttagataatgtggtttttaatggtggcatagtatatcattgtgtggatataccataacatatttaaatttatccaatatcctaacatttggaaagtttccagttttcactattaaaaataaggttgtgtgatctttttcactgcatatttttgtttgcatctctaagtttcttaggacaagttcttgaattattgaatactttaagcccctttctatgctttatagaacaagatctatcatttttcatat

SEQ ID NO: 116671 - DNA, 1034 bp, Homo sapiens
agtgtgaaatggtaagtctgtaaaattttgaagaactatagcttttaatgccatacgtatcataaatgttggcacatgttatttacataaacatggataattaaaatcaagtaagtacattatccaagttttcttttatggtcttttagtgaaaaagtcctcgataataatgtggtgtcctgataatataataagaatatgtgatatttcttgcaatcgtgtttgttttatagaatgtaatctgattgaaggggaagatcatgtagaagtaaatggggaagtttttcaaaagccatttgtagaaaagccagtcagtgcagaagatcacaatgtttacatttattacccaacttctgctggtggtggaagtcaaagactctttagaaaggtaacacctttgtaacttttgtatgaatactcttctttgtacattgtcgtgtattattaaaagcaatcaagcatttaattaccgttaaatattgaactcttgaaaatgtatcatttagaggtaaatttatgaaactgatatactttgttagaaaagcatggcatcattttagttatttaatgttgttaagcagaatttctgcctgcagaatgccaggaaagatacttgacttttcttttccctcccattttgtacatctgtcaaactagaaattcacttaagcagtagcagtcttttagaataatggcccagaaaaataacagctcatagaaaaagtaacactaataactttacgtacatgaaagtatacttaattgtactcaaatgcaaattaaattgagatataatgacattgtattactttttggattgacaaagataaaaaatattgagctagttgagaaataagcacaagaccaaacattgttggcagaaatacaaagcaatgtagcctcttaacaatataatttagcaatgtatcagaatgtaaaatgcatatacatatagaaattgatggcaattcaaattaagaacacagtgagataccattttaacatccattaaagtagcagatattaagaagcct

SEQ ID NO: 116672 - DNA, 2089 bp, Homo sapiens
agattatacctctgaattctagcatgcttctaagatgattttatcttccagtaatttgagttgtaaatacttgttctccttacatgggcaaaacttagcaaatatataaatatagcaaccatcatgtaaagttttattttgatttaatgaagtctcagtctgtagtgacctaatgctatggatcagatatataagaaagctcagaaattgtagtccatctacttttatcccagagttaatgtagccatttctagagaagaaaaggttgtattctactatatagcttaatatcacctccctcccccagcttcttaagttctttttgaattttatttcataaagttaaaactagattgttataagtattattcttcatgggaaagatcttgaagtggtaaaagatggctttaaatagatgactaaatgttcatattaatctgaattatacaacacaaatcttttttagagaattaagaacatatatattttttcattttaggatggaacttagatgtgtcatagctgttatacgtcatggggatcgaacaccaaaacaaaaaatgaaaatggaagtgagacatcagaagtatgttttcagatgaataatttaacatgcatgatacaattttaagatttctgataagtgatcaactcttttgattaatacatcatatagaaaaacttttatctactgtctcttggccatttatatttaaaccagtgggtgggtacaaaatccatttaaaatatgttcattagcatctaaaattattgtggcaatattcataaatatcatcagtctgccctggctttcatttattgtcataaaggtgttctatttaatctttgcttatcactctcttgtattgcattctgagagtgagtaatccctcagccttttagaagaaaattagtagaatgaaagtttctgttatttctatccagtgtttggtttggagatgataaaatttgaaaaccctgagccattaagtatgtgttgacacaagtaattttcaatgtatatgcaatgacttcagaaaatatataatattatgaactataattgtatgtttggtttccgtgaaaaaactttgaaaagtagtatggtgattattagtttggtatcatttaggaaagtactaagttttatcaatcaaagttgagcagcaacatgtacagtgaaagaggaaacacagtacttgaaatccttagatcccaagttctagtcccatagcttatcatttattatttgttagtttaaacatatattggtaatgttaattattgcaagtgactaacagtgttctgtcttttttataagattttttgatctttttgaaaagtgtgatggatataaatcagggaaattaaaactcaaaaaaccaaaacagttacaggcaagtgtatttgctttcttgtttaattttaaattttttagtggtgaaattacataaaaattcaattttttattaatttattttataggaagtgctagatattgcacgacagcttcttatggagctagggcaaaataatgattctgaaattgaagaaaacaagccaaaacttgaacaacttaagactgtattagagatgtgagtatctttttgaaacgcttaattgtggtactacatatagctcttcttttttatgtatgtgattttccattttaattactttcacagtctgatctttttactctttgttactatagttgagacatgaaggaaaatctaatgtgaaaaaaatagattgctgtattgaaggttttagctttagttttaattttggtgagaagattaaacaaggacatcaaatttgtgtcttctgtgaaatactgcttagaatgaaggccacattgctaacttgaccatagattcattgcagtttaaatataaaaaatttgaattttgccttaatcaagtaaaatggatacccaccaatattcctgttacagctttacatttttaatctcttacaatcttatttcctttatttcttaaaacacatacatctgtgtttttacatatttctgtactttatctcttcagagttgtcttttttttttttttttttttttttttttttt

SEQ ID NO: 116673 - DNA, 1004 bp, Homo sapiens
gttagaatgattatatatggtacaatttttttttgatagaatatttcgaagaattaaacaggcggttacaaataaaagggagcatgaatatgtgagaattagtttttccctacatgttctattctgtttatcattttatttttcaggtatggtcatttttctggaataaatcgtaaggttcagttgacctatctccctcatggttgtcctaaaacatctagtgaagaggagggtatgttattcttaatgcttatacagtagttttatatgtagtaacttgttattcactgttgattacctttggaccatcttttgcttagtagtttagggaatggcatggtgaggaaaaataaagtggaattatcttagctgtgcttccttttctttaaataaaggatacaattttaaaattacctattctttaaacaaaggatagattttattgttctgaaaactgcataggaattccttttaactgcgggattgtttcggaaaacttatttgtttataactaagtgttatttaatgggctccttacatcaccttttgatagtagagggcagagtatataagaagaaaggccaagaagtacaaaaagactttgaaaaaatatacaattaacctgtttctaaaataaatgggtattttcttccacccagtaaaccagagtaagtctttaaacaagtttggtctcctaagagcagtcagtatccacattcataaatgcatttaccttacaaaagaaaagggtagggattggggaagtcatttcatagagaaatgcagatgaccaataaaataataatgatagtaataataatctgtcttgcctatcatattggcaaagtgttttcttcgtttctgttttaaactggtaataaagtgtgctgatgagaattcattgagacaggatttcagtctatagtagaagtataaattggcacagtgttttgaaaagtaacttggcaatatatcaaaaacttcagaaaatgtacttatgcttt

SEQ ID NO: 116674 - DNA, 1009 bp, Homo sapiens
taaggaacatacatgcaacagcatttaaggaagaaaatatcttacatatgggccatatttcactgcagaagagagcacagagaaaaaaatgaatcttaagtctgtttaaagaaataaacttaacatttgttttattcattcatatgtgtcatagacagccgaagagaagaaccatctttacttttggttctaaaatggggaggtgaattaactcctgcaggcagggtccaggctgaagaacttggaagagccttcaggtgtatgtatcctggaggtcaaggtaaatcttagagttttctttaatttgactaatttcataaattgtattttgaaatcctcatttgtgatgttattaaacatttatagaaatacaatgaaatgaaaatatagctgaagtgatttgaggatttattttcaggagattatgcaggatttcctggttgtggtttacttagattacatagcacctacagacatgacctcaaaatatatgcctctgatgaaggacgagtccagatgactgcagctgcttttgcaaaggtataaataatttttttttagaattattagagtttttaatctaatattgtatcttaaaacatttttggctgggcgcagtggcttacacctgtaatcctagcactttgggaggctgaggtggtcagatcactagagcccaggagtttgagacaagcctgggcaacatgacgaaacctgtctctgcaaaaaaattaaaaaaataaaaattagccaggtgtagtggttcacacctgtagtcccagcagctcaggaggctgagatgggaggatcacctgagcccaggaggtcaaggctgcaatgagccaaaatcacaccgctgcactctaccgcaggcaacagtgtcagacccttgtctcaaaaaaaaaccaaaatttttttaaccaaggaatatttaaaaattctgtatttggaactttcaagtaaaactctaaaatgacaataatgaactgtagtattaataaagtttatt

SEQ ID NO: 116675 - DNA, 1022 bp, Homo sapiens
ctgatgaacctacattgacacatcacccagagtccatagtgcattagggttcactcttggtgttgtacatatgggtttgggcaaatttataatgacatgtatcatcatagtagcatacagagtatttcactgccataagaaggtagtaaagtttttttttaatttaagaattgatactcttagagaataataatatgtgaacaaactaaagaatggaaaacagtatggaataaatcaattaagcatttattgaacacctgttttgcatctgccatctctatatggaaatatgtggagagtaacacataaagaattacggtcttatataaaattttttgcaagtctttttactttatgcaaaagtattttgaaaataatgtttagaggtcaagatatatgtagttgttcttttgggggacatgggtcttttcattataggagaataaaaataaaggtgtaacaagaattcaattaactaaaatgcaattaagcagagaattggattgataataaaggggtaagtggcaaaacatattgagatcaggactatgttagaagaacaaagttccagatgtcacttttggaccttttttcaactcagtacaagattatttggatattgtaaagaggaggttggagtagatcaggtattccaaccgtggactacataaagtttgaaagcaggaaaatattaaatacatgaaaaagataaagattatgaaaaaaaagttcaaaaagcctaacttataaatacacatgtataagaatggttaaaataactgtccctttcctaatattcatagacagtacaggaaaacctatagattttgaaaaactgagaattcatacaattgtacaacttacctataggtatttgtatacgtgttaacaattagcttgtttcttcaacatgaaagagaactatatatttgatcagatatataatatagacaattttaggtatattgtatgaatctgtgattttaaaaattatttttagaagagtatgaaaatatctcaga

SEQ ID NO: 116676 - DNA, 1021 bp, Homo sapiens
aggtatctagtagcaggaaatagcctttaagttgaaatatcctagaatgaacttggagagagaaggtatatgtgtttctttcctcttcccttttctccctctttcccactctacccccacttttctgccttcttcctttctcctcttctactgctttgaactataattttcattgcaattactcttaaaattgccatgttttctggacacttcacattgtgctaattccttacaaatccaattaactcataatgattatgtcattaaatttgataatttcatggaatctttgctcacttccagttaaaactttaaaaatattggccaaagccttttgaagaatgtgttagtcttttaaatctttgacatttggaaaaacagaaatctcaaggtttaatttttttcatatatttattacatattgtgctttagtgtttgtggccttaatccacctttcttttagggttgtttttacatttaaaaccactgatttagtgaatactagtcataaaaattacattcacccattcattctccgccttcagaaattactggcttttgttcagttccaccacaaaatccttccaattatacttaatagtttgaaaatcatacatttgcagttgcaaaaaatgcaaactcggagttatccaacgttcaaaaaaggcttgataaaatatttgtctctcactagactaatttaggagtgtatttttttagagtactttgtcattatatcctttttctaatgtcatgtattttttgctcaggaatatggtataactaaagctgaaaaactggagattgccaaaggctactgtactcctctggttagaaaaattcgctcagaccttcagaggacacaagatgatgacactgtaaataaacttcatcctgtgtaagaaactgtactggttatttaaatctctaggcatctatttttgcatacttcaaatttaaattatactttgatggtcctatgaagtcagaagtgtgtcattggcatactgtgaaaatagta

SEQ ID NO: 116677 - DNA, 1170 bp, Homo sapiens
tttagtgaaactcagtaatgctaatttatgttttcccttatcaattttgaaaaaaatacatcttttcacatactacctcctaaacttgcacacatgcatgtgcgcacacacacacacggaatgtataatgtctaaaacagaaataaaatacacgctgaattttaaaaagcatacagtcaatgtgtggtcttataatttgcttttaaaacaaggtgcattctgtactaaagtccataatattgtatactcttagtgtatacaaaaaggaaatgttgtccttttatatatttgtaatgtaattacatagtatacaacaaaggaaatttatctgtgatgtacgtataatttaagtagatcctgttaactgttgactatagactttactttgagtagttttgccttttcagatagaattttctactttgaatgcttgtagtacatgttctctaagatccttttcagttctgatgctctatgattacatgtttaaagaccatgattctcagaatgaagatggaggaatggtgaaggagatggtaagatcaatagaatttacatatgcctccttcttctgatttttgaatatcacttcagtgtaatagggatacttgttgataggcctatattgcatacatgaactatatgatggtgggaaaaaatggcattcctgttataggatagtattctgtggttatgaaatatgatactatactaggtactttggaacctgacaaagttaaaaacggtctcttaccctcagaattcattagtgtttgtcatatttcaagaaattatttatttttcattttgtataagcagttaaaaaaggttaccactagaacttctaatataggttgaatatctcttatctgaagtgcttgagaccagaagttttttggaatttggaattgtttttgtattttggaatacttgcattatacttactggtttagcatccctaatctgaaaacccaaaattctccaatgagtatttccttcgagtgtcatgttagtgctcaaaaagttttgaattttggagggttttggattttggattttcaagttagggatactcaaacttgtagagattttaaaaatattttatcaaaacaagcttaaataacatactaagacttttaaatgtagtggaattattttttaaaattttgc

SEQ ID NO: 116678 - DNA, 1504 bp, Homo sapiens
caacttggatccatgtttcatcagacagttaattgtagttagatttacagtacttgtacaataagtttgttgaaatggaaaacttagaagagtattatgtgtattcttcttttagataattgattatattataaagagcaagcgtttctttgatcttttaaacttttatttattgttaacacttattttacttattgagctaattaaagtgagtggaatgtttataagtagaggacaatatcatattggcaatatttttataaaaataaacacaggatgagaatattttaggatcactagctgaaggagatcctcttaatgttgttaatataccttaagttttaatattaagaattttttaaggctcatggaagcgtgtcccttttgttaagagaagtggctctagctctttcaggatcgtctttatttaaaacattttcttatttatcaacaaatttattttagacagtaaaacatggatttaccagaattgccagctcatcttgcttttctttcttttgtatatttcatttgacacttttcctctgtcatcaagctagttaacttcttttaaccaatatttaccttattacattctctcattgtcccttctgcatgtcacctttctaacctcctcatatatttgtttttcccctctttcttttaagtgttctttttgtagctgttacgaatttcaggtacctgtttttctctttcttagacgccacacgcggttctgctgttaaaaggttttctatctcatttgctcgacacccaaccaatggtacgttttgcttttattttaaaagatactcccctgcttcatcccttttttatttttattttatttcaaaatgtggggtatacagtatcattcatttcttcatccttaatgtcaattggcgtacaattccaacttgttattcacccaaattattgatactgtctagctcccttttcagctgtaattcacataataatttaacattactcatcaaacttttaatgaccacaatgatgatgagttttaatgctaaattaacacctgaaaatttcatctaatttctcagatgatcagtctacacaaatttttaaattataattagtattctttaatttttcttaattctcaataacttttttcttcctaattttctgatcacatggttgttttattgagatatttaaacaaaaatacagagccacccatgtcaaatagccaaataagatgtgtctttgaaaaattcctgggcacctggtgatgcatatttcactgtataacatcgtctgttcctggctatttttctaaagcaaaaccctgttcggtctggagcactctgaaaactttgtccagcattcactttgttcttgtgtagcaatgtggtttgctattatcaagcaactaattccttttagtaccactgctttttcttaaaatttagaggactcctgataggaagaagattaagttaagatctagaaacccagctctgttaaattccat

SEQ ID NO: 116679 - DNA, 2989 bp, Homo sapiens
aacacatctaaataacagtgcactaataattcttgaaggtggaataagaagatctcatcctcaacaagtaaaaatttagccttaaagcttaatgtgctttcccttcattgtagctatttaaatgctactttttgaagaaagtgattcttatttgatacagctgcagcttctaaagaaaccgcatgcctaagaacctcttagaagaaacacagaagtcacaagaaaaacagaagccacaaaaattctaagaagagacattgcaggtttaagaccatagtttttgtactgaatgctgtgtgtttaaaaccagtatttgaggtattattatctaggagaatctgtgtttaactgaaggtttttaaaaatgaaaaatatttatgttaaatttaatagaaaatagagtaattttatattcctttggtttaggctcttttttaaaaatgtgggttttccgcacatacaaatgcacataaggtgcattcttttctattctacaaatatttcttttgagttttaaggtttccttttttccttttttaatattgtgttgtcttatctgtcctatgaattgtcatttgactcttccttttactttttatttcccctaactttcatgttatttccatctttaacacatatcatggacttacccctcccttcatctttagttcaaggaacatggtgaaacaagtatcttctgacagtgctttaccttattttctgggcctctgtgcagaacacctacacctctataggtgctggtccgtttcctctgtggaatttctaggctccagtggtatgtttttatagcttctaaacatgtcagcagggtggctttttaaattgctgcgctaaccctttcattgtgcattaaaggaaaagtttattaaagataagtggaaaaaaatgtagtctagaggaacttaattatattgtcatttgcctgttataaaatctagcaggcaaatgaaataaaataattgctataaaagatttataaactttgtgaggaaagaagaaaagatctcatcgttaagtttagtgtaatgcaaagaaagggtttgcgctcatttgcatgaatcttgtacttctaaaaaatgtaacagttgtgcaagcctaatttctttagtgcttaatttaggtgctttagttgctgttatagtatagttttgtttttgtttttgtttttaaagtatgtgtaatgttctgtcatgctttggtttgcacctgaaaatcagacatatcacttttgcaagtcctttggttattttcctaggaagattagattctcttttaaccaaagtttccttattctaactgagaattaggcagttcttgggtcaatatttccttcaatatttaaatgaatcaaacatcagtcaatttaaaaatgagcacacgcctattgaagcagaatgttgcagtctgaggttaattttgtacttttaatgatatttgactttatataaaactttgagtattataagtatttaactgcgggaaattaatttgaatttttggaagagtagatgcagaaagactcgttatttttaacagtatatgaaagcaattttaaaagccattcagttgaatgaagtttaaataaacaggcaattttcttttttaaaaaagtgaataacctatatcctatttgtttaaaaacataaactgtgtatttaagtgcttttgtttcactgatggtattaatacatatttgcatgattgtttcataaaattttcgtatttctgtgccattgttaaataggaacatatttgtatttgtattgctttttacttggcctaactttacacagccagtgattcctagtaatataattatgtgttaattcagtaaaggtaggtgaaatacgttttggaatttttattccagcatgaatgaatgaatgttgtttggggttcatactagagagtatcattggtcttggcacacctggaaaagtatctaaaataattattcacaagtaattatataatttttcaacaagaacttactgttagcgtcctggcatcagggatacatcatgtggcatcagtttattcacctattgaatagacctgacttcaaaaaataaaaactgaaaacttgtatttctttgtttttttttccctaggttttttaaagtattattcttagattttaccaatatagaatgaaattgtgtgcatgcgatactacgtgattacatttaaaaagaaatctttgtcacatcttgttccagctccatattgcatagcatctggtgtcatgacttcagagatattgtgtgtttgcatgtgatagactgaaaagacctaaactgtccagttctaagcagtagtcttcctttctaattactgatttttaaaatatccatcttttattttttgtttttggtttttttctcttctaggctttgaattgtattccatggtgccatctatttgtcctctagaaactcttcataatgccctatctttaaagcaagtggatgaatttcttgcttccattgcttctccatcatctgacgttccacggaagaccgctgaaatttgtaggaaatttttctttcattgttattatttagttgctgggcaactacatactatctgagtataacaggaattataacaacataaaagcaggtagtggtaatgagtaggagtacaaaggggagtgtaaagggacattattaggaattctttggtgtaatgtgaactgtacctcttttttttactctgccaaaatcttttcttcttaccaaaaaaaaacaaaaaacaaaaaaccaatagcagtagaagtcaacaaaatatagggttgtggtcttttgttaaaactatgtttgctagaaatctcatattcctattgtatatcattttatagcaaagttttttaaaactgcaaaatatcagtccacattaacccattcatacacactcatctcctgactacctttggtaagtagttagaaagagcttttaactaaagaca

SEQ ID NO: 116680 - DNA, 1064 bp, Homo sapiens
taacacattaaatatcatgtggctctattctgagggacatcatttggggaaatgctcagggcttcctttttaggtgtgagaagtcagctgccagttgtcgttttcagctctataggattcctcagtactttggaaattccagtttagaaagagttagttttgggagagagtgctttgcttagagctaagaatcttactattctagtcatatcttagaaagtgacaaactttctttgtgtatcattcctctttttctgagtgctgtaaataaattttgctcaataataaaatgagatattagagctctcggaatgaatgccacttttatgtctgactgtcattctcttctctttcctgggccatcacatcgtataattctagagagctctattctctttatattttgtctaaatgataccccctgcatttatacaaagtagtgacctttcccttttcttccatttttggtagtagaggccagctttcaatcattaacagtaatagagatgtatactggtgagtgttctaaaatacttcactttagggatggttttaggaagtaggtcttaacttaaaaatttgcatataaatgtgtccgattatgagaattgataatacttcaaatgaaataacttctccaagtggtaaacgtcagagacaggaaaatgaaggtggtaatctccttttatattctctataacctgctagaatggacaatgctgttacctcagaatgcagtagagaacctgaataaattctagtttaccccttcacccttaatgatgtttcattgcttccctggggcaaggatttgaaatcttaaaatagagattaaagaattattctaattagtaaataagagtttaggggtagatctcaacactatttagattgtagaagacttgcaatgaatgatttgaaggtaatagaaatagtagtgacatgtttgttatgaaaggataattttagtagaatatttacaaaaagataatattttaaggtttgttctgtggtactcttgatggattcattttgtagttagtgaattcagttcatcagagtgt

SEQ ID NO: 116681 - DNA, 2044 bp, Homo sapiens
aatataactagcaaaacagaaacgcatgaacacaaaaaaaacactgggaaaaagaaatgaaatcttagcagaagctggaactttttatacttataaaaatagtatgttcttatgtttctccttatgcatttatgtgttcacttaaaaatgtttttaaatctaaggttttctttgtttatgttcaggtaaggaactgttgtcatgatctggaaatgtttaaaacaatgtttgttagcattctgtgagcagcaaaacttatagtgataaaaatcgattgttgttaatatgatgtttaccatgtgcacatagtaatgaaaaggaacataaaagcccagcaggctcgtaccaaagtcacagcagtaatgctatgtactgcagagtctgatgagctggcctttgtgcacacttttattttcatgggattgcatcttagctgttaaaacttctagattgaaatttgacagccagggttacatattggggacttttaaagtgtctttccaaagagatttcattaaccgtttagattagaatatctttcccaattgttacagtgacatatatgctgcaatatttaacaactggagtattagccacatgggttattttttcaatctgtgttttgaatttttttattgtgtgttatttaaaatattacatatgcagctgggagaactacacctttgtgcacatagatttatatattaatttgtagaaaatattttctttatatatttccttaccatacaaggtgccttgttcatcaggaaaacttttgttttgtattttgacaagaaaggcaccttcagagtttctttttaagtatagttgacaagtgtataaatgttacacttactttcagagttctttttagatctaaagaagtcagttcaaaaatggaaatcaacaatgttaggagaaatctgaattctgttaagttagtaagtattatgtatagcatctgtttttaaccatttccattcttatccctagtgtatcagttgatcacactaagaaagcttaaagattgagcatttgaaataaatgctctttataaatgattagatttttgaagggatattgaaatcattgcgctgtgatttcatctgtgatgtgaaaaatcaatttattatccttggtgctttcccccccaccaatgcacaaataattgtgaacagcttgaaatgacttaaactgtaatccaaatgggacaatctgataagaatttcatgcattggtagttaaataacttaaattgctaaagctttagcttgaaatttatgtttagaaaaactattgatttcccatggtatgaatataactattgtaattcttcaaatgagactcttctcaccttaaatagtcatatattaattaacttataggaaataagcatactatatgttagctgttttaaaaggtaccagatgtaagagtcataaatatatgcaattaaagaagttcatagatttcacatgaatgtaaatgtgttatatggagacatgtcttgtaaacagttgaatgtatgtaagttttctgtttgtgaaaatgtagttaatgtactcactgtggaggtcataaggaagctactttttttttaaagtggaacctaattaaaatatttccagaatcaaagagacttaaatggtaaatttttaaaattttcttatctcttactttttagttttcaaagtagaaaaaatcaggaatttttttattaactagtacttacatattaaataaaatttattattggctatatacatagcaatatattactttccaaactagaaagtacagtacaactaactttttccattgttatgcaagaactattactttcctgtagtcaccaaactcagtagtattgctctgtagactagacactctatttgtaaaaatcttagaatcactttccaaaacaaataaaaagtctactgtatcagagcaaaatgttatagttatcactgtttagtggcagtttgactgaagcatctgtttctcacttgattctgtcctgagaagatgtgggattttttggttt

SEQ ID NO: 116682 - DNA, 1077 bp, Homo sapiens
aaaactagagcaatgggtagaaactacaggaatgtatgtgtatctatgtctatccatctatctctgtatatacctatatttatacagttgtcccttggcatccttgggggattggttccaggacttcccccaggtaccaaaatctgatgatacgtaagtctctgatacaaaaatggtatagtatttgcctataacctatgcacatcctcttgtatactttaaataatctgtagattacttataatacctattacaatgtaaatgttacataaatagtggctgtactgtattatttagggaataatgacaagaaaacagtctatacatattcagtgtagatgtaattttttgctttttcaaatattttctctctgtgattggttgaatccatggatgcagaacccgtggagacagggttgactgtatatatgcatgtacatacagatatatgtgtaaataaatcgacattctagcagagctgcacaaggtgaaatgagtcatcttgggaggcagtgagttgcctgtcactgaaggtgttcaaacatacactgggaaactattaagattccttttgattccaaaattatacggtacaaaaaaatttaaaatttggaggaccatctgaaacgtggaaatatgtgacaaagagttcatttatttttaatgtcaggtttattataacttagtaaaatccgtccttttaaagtgtacggtttgatgcattttgacaaatgtatccagttatgtaatgaccactacagtcaacaaatagaacattttcatcaccccccaaaattccctttttcccctttgtagttatcccctctccccaccctaggccttggcaattaatgattgattctggcaaatagttttgccttttccagaatgccacgtaagtagaaacatgtagtatataggtgtaatgtctgcttctttcacttaatgtttccccagattgttccacttcattgctgagtggtatccattgtagggatggactgcagtttgtttatctctttccctgttgatggatatttggattgtttccagtttcggtgtttgtgaatgaagctg

SEQ ID NO: 116683 - DNA, 1002 bp, Homo sapiens
aagcatgagccaccgcacccggcctgggatatatttttaaatgtgtaagttggacattttcagttatcagaatgcagccatatattgtgtgtgaaaatgagtatattgtgtctttcaggtaaataactgaaatacgtgacaaagggggtagacattggcccatgcttagcaggttttagaaaagcaaaacaattccaaatatttatttatttttaaaaaggatgcacgttgtaggaagcaacgaacaaatgaagacaaagtcacggactgaaagcttgataaaagtttgtggagaaataaaataacaaaaattgagaaaaagaacctttaaacgtttttgctgagcccagtgtgcaatttcattgtacttagcactggtaaggttggtgaaccttgggaaggtgattagggttttttctcatttatatagtataagccccagatagttgtgtagtgataaactgaattttaacctcaattccatactatctactttcaaggccttcatagtgtgaagttattcctaaactgtttcactagtgagtcttcacattttagagagaaaaaatatcaaaactaatttatcttcttggtggccatagtgctttgcatcatgatttgctttgctgactctgaggactgttgtgtgtgagtgacagaccgtgtcatgcagtctccacctcaaatgctactcaggctgcataggggtcaagcaaggacaacaggaatctgcaagagtatattatttttaaggaggcttcagatggaatttcacttatttatttagagttcatttgaagatatatccagttttgaaatggtagcccatttgtcagacattgatatagaaaagcaaaacaatagtgatcaagagctgtctttagtgatttgtgagacgtattctatttttctatcatgcgttgtgactttctacaatttattctggtagagttcagaaaaatcacacattgttgggtattaaaaatacccaacaatggttaa

SEQ ID NO: 116684 - DNA, 1747 bp, Homo sapiens
atcagtaagattctagagaaagcaaaacatagtagttcacaattttgcaacatagaaagtcacattttgaaaggctattttgaaattgatttaatagctattatagtttatgaatatcaaaatttgtataatttgcatctttactaatgtatgctagagctacaagagaccttaaggataatatatgaaattagctttccttattttatagataaggaaaaagaaattgtgaaaggtgaatttacctaattagtgaaagttacataactaattacaacagtctgtactatataatgcagaggacgattctccctgtaaaaggaactagaagctattactaaaaatatatatagacaaaattaaaagaaggaatgataagaataaatttaatttaccaaatattgttaattaaaattttagatacttaacatttatttaacttaaataaaagataactgtcagataaaactttattttactaatgagcagtgattttcttaggaattgatgaaggcttattggtatcaagaatttaaaccaaattaaaactgacagaggacatttagatacataataaaattcgagctacataagtatatggaaaataatgtaccttgattattatgaaatagagcatcttgaaattcagttttactctaaatgtacttttaatacttgcagattctaagattacattgtaaaattccaggttttcataatgttaaaataggaaagtagaatataaagtatcaacaagtgtagttatacattttgttttggatatttaatccttacttgggaaaaaatcagcatctaggtaaattattattttaataacaactcttaaattgccaacctctgagaggtgaaaagctatgtaaatagaaggaatggccagttcaaaagaatagtagatgtgatagtgccgtgaatgtattctactggaaatgaatgtaataatacattaaatttttaaaatctattttgttttgtgtgtgtgtttaacatgttttgacaagtgtcctgaaaaatgagaaaagctggatttcagtcgttaacctgtttcgaattgataatgtacaagaaatgcaaaagcctttttaaaagtgtctgtgtttgggagacttaaaactttgatttgaatcttaaagtatagtttggggtcaaatacaaacagacttacatatatacatacatatataaagtcaataatttttgttcttcaggtttaaagcgatatatctaatttttattacttgtctaatactgctaattgttggattttgatattttcacatgttgatggaacatgaagagttagaagcccacatattttatttagttggaaaaatgagaaattcttttaaagacccagttagggatttggctgaagacagaaaataataggataacaaagggagagaccaagatggaaggaggaagaataagtttgttaataagccaaattaatcccacataacaacaatagatagctggtcctggaactgtgttgctaatgtggatacaacaaaatattaggtgaagatgttctataaaacaaatccattaattatttagagtaaaattttcacagtgaaaattttattagggctgagacccagttattaggttctggggggggggagggagggggagaaagagagagagagagagatgggtggtgggtattgagtgaaatttgtgtatttgttgaggttaaaaggggctgttatctctattagaaaaa

SEQ ID NO: 116685 - DNA, 1888 bp, Homo sapiens
atttatccattctgctgattggacatttagtttattttaaagttcttattacaaacagcactgcaattaatatttttatacttctccttgtgcacatttgcaagagttatctaggttatatacatagagtagtacgaccagctcatgtgttatgagcatcttaaccttttctgtatgttgccaagttgtctctgaagtgtttctgccaatttacacttcctccagcagaacatgaaatgttccattattccacatcttcaccaagttaggattttcagacttttaaatttgtcattctgaggagtgaatgaaatcgtatctcgttttcattttcattttcttgcctatggaacatcttttttcaaatgtgtattaggcattcagttttcttttctctgaattttagatgtttatcttttacctagttttgttttcattgtttatccttttttattcattttaagaattcttaaatatgtagcatatgctaatcttttgttagttatggttttgcaaataccttacactagtctataattatatttttactatatgtgttcttttgattattataagttaattttcatgtaggaaatttatcaatctatttgaaatagaaagctatatttaaaatatattttgctaaatacagcaatatttagcaaaatgtttctaaacttccagattttacttagaaatgattttacttagaaacaatttcccctattctaattcttaattccaacaaattagaaatataaagtacatttataggcatcacttaccatagcagagtcagcagtcatctagaggaaaataattgcttagaaaaagtattaaatttcatcttatgtagtttgtaatcttgtaatgacctgaaaagagttacctgcaataattgtttgacaacataataaaaaaaagtttcagaattttagtgtgaaagagctatttgtaaaaatcatgtaatttataactatttcgtggacaatatatacatgagataagatataaagtgtttgcatagtgtttaaccagtattaggtattggatatttttagatggtatcattatttttaaaatgtaactgacaaatttgtaccttaaaaaaacgaaaagtttattgttggcattttgatattctatatgtggtcatgtactttaaaaaaattgttttcttcaattacagtctagttttaggcttctgctttctgattatttgcattgggtttctgtccaaagtgatttccagatgtttgaaccattcaggacacaaagtgtcccgggcatgttcatcagcaacttgttcttttgctccatttcattaggagagacaatagaagatgctgttaggagagaagtagaagaggaaagtggagtcaaagttggccatgttcagtatgttgcttgtcaaccatggccaatgccttcctccttaatgattggttgcttagctctagcagtgtctacagaaattaaagttgacaagaatgaaatagaggatgcccgctggttcactagagaacaggtaaagttcaatttaatttccttcttctattgattgttccctgactgtattggtttggtcacagagcaaggatgcatattttcagcaagttgaatgatgcctttggccctctcattatgcatggattacatggtaattagtaattccatacaggaggagtatgtttcactaatgtgatctatattaacttattctatgagatttttctagtagagatgattctgtaccatttcgagtttcagattccattccttcacataaataataatacctatcagtgggtttagaaaaacattaattcatagatgagaaacaggaatattcttatacattttatattttagtttataacattaaaac

SEQ ID NO: 116686 - DNA, 1062 bp, Homo sapiens
gctgaagataaagcaggttttcaacaactgtttcagggactatttggtgagtttttcatcatcattttcagctgcaagagggtcctgaccaagaagaggtaatacttttgttccttgtgctctaaatattttgccaaattgccatcttcatatagatgagtaactctacatttatttggtacaagcaacagggcccacagaataatttatgatctaagtgcagcttgaaatagcagaattgctgttggtgcttagaaattaattgagaaatcactgtctgtaatgtaatgatttaccattgtttttgaaccatgttgtggaacctaagaatgttaattaagaattatggcatagtccaaatagaatctggcaaagtttcatgttgaagcaaaacaataagctattaaattattttgcatataatagacattttcatatttacagattaagttgtgattgatactatttaatgtctgaggacttgaatcacactaataccacatattattctgtaatttatgttgtctaagagatgagtatgtaccccttttatgaattttttaaaaattaaaaagaaaaatgtaccaagttagaagcacttgaatggattggaattgaagtaagctttaaagaggataattttataaatcagaaaaagagtggtgctttttaagggttggactgatttgaaaaagtatcaagtaaacaaaaattaatcacggtgaaaaagtgaagattcatgggctgtttaaaaaatgtggtctgtctcagaagcagtgtatccctgaagcaaagctcaaaaacttttcttctaggcagctacctgaaaatccctactagaagcagtgatggttatgataatggccattagtattttacagcatttttcagtctatgatgccttttctcaaaatgaagctcatttgattttcatggtatctctgtaaggtatcttgattttcctaatttctttaattatacttgcctctgcttctatcggtggtacttaccatggatgtatgtctgtgtcagctgggattccagttcagtactcaggaagta

SEQ ID NO: 116687 - DNA, 1058 bp, Homo sapiens
aaatgcctcaggatgacctcaccactggcagccctctttctcctactgagatgtttccaggactaatgccaatgtttagtccacttgtaggaatctaaaatattaggcttttgatttcaagaacacaaaataggctgaggtgggcggatcacaaggtcaggagatcaagaccatcctggctaacacaatgaagccttgtctctactaaaaatacaaaaaattagccgggcatcgtggcacatgcctgtagtcccagatacttgggtggctgaggcaggagaatcacttgaatctgggaggcggagattgccccgagccaaggttgcacctctgcactccagcctgggtgacagagtgggactctgtctcaaaaaacaaacaaacaaaaacaaagggatccattctggaatagtacataactgatttaatcctaatgtaatgtcaaaacaactttccccagcagttaagagaatgcctcatctatcacagatacaattgctttgtagatgccatgagctcttccaacaaattgttgggcagttctgttcgtgaattcacagaattctccatcccagacacatttctttggggtaattaaaattaaaatggtcttttcatgaaggcagtatgaaacaatatgcatcatctatatacgctgagctgaaaaaatattgtattcataaattaaattggacattttgaaaggttaacacaaaatgctactttgctcttggtaatcaataaggaaaaaaagacttcaggtaattaaaatctgtgaagtgaacatttctcatttggaacctattaagaatataagcagacagaggcaagagataaataaggaaaacaaatgaatcaaaattttttgttatgttttggcaagggaatgtaatgatatatagcctgaggtctgaagtgatataacctgttattgcagataatacaacatttacattacacggtatgtataaaacatatgtatattacttaatttaaatattaggccgtgattttaaaatatgactgttctatatgtcaggctccagtttaggttgttt

SEQ ID NO: 116688 - DNA, 1027 bp, Homo sapiens
agcagccatttgtattattttcaaataattagaaaaacagttttcaactcctcctttccattcattgctctcagagttgtggtcactgacttttcttttgaaaaccgcctccaccaacacccccgtttgcctacaccaccccccttttacttagtatgtttattttttgtgtgtctcttgccttcctcccacgttttatttcccctcagagctgtgaatgggcaggtctgtctctggtttggcatcactgagtttttcccatgcattggccccagggctgctaggatgtgagacaaatctccctacaatgggcttgctcccattgtctgtacagtttaatagatgctggcatgtcggaggttacccatgagtcaaaatccgctctccatgcttactcttgacaccccattgaagccactcattgtgtgtgcgtctgggtgtgaagtccagctccgtgtggtcctgtgcttgtactgccctgctttgcagttcctttgcacttactcatcgagtgctgttttgaaatgctgacattatataaacgtaaaagaaaatgtaaaaaaaaaaaacccacacacaaacaaacccatacgatctgtatttgtatatacacgtgtccgtacaagtataactaaataaaaattaaagattttcatcattttaattggatccctccttctacttgtttgttccttgaatgatgcctttatttcaggggctacttgtactctgctgatttttcaaaatctttgtggacagaaaagataatacaacatgcacaagagaaggcctgggaagctcaaagaatgcagagttagaaatggccaagtatctgggcgcattccagttattctgatgagagaatagtgagatttcagcctagtctctgtatttgagccttaaaataggcactatgacaagccctgcatcctaaaacgactgttaaatacaacaggagccaaatacaaattgtattcttttactttagacatagttttttcaccccatcaagaaaaagaccaaataa

SEQ ID NO: 116689 - DNA, 1007 bp, Homo sapiens
aacttgtgagaaaaagtggtatcccttgatacatttagaaatatgggggctatcttgtttcattgtgggggtggggcagaaggagaataaatgcaggatgaccctgttgaaggaatcttagcatggccaacaggggacgtttccagtcgattaccaggaaatgcaagccttggggtttctactggtggtggggctgtcatgaactttaaaatccaaagcctagacaaggaaaagtgttagaccaattgaaaagcaatccagccctttttttttttttttttttggctttgcacgacatgtcaacagaaaccatgcctttcaatataagaaataaatgtgatgatcatgtaaaatgtgaaaaattgaaagcattccagcaaaataagaattttttatatatttgttttttaagatgtatatgttaaaaaaagagaaggtcgcattatggacagacttcgtgaatgggaatttgcttagaattgtgagtagttctgaattagaaaagtatgtgaaggaaaggcagctgtaaacgtattgtgccctggagagttgtacacatgttgaaatgtaatctgggcttacctgatccatttggagtggatgtcactgccgagtctgttctcacatggaaccatgtgtgtggggttgccagcctcacagatacaatcaatcctattcccctctgacataaggaactcctctggagtggcagagtcttatcacagaaggcagccaccatttcaccaaaacaaaagttcacggcattcaattcctttttcctttagctatttatatatgcagtactctcagtcatatgcagaaatacttttttttttttaattaatagttacaggcttgttggtccagtgggatttgggtagggggagaaagataccttctaaaatggatcaatagaaccaaaataatacagcatgttctataaccacaaggaaatcaaatgatcctgtcatgattccagttagtcataactatgttagcagtgctaa

SEQ ID NO: 116690 - DNA, 1043 bp, Homo sapiens
acatttttcaattccttgtgtcaccctactcaggacgcaagttcctgggagaaggaatttgattggcttatatgcctgtgctttggaaagaatagagaatactttgaccgacagctccaagactgcatgagataaggaaagaggagttcttcagagtattttttttgttggtttgttttttagcctaaggaagttaggtagtgatgcaaaataggcagaaacaaccactggccaaaaccagggtgtatttcactgatgaacagtactgtagaatatgtggaatagttcaaaacaaagagaagatttatgcagttaatcctttaagtgcaacaggggcagaggtcaatttaccacttatatttctagtgtgttgtacagtattattttatctttatctagtactcttatatttttctagtgcttttgcaggtttagctgtggtcaacaaattaaagaatgtggtttatatttttcagttaagatttatctcaaatttaattacttttctttcttttaatggatataatatgaaaaatcaacgactccacgacaaagaatggaaaacatcctgtttcttaatttccagctttatttcattggcatcaacagaatataagacatgcaatagactgggttaagtctcatttctgccactgcccaactctaatcagatctagggccagtcatataagtgagtctgttttctcaaatgtaagagagggagttaggctagattgaggatccaaagacagttacaaggaacaagaaaattattaagatgttataatttctgtttaaatttaagttaattttgttaaagttattttttttcctgaaaaactttctgatgccttaaatatgatactgtgtattgttaattcttcaaagcgagtggtgcaatatacagtgctcaccaaatttattagacctgggaaccctttttttatggagcattttgagggaactgacttccatggattaggttagattatttacaaaatcccattcacatttaaagtatactaagtatatagttctcctgg

SEQ ID NO: 116691 - DNA, 1034 bp, Homo sapiens
aacaaataacatgtgctctgaatcatttttaagaagaatgtatattgtttttaacttgcccaatttttagtacctccaatatcaggcttctaatgtaaatttgctttgtctgattttttttttcacagacatttttaaaagttcattttctcctccagtaaattgttacaaattctgactaaaatctgaattgattaagttttactgcatgttttgctttaacagtttctgttggtcctcaaccttgatttcagacatacttgcttcattttaggtggaatttttaatgggcaaatctaagtaagcaaggagagtaaattggaggctaaaaatgtgaacaggcaaattttttacttttagtatattgcttagaggtcttactatatacagtgggggcagttcagttcagtcagttttgaagcagtatgatgaatactgcaatgatttaaatgaagtttagtttagccttttgctaaaggtttactcatgctttaactaataactcctccggtaacacttgttctgatggttgtaattagagtgatttagcatatattgcatgtactaagtggcaggcactgtacctagcactgtatctgttttaaattgttgaatcctcatctgtgaggccggtactatcattatctatcatatagatgaggaaactgaggctcagagaggttaagtgacttgcctgagatcatgtagttagtactggggtcaggatttgaacccatgtagtttgaccccaagcctagagtctttattcaattatttcataataaatattttaaaagacgttaaaagtagacagatttcaagcatcattggcaagtcgttatctaagttctaccttcaccttggaacttaggtagaccctgttctcaagacagctaatgggaaatgtatagggaaatttcatgtcaacttattcctgaaatttacatactaggaagtaaatgggtttatagaacaaagcagagtactattgaatggtttgtggggtcagacatgatgacataatgaaatgtgtc

SEQ ID NO: 116692 - DNA, 1048 bp, Homo sapiens
ttttgcattttttgaaaagttaaggcaacttgaatatcccagattgatattttagttcagtaaaaaatttcataaatgcataaagattaagttttaagaccatttcctatattcttaaggagcattatgctaggattactatgcataaggaattcttcattcctcttgatgtctgatttttcagtgccttactttagtcatctacattaagaattgttttgctctggacagttcacaccaatcaccttttttacatagtttttcttattgaaatagaagagtgtcaaaatggcacaattatcaaagcaggaggtagtctttttcactgttcattgtcttttactcttgcaggggaaatgacttgtaagtacaatgtactttctgacaatgaaacactcgatatttgcttcagtgtgtgtgtgtgcattttacttttgttattgaaaaatgtttttgattactgaagtcttattttagcattatttactgtagcatcaacttctctaagattgaagaggtttataactgaaatgttctgtaggactgtggtcaaatactggtgcacctcctctagtttttcaagtatgtgtactagcacatggtgttttaagacacacttgtattaatacagaagagtggaagggcagtgttgggaaaccgacaaattttaacgttttctaaagggaagagaatacatatggcacaaaaatcagatagtaagtacccagatatagatgcaaagtacatcttagtcaccaaaaactatttagtttttctttgtaagttttgtgttattttgaaaatagaatggaacaattttctccccttgaaagccagcatattttttaagaattatatcgggtctctatttgaaaatagtccttctattcgctttgtatactcccacaggtctttagtgaagctgcaataatgcacctttttatttaaagaatgagtttagggaattgtgtctgtttcaagttgtccctagtcattttttaggaaagcatgaatgaatttcaagggctcttaaatgaaggttaaataa

SEQ ID NO: 116693 - DNA, 1048 bp, Homo sapiens
ggttaaaagtttacttgttaaaaaatacatttattggacagcttaatctgagctgagaaatgctgggggatgcaagatgaaaagatattccctgttcttagggagtgacctttcactggggagcagacatgtaaataggcaattaaagtataagtcgacaattgctgatgatgaagataaattcagggagtagtgagaacatggagaaagttgtgcctcacctgcttggaagaatcaggaaatgcaaccacacacagtgggtagagatccaagttataccactcagtatgcttagcatcgactttcaccccagcttgccagacaaacaagaacattcttttttctgactcatttcttcagtccaaatgtccctacccactcacaacttacacggtttaagtctacagggatttctagctcctctccttctccagaaaacagaattttataataagtcagatttcaccatcacaatgataactgtcacttatattggaattgaatttaaaaaggaaattgaacagtaccagttttattatttcagtacatatttcagtcattagtcatgagaaaacatgcaaaagccttgatactatctcacatttgatccataaaacaagaaaaggaatattgagtcccacagatgcaggaagcactggcatacagtgaattcacacttctcaggcagcatgttcttgacttttattgcttttttactttgtgaaagaatctcattcagcatatgagaaaaaggaaagaggaggacttcatttgtgggacagcaactcattagttgtctcactgtaaaatactataccaatgtaagagaaaattcttgctagttttgaaattttcttactggcttctcagattaaaaaaacaacagcaaaagcaaaaatcaaaaatgaatagagagcaccaagatgaggaacatacccactaactaactagttgattgcctgattattagaaattatagaattcattcagcttcataagcaagatgttattattcaaatatacccatagcgcttatgactggtttttc

SEQ ID NO: 116694 - DNA, 1790 bp, Homo sapiens
aatttttgtgtggcatatcccgttccctctctcacaactcccctccttccttctcatgtggaagtcgaggcatataaatatttcacggctttctgccgtcgttaatacaaattttttggcaaaaataacccatcgtttgcaaggagatgatttgcttcccctttgagatgtgcaagtctatctgccatgcaaaacaacaaaaacatttatgtcagcatctccttcatcagaaccaaaagggaaagttagagaaacaaaagaaatcacctccgtctgcttaacatattgtcaacaatttcagacctggacaaaatcttaaattttccctgcacttaaggcatctcattacccttcaaaagactttggaagaggaaaagtttacttctccagagacagtaatgcagatgttttcttttctatcatttttagtaggaaggagcaggtgtaaaacaattttgattaagtgtacgttatttatttatattcctctgtcaggaatgttggaacttagagagcttcttaaggactttggatgtgacaatactccatgaaacagtgcagaaaatacttggggaaaattattaaatggtgacctcactggtttttctcatcattatacttgtcatttcctgttgtgctgctttggctgttggaagggttcagagcaggtgtagttgggggggcggggagggatgatgtgataagctacatcttctcttgtagcttttcatcgatggtgacatttctattagttgtcatcacctaaagtgtccctagttctgccacttaccatcagggaagagtagaatccttatttttttttttttatggttttagccatatttttggcttccacccttccataccagtcactagacaatcattatgacctccttgtgcctctaggcgttggacactctgccagctttagccatttggttatagctgctcttcacttgttgaaattgatgtgatgaatggaaatccaggagcagaattagccgtagtctcagtgttccactaaatcgtatcatttggcttctgaaataattcagtcaccaaatatgtggtgactattttctgcatgttccatgtgtgaaactgaaagtgttatagaacctttaggacaccttatttttcatttatttatttaaaaactgaggtataggggaagtatttaaacccaggtctttaacctcacatgcactactctttcagaccttcacccccactccaacccaccccacattgcccttcatggtgatatgtaagagctgcaaaataatgaacaaatgttggggattatttttgtttttattttattttatttatttatttatttatttatttatttatttatttattgtgagacagagtttcacactgtcacccaggctggagtgcagtggcatgatctcgtctcactgcaacctccatctcccgggttcaagcaattctcctgcctcagcctctcaagtagctgggattacaggcgcacaccaccacatgcagctaattttttgtatttttagtagagatggggtttcatcatgttggccaggctggtctcgaactcctgatctcgtgatccgcccgcctcagccttccaaagtgctgggattacgggtgtgagccactgcgcccagccctggggattatttttaaccttccgatgttcctccctctgtgtaacttttctcttgtccatctccttttccttaagcccacaaatgacctactttaggctcttgtcatgtctatgcagtcataagaagctgaagtgaagcctt

SEQ ID NO: 116695 - DNA, 1008 bp, Homo sapiens
tgatgattctttttttggaaaatgtcacgcaattcagggagatagaataattgtttaactgaaagcatgggtgggatgtgttaaaagcaatagctgggcatggtaacgtgcacctgtagtctcagctacttgggaggtggaggcaggaggatcccatgagctagggagttggagtctaacctgggcaccataggaagatcaggtcactaaaatacataaataaataaacaaataaatgacatagtgtgaagcaagttcactatgcactggttaccaacttctctgagtctagtgagacagaacacccaagcacacaagttatacaaagcgggtttattatctatagataggcatcaaggaataacataatcctagaattaattgctagctagctggtcccccatggttcaagcaagctgccaaggaaagatggaatcttgtccctgcatgccccacttgtaccccagctgagggaccctggagatccacccaccctgggttttataccctgagtcatgagatcttctgggctaaagtgttgaaggacatcctgttctggggacattggaactaagtccagctgtttcagccaggtcccctcttatctcaggatgttgcattcctagcacactggtacagttattcttgagagctacaagcaagaaagagcataactgagtcagtgcaaggccactcagagaactttcctgtacatagtccttgctatggatatgttttctcattttgccacaaataaatgatatgaaaaactgataatgttcagttgcaggaatgaaacattagtgttagatcttggtggggggggtaggtggggtcaaatcaatcacaaaatgcttggaagctttagggtccagtgaaggcacctgaggttccaggtaccttttagaatgtgaacttaggttcacattggactaaaacttttttaggtatgattttaacattaacccacagaaaattttaatctgttaagtttggtttaaattttat

SEQ ID NO: 116696 - DNA, 1134 bp, Homo sapiens
aatactctgaaggcaaaatataccagttgtggccaagagagttagaaaaaagggtctacagctcattataaaccttgtacaggtagttactgaagttaacctgtttgcccatgaaaattccttaaaagtacatgttaatattctcctgccacttaggagtttacaaatctgaataagtacattgtaaatgtaagacttcggttttccagagtcttgtaatatacttgtttgtttttgtttttgttttttcttggtaaaggaatttaggcattggagccatggtatttaggcaactttttcttttctgcaaaagcaggctggtaggaacagtgactattggtagggcctagctaaagagaaacaaggtgtggaaaacactgcagttaccgcacacattcagcagtctgggtcctttaacttttttttttaatcagtaattcacttcagataacaactctagagataaaatatgccttaggggttggctgaagggagagagaacaaaggttttattggtctttatctcctatttagtagaaaatatttggttgtaaaagataaaaaaaaaacaaaaaacaaaaaacaactatggtgtttgctctagaaagtgaacaaataaaagtaattattctggagagacattatgtaacaaataggatatatctccttttctctaggtggtggcttcaaatctaaaataatgtatatatttttaagcatttttttagctttcctgttgaaaaaaaatcttacaagaatagatcttaaagatgtatttttttttttttttgagatggagtctctgtccccaggctggagtgcagtggcgtgatctctgctcactgcaacctccgcctcccggttcaagcgatcctcctacctcagcctcctgaatagttgggattacaggtgcccgccaccacactctgctaatttttgtatttttagtagagacgaggtttcaccatgttggccaagctggtctcaaactcctgacctcagatgatccgcccgcctcggcctccgaaggtgctgggattacaggcatgatccaccgtgctcggccaaggatgattttctttcagagtgaaattgagagccctaaggtatccttaattttgttaaggttctggt

SEQ ID NO: 116697 - DNA, 1044 bp, Homo sapiens
tgtgtgtttggctctggcaaaactttatctcattgctctattttaatggcaataatcactggaaatcagcacaaagtcttcagcttcttaacctgggtgacatgcttcagttttgtgccttctgtgactctctgtaatgatggcctacaagaactgtaaacctcctagaaggtaaaaaaaaacaggctagagtattgatttcaggttgtgtgaggaagaaacaaggtgggggtttttgtgttttttgttgttgttgttgttgttgttgttttgtttgttttgttttgcccctcagcttgcaaatcagttgcttatacccaggcgattgcagccatttacaccctactgaggagcctatgtggggttctttaaccactgagccaggattgattgacagccactgtcttcaactacaacagagatggagtgagcgcttatacagactcagtggggtgggacttccctgttgaatgctgctttatgtcttttcaggcaaatgccatttacatctgcccaccatttgaagtctcttttgactttctatttctttcgaaaggaagtaaaacaagtgttgcaggagccacagatagcatcatggcattttcttcattttctcaaaatgcaccttttgggtgttttgtgagcaagatcttaaggaaagtaggtcttttcagatgaaaattttgtgaagtcttactatgatgtaagctaatgaaaatttgggggaatgcattgtgagtaggcagggctataattgttttttagccctttgaacaaaccatgtctacatataacatgttcatggtgccacattattagtcaggttttttttaagaaaagtaatatatgtatgcattgatagataagaactattttttttatgatagttttgatgttaaataggcagtggtgataaggatgaatttagagctatgctattagatgatttagggcacttaatttacagattaaagttgaaactaaaaagattgttgtacttttaaaaaagcttcaggttggaatgtaacactttataaatggata

SEQ ID NO: 116698 - DNA, 1044 bp, Homo sapiens
gctgccatcctgcacatgtctagtccttagttcctgccggcattcacccatgcaagctcctagcttgcaggcagctctttgttagaaaatgatttggggctgtttttctgtttttcattaaaaagaaaagccttatcaaggactcccatgcccttgctatctgcctaatttcttcttaactcctatatcataaggagaggtaggagattaagtcagtgaagtaaggaaagaggagacgggaggcaggtcacgtaggacctcatagaatccttgtagagacttgggcttttactctgaatgagacaggaagccattggagggtctgagcatttgtttctcctcctttgaagaataatttttttatttgcttgacaataaaaagggttagcacatttccatttttagggttaccattggcctttgtgttgatggttccttctggcagaaaaataaatctgcccttgtatgtcagcttccttgggtctcccacacactcgtcaggttgtggagaagtttgaatttaaaacaagcatttcacaaatgactcacgttccaggtgggatgatgtgttctctgcctaccacagagaagggagaaatcagttcacatgaaacagtaaccttttctttctctctgcattttcctaggagcagaaaagcacacaaatgctttctttctgattgtgtatttggaatgttccttaagatggatctctgttgaattcccaagtgaatactccaatctgtatttagtctcaaattctgacaaaaaagaaaacctctacctgatgaggagccccgtctctctgctgttttctttaggtctggaagatcagggatgcttcataacttggtgccagaagagaagggaagattgattggggttttatgaggtggcaaaatacatagctaaacctggggacagggatgtcatttagcatgacagaaacagcagaaaacaggaatagtgctttattttgttgtttttgttaaagcaatgtgagacttgttatttctacccccgtggtcctggttgtttttgtgt

SEQ ID NO: 116699 - DNA, 1037 bp, Homo sapiens
ctgcccaccagtcccccaggctttgcctgttccattgttctccacagtggctgcccttctattaagcatgatcaggactccggagctctcctctccagagatgtgtgtgcattatcaactctcctactaacaccaaaatcctgtcaatcacagtgacctccagggcctccagcaagcctagtaaacaagggaccgatgtctgcaatggctttttattcacttttttttttttttttccgagtggggctttctaattactcagttgtgtatgcaaacactgaaggagcattaggcgcatcaagtgggcctctgcttttattaggaaacccttttattttctaaatagaatatgtcaaacatagtctttcctttttagacagttaacctttcatctctcctgtagcagaaattccagtctctggggcttgctaattttgtatttgaaatattctaaagcagaaggaaaatgctgtttacagtgccttcattaaaaagcttttaatcctgttttgttgttgcatatatagtttggatccctgctgagtacacttcattgcataagaaaaatacagtatttttaaaagatataccaatcaacccaacccaattctactttgaccctgacaattgagtagacaaaaacgcttttatagtgttcatacttagcagattataatgaaaatatgagtttaatagatccttaagaatgtgtttctaagtgatgtacaaccttatttttgaaaaagtcttttacgtagcctgcttcgtttgttctcacacattatcacatacattgcataatataaccgtaccacttgtaatatgacttgtcacagaacatgattcagacataatgcagcgcaatttgtttgacgttgtttcccagtgattttcatatcttggcatatacagaaaaccaagatctttattgggcacacaagaagaggctaaaaggataataatgatagtgagcacttttaaacttttctcatatattgaatttaatattcacaacaaccgtatgaggtcagtactat

SEQ ID NO: 116700 - DNA, 1044 bp, Homo sapiens
aatattttccttcatggcaaactttcattatgcttttatttatttatttttcatgaaagaaattcaggctttatagaatcaggctccctttgaagatatactattttcctttgtatcaattttgttttcctttagaacatcatttggctgataaatttgctagtatcctgtttagctgtcagattttgataagctttctggggagctcacatacactgttcatttcaccccaattcagtgctgttctccttatatgtggtctaccagaagtaacttgaggttaaggtttggcacttctgcctggtgttttggctttggagctgcaaaacatatcacaaagcagacataatatgtgtacaaacagctagagacactagtagaatgttgtcagctaaaaagaagaaaagcctctgaaatgtgaaaagggaaaaattgtgctgagtgtatttagaatagcatgtttgagtctattattgcaaccacaactagtattatgtatttaaagatgacctagatttacattctttattgtcatttgctttccaggactagacataaaactaattactagctcatgcagtttgcatgtgttgctttctcttagctcatgtgtttacatggaagcagtcccccatatacacaaaaggaaagaagcctcaagtaatgttccttacagaaggaagatagtatcagaccccttatagtttatacatcctcaaactctatttacggtgaaagtcaagatcttgaagtgtttgctgctcttaggtttaattggttttatctgctgttatcataacaaccttatctctgcagacagttgcatggataatatttggagatcagaattcaagctcagacacacagtgtcatccagcaattaaatgttatttgatatttctgtgtgtggctcaggtgctggggagatcctgcctctggttaacagtctttatagcatcataaaatagttctcaggggaaatccagatatggaaagctttccgaatagaaatggctagaaaagccaaggtaaagtgtggttcag

SEQ ID NO: 116701 - DNA, 1091 bp, Homo sapiens
tgaggtgcctatatatttaaaagcctcagtgtttttgaccactattaattgttaatccgaaagaaaaataaagcattctggaaaaactatcatgtaaatcaattacaatttgggctttctttttttcttactctgaaatgtgtcaggaccactattttaggaagcaacattcttggcatactttgaatgaatttttacttctctagagctagattgcatagaaaagaaatatccagcctgcaaagtaaagcattctggaaaaactattgggtaaatcaattacacaattgtaattgcaaaaatgtgtatgtgtaagtgtatatgttttcttactaagtgtgagaattgtgtcattttacttaattcagacactggagggtttggggatcttaatctcgtctagagcaaatcctctcgaagacttttacttggctagacttcttccactttacactgttgaacttggtggagtactagtcctaccaccataatccaccaaagccaacacacctttgaaagactgcttcctacagatgaggaaactgacaggtggtttcacattttgcacatctggctttaaaacaaaggactgatacaacagatactcagcatcagcctctttacttctgctagacactgctcctactaacagctcacgtcagctgtacatttcagtgctgtgttatttatgtgacagttccttgtagcccgttgtacaacaggaatccaagcacgtatttcccaaatttcaagttttacctgtcaatctttttagaaacttactcaccttgcaaaaaaactatctgaaggtatatctacagcattcctttatttttagttattgctcttataaaaataatcatattaaatgtgaagcaaaatttcaggaaaaaaatattttgaccattaatgtagcattgcatatgtgatatccaatttttccatactgttctggtgtgaaagggggagagattgttttaaaagtccattgtttaataaaatttatgttggttctaaacttcaaaaaaatttttaaaaagtgtaggtagtctttcctcactccacctcaactgaaataatgaattggattc

SEQ ID NO: 116702 - DNA, 1049 bp, Homo sapiens
agcaaaatctctgatattagagcctctttttaaatcccctttgtacagaggagaactatagtacacacacagataagagccggcagcgtgtagaagaatgtcacactaaccaggattgaattcacttctgtatatgtccattgacaaatgtcattgtttagacatgaggaaacaaaaatagcttttaccacattgccccaggcaccgcagtctcggaattcctgtcaaccctcaactctgccagtgggctgcgtggttcctgaggcagcgtgtggctgaaactcaagctaggatgcctgccacctgacctccaggcttccctctctcgccccttctcatttaacaaatgtttgctaagcacctcccacgtacctggctgaaactcaagctaggatgcctgccacctgacctccaggcttccctctctcgccccttctcatttaacaaatgtttgctaagcacctcccacgtaccaggcattgtgctggggaccaaggcaaatatgtttacagccacagatacgatctgtgccctgtgtagcttacagttcaaaagggacatataatgatagacatgctgtgagaaatgagggagatgtaggtggttttaggagagggatttggaacaggagccttaaggtttgggcccaaacagccgtttaatttcttcctaagtattccaactttggtatgactagtctgccacataccgggtcatttagggcaggtaagatgtgctggagggacctgaatgagatcaaaatttagattaaaaaaaaagtcttcctgtggcttttcattagtggaatgtgaaatggagtaatgaattggctttatgagggcatttgttcaggtgacttcctcttgctgcagaccactggatttgagatagttatttattttattttatttatttatttatttatttatttatttatttatttttattttgagatggaattttgctcctgtcacccaggctggagtgcaatgctgcgatctcgactcactgcaacccccgcctccccggttgaagcgattctcccgtgc

SEQ ID NO: 116703 - DNA, 1047 bp, Homo sapiens
caagcacacacgctgagggtatgtggtaagattactaagaatgaaaagttggaactctttatgttcagttcttagagtcagaatttatggaacccattcagctagttaaagacttcttagatcagacagtgatataatttaatgtttgacatttattaccatgtatccttaacaaattaataattttaaatctgaaaaaggacccttgagaaaactagaagaggacaaggatcaggtaagaagccctgcagggacctgcccaggtcattacagatggggctgttaggatcaaaaaaaaaaaaaaaaaaaacaaaaacccaaacaaaaacaaaataaagtattccaactgtggtttcagccatttcttcttcaatatcttggcacttgacaaacatttgttgggtacctgtattatgagttaggtgcttttggggaatacaataccttttacatcctaataacagacacaggacaattagagtatcatccgctaattgcagggcaaatacaactaataccatcaagcacataccaaatgctgtatatgtgtgaaagaggaagccccatgttggcgggaaggtcaggaaggatttcttaggagagaagggtgtgaaatggcaggattttgaaaatgcagaatggagggaaggctaggagccaagacagagacaagaagttctgcctttaacagtaatttgtcaagccactttgcctggagcatattccagaaaatgatttatgctggacacttgggtaaatagacccagctgctggagggtgggaagcaacaggcctgcagagtgtccctccccaaccccacagcctccctagctcctgcccagcccctgcccatcccctctgcaggctgaggaggaaaatagcaggcgtaatccttgtagagcacagtagttgagaccactttgactgagggagggaacctgatggaggcaaatagtagtcccaaggaggaggttctcaaatgataaactgagaagttgtttgtaccaggaaggtagagggagggttctgatgacttgcgaacaagac

SEQ ID NO: 116704 - DNA, 1049 bp, Homo sapiens
tccaggatatgttggaaacctttttttagagcaagttgaggacccttggtaccttttatagaagccagagtggtgtgcacgcttttcactttgcactgcagccagcgcacctgttcagtgagaggaatcagctaaattactagacgtaattgatgtttgtgcaaaagatagaacatttgtttttctctccttgtggttaatgctcaggttgataatttaaatgagtctttttcctctctcttcctatccctctctacattctattacacacattgtttccccttagcctttgtctcctgggcactaacagttgctaaatgtttcttacagaggataatatatttgggaaacaatttccattcaagattgtaatgctacctggcccctttctacaacccaggcaatgaaatgcagatacgatacagttatctttcccaagtcattttaaagtgtatgcacgtaatatatagtttttaataatctctctgctgtggagcataaactggtctatgaacaggatggcctgatgaaactcactttcctgtaaacatggctcgagcggaatcagccaatttcaaggcagattagtgtcagtgcagagagactaggataaataggggatgaacatcacttgaagaaaagaaaaatcatgagaagatcctcttccaggacggaaggatacaattggggtgactagaatgggccttctagttatgtactctaaatgtggaacaataggccagtggacctggtgtctatctctgttgctttttttttttaacgaaaaataatatctggttattttcaagactaattcagacaacataagcagcaagtagaatttgaacactctttccagataatgggttggtttgattaacttcttgccaacccatatttttgtatgagttattacatcagccaagggagagagtcattgggagtttttagcttcatctctgcacaggttaaattatgtagccttcttcccaatttttctgggttagttactttcttttgtgcacgttggtttgcagcctggtgcctgg

SEQ ID NO: 116705 - DNA, 1022 bp, Homo sapiens
gagcccaggaggttgaggctgagtgagctgtgaccattccacggcactccagcctgggtgacagagtgagactgtctaaaaaaaaaaaaaaattatgtctatatctagagttcctagatcaccaacatttgacacagaactacaaattctgtctcttaatggaactgctttggaagcattccaagaatgttattcttcctcaggttgctgtttggaaggtagagtttagaatataggaaggaattactccaagagaggagatgagttgtttcttttagcatttttttctaaaggtcttgaaagccttctttagccatttctttcgtcctcttacctgctttggtagatggctcaatatgactatgctactctttataccgatgaggaaacaaggtatggaagtatgatttgtctatccaaatcaccgtctccaatgagagtcatggaagacaaatggctgtatctctggtcttacgtaaattctctgcggtccatgtgtttacataagacaagggaatatagctattcattcttgagaaaaggcaggagcactttttctggcagggtttctagaaggagatattttggaattttaactaaaagcagaagaagaaaaacccaagtcatttaagttttcttagcacacgggtaaaactcagtggaacagatgctttagtacctgagaccattgttttcactgaaacccctgtcctcttccagaatcaacatcaataatcaaggtagagagtaaacaaagagtgttaaaggatgctgtctctggccttcttttttctttcttatgatgatgataaaataacaaagaaacagataaatggcctctttcactccgcattgtgggagctgcagggaaacaagttggtggatgcttcattcactagcattgtacctctttgcagaagaaactccatgtatttcaacttcattctgcagtttttaaatgctaactatggcaaagagtaacttactcctttgttggtgtgtgtgtgtgtgtatatatgttt

SEQ ID NO: 116706 - DNA, 1059 bp, Homo sapiens
ccgccaccaaatctggctaatttttctatttttagtagagaccaggtttcaccatgttggccaggctggtctcgaactcctgacctcaagtgatgtgcccacctgggattccaaagtgctgggattacagtgtgagccactgcacccggcctcaatacatttttattaagcatctaccatgggttaaattccttcatctatatgaggggatctcatacatgccaataaaggcaaagcaggtaacacaaaggaagaaaataggatgctgtggaaagaatagggagaggtggggactgtggtcagctggagagtacagctcccacctccaggggtacctggtgttcagctctatggctgggcatgaatgttaatatggacagtgttgccagatgctaccatatttttatgagaagctagttacctaaatttttaggccatctccacattgacttttaaatgttggctcaagtttttaaaaacattatgtgccagccgtgtaagatacctatgttggctgagggctctttgtgacctttgatctttgtagctcccctgcctcccagcccaccctacccaaacacgtggaaaacatttgatcagggtagcttactttaaaatttattctcagcactgagaattccatgttaagtaattaaaaattattgaaacaacagatggtagtaaaatatgtacaatgatagctttgcttcacacatacactcccctcttgacccacccacacaactgttaaaatttttgcattaagaaccaaactggttacaagcgtctatgattattggtgtggaaaatgcacataaatacaggcacataaactatccagatgactaaaggagttatgtttgcattatttctcaaaacaatttctgaaagcagttgtggttgcagtgagttttgtccagctttatgactatggaacaagtaagattcttcctttatgtgtgtacaccatttacctttaagataaaatcatgtccatgaggccaggtgtggtggctcactcctgtaatcctagcactttgggaggctgaggtgggagga

SEQ ID NO: 116707 - DNA, 1100 bp, Homo sapiens
tccactatggcttgtgagctgaattccttcgcagaaaagaatggcagtgggctctccggcttgtcatttgggtggagacattaggaagtgtgatggcttactcccagtcacagatttcacttcacctccctgtctgtgtacagctccactgcaagcactgctcacagatgccgattcgctcacattgaaaaggtcctattccagctccaggatcctccttttctgaagagcctgtccctgcatctctttggcagtcatgttctgactgcggcctggtgctcccctaacctgcatggaataaatttaaagctaagagataacatattgttggtctgtctcatttcctcgacatcgagaccagtttttaagtaattttagaagcctagtttgagagaggtctttttttcagattaaaaacatgagagtattcatagactatttaaagcatgtccatgttgccaataatcatgtgatatttcgcttcactttactgaagaatgaggggtgtatttgcatccatcagttgacttcttggtcaaatttatataccaaaagtgtactgtgatttagtggagattgatcattggtataattgaagtttatacaaacttatttttaaatgttggaaatctatttgaaaatatacttgaatacatttataaaatttatagtacaaaaagtaactgctttggaaataaactggaatatattttgggcttgcctactctaatgatatttaatgtttgattcttcattgactcatttattctatatattctatatataatatatataaaatatatttttattaaaaattaataatttattattattataaatatatgtttaatgtataatatatataatatataatatatattatattatatatattatatattatatatattatatattatatattatatatattatatatattatatattatatataatatatatattatatattatatatatattttttatattatatattatatataatatatatattatatattatatatatattttttatattatatatattttatatatatatatatatttttttgagacggagtctccctttgc

SEQ ID NO: 116708 - DNA, 1014 bp, Homo sapiens
aaaagatacagagtgagaaatcttgctttctgtccctgtctccattaccctattccccactgccccatatatgaagccacttttattagttttctgagtattctatttttgtgcaagcatatgcaaatatatgttttataatccctactttcttacttaaaccatatcatactcagagcatatctctgttctgtatcttgctttttaaattggaaatatgtccatacctggataaagagaccttcctcattattctttacaacttcctaccactttattgtatagatgtgctatagtttgtttaggagctccctagtgatggacccttggatcgtttgcagtattttgctgtataaacaatgctgtaatgaataaccttgtacacacatcatttcaaatatgtgtctactgatctttatcctctggttcccgtgcccatttcctcgtagacttcttaagtcacagaaaaaccaaatatgcatgtttttatttcccttaatatatccacagtgacttcctgactagggaagccatgctttgaactgtaggatgcccccaatccaggcgtttagtgtttcatttgactcagtcctggtctgtttgagcatctttaactcagtgaattaagctaagagagaatgaatgtaattcaaaagaaatggttcacagtcagatgtaaagagttaaacattgtggaattttgccatacagtgaaatattaaaatttcatttagatcattcggcatgttagataaaaagcatgaaaaaatgttgtattgagatttaagagtagagaatttaaatataactggccgtgagcaaaaaattagtgtcatagtatactggtctgagttcataattctgattctgaattctgacctttataagaccacctgtatgtttatctgtatgtatttatgggttcagaagttgctttgtgggtacatagccttccaaaggaaagattataaacttttcaagtaaataattctgtttcattgtccagtctttctt

SEQ ID NO: 116709 - DNA, 1026 bp, Homo sapiens
tacccataagaggcattagggggaaggagaagaatataaacacagaaaccacatcctaacagctgcctctagttagctctgcttccccccccatccccacccccgagcttttaaatcttgcagcggcacctaatttgtcccacatggctttcctcccagtggaaccactggcccttttcttgctgccctttttgatcaaaagcaaacagttatgaagaatcaactagtttaactagtttaggccactgtctttaggctgctggtgtgcaggtgcctatgaataggcaggagataaccatttgtagattgggagagacttaaaacagtctgaacctagttaggtgccagtggacctatgaaaacatcccgcaattaagcactaagtgagacagtgaaccgctgagtgaactaccgtgatgggaatagatgagtgatttttgacctagtggggcagatcagaatcatgtagggcgcttaaacatttcgtacacatgccaactcctgccactgacattctgcctctattttaatacgcctggcagtgatgaatatagatactacagatctgtgttctgacatgtctgcacggcaagtgggttgcaacttgcattatgatatttatttttttaagttctaattatttttttcttatatgtgttactcatgtctccattcctttttccatgttattttttgaatgcagtgagaccaaagacagatgcttgtagagcagtgtgctgaattaagttatttccttcactgagactagtgttctgtttctctcttccagctcatgtttatttcttattgctgttgagaagtaagacatgaaagccacacaaccaatgtgctcttcttgtgacttttaagataggaaattggtttggttaaaaaaaaaaatcagagccaggtgcaagcccatacatggtcccagctactcgggaggctgaggcaggacgattgcttgagcccaggagttcaaggtggcagtgagccgtgatacaccactgtattcccatctaggtg

SEQ ID NO: 116710 - DNA, 1098 bp, Homo sapiens
tagctgaaaagatacaagttcagctaccaaatatcatacatagtctatgtcatgatgagtattgatttaaacagtagcaaaatatttttaaaagtcacttgtaatataggttagtaaaatctgaaatctgtgaaaaaaaatataattcgttttaaaggtttgtacctgaaatggccagaaagcaaactagacagtgttgtcttaaaacaggttttttaaggtattgattaactgggctcaaactctactgcaaatgtttgaagaaggaaaagaaatgtgtgcagtgccctctctagcaggcagcgagttagcctactcgccgttttatttaagtgtgtgcgagtgtgcttcccacccggggtgggagaaggatcataaacctccaccattttctattctaatgtatcaaattgtgttattagtcatagcagtctggttcagaaatgttttcatttgtatttgcagacaatctcttttaggatatacacttcatattggctttcactgcagtggcagatttttagcattttaaacacaactttgaaactcaaggctaatggcagagtgaccatattcatgtttttgtttcaattgtttacctattattaatatagttatattagatctctgtacctttgagaaagattggatagagaaacaaagaaaatatcaatccccttaggataggagaatacagatttgtgaaagaaggggtaagaagtattttaaaaagaaattaacaatggagagaaaaaaattagggcgctgttcctggcatcagcaaactccaggagaaacccttttctattcattgatctgtaaagtctgtatttaaaggatatcagagtgcattgttcacggagagaggggaaaagatgggaactaatatttatagagcgcctactacagctgtgatattttgtagccctatgaggcaggaattatcatcttgattttatggaagaggaaattgaagttttagagatattatgtaaccttccaaagtcgtacagctaatatgtggctcagataaaaattctgctataccgcattactagctctgtgtgtgtgtgtgtgtgtgtgtgtgtgtgtgtgtgt

SEQ ID NO: 116711 - DNA, 1069 bp, Homo sapiens
agcggcaatttttcttccctgtttttgcatggatcagcattgggtacacttgccgtgttttaagacctcttctgcttaggaattatttttctgattttgacgtggatctactactcctgccgctaatgttaataaccaggagagaaagatcaaaggaggccaagtcacgggaaggcaggaggagggctggcatggcagacggttagctttaattaccagtcttataggtaattttaataatgacagattttagttgttgcttaagtgaatggaaattattgatagtaaattctcattgcttttgtttctttgtgtgatattggatgctggggtagaaactgtacccaaccatacatgataacaaccaagtgcgttttattagaaatgtagagaggatacccttttaattacattgtataattttagttggtcttcttcctatttccttcttacttaatttaacagccacttgatgatttgagattttttcttttataaattattgtagctgtatatgtatgtgtatggaatatgcaaggcccatgttttgcaggaagaactataacactcagaattcagtagatgaagagagcaaccaggaagttttgtagtgctccatttattgaatatatcacaattagaaagccactatttagggtttaatgaaaaagcctagagccctcccaattctagtaaagtgttctgttggctgggtatttggacattcacagaaactgatctctttattcagcttctggaataaaccgagcgttgggaccagcctgcttggggccatcattaatgccattgtggataaagggtgaaggctgtggccacatgcagctctgctgacactttgtgaaaggtgagcccagccatgaagtcgtgggtgtgtcttgcccagtaggaagataaagcacagccatgaagttatagttgacttggtgcctccatctcctgctttaaggggcacctctcttgggagctcaggaccttgctgctggtggcctcccggcaccatgacatgcaggggacaaagggaatattttgcaaagaacatattcagctg

SEQ ID NO: 116712 - DNA, 1042 bp, Homo sapiens
atttttgagagagaaaatgttacacaaccaggagtcttacaagaaattcatgtgaaaatcttggcatgactatcctgaaagctaagacaaccattggtcttggagaaaagactcctctccagagggagttgcaggtactcaaagatggtatgtgtgtgttgtcttcaaactaggcagaatgataaatggacacatgacaaatggtctgaacaccttcacctgggagaaaaccatctaaagctgagtgttatctcatatgactaacttattttttaacagtatatttccatgataatttaaaaataaattgcacattttacataaggtaatactttgtatatgatttgacattctttaaaatactacctgatgttatgaaaacacttgaaatttaaacattgtcaacactatgttaatatgtcgaatattcagttggtttatggtttaagagtaaaattttaatttttttctcagtatcacaaagcttccttctggaagatccatccagttttgtcttatgcctggggaagagactgaagttgctgtgaactagttccagcaagaagtattatccgtgtaatgagcagagcaatgatattgtggggatatggattatgtgtgtaaactacacagggtgtgatagttgggtgttaatctgtttttgaaggttcattagatggtgagtaggaacaggttctaggacgactgagttctctgaggatcaaaaggttagataaactgcttttaggatttatgcagggtactgattttcatgtcagtttaattatccttatattttacaaaactgtcaatcaggatgcctagaaatcgtatggaattggaggctctgaaaacttttgagtcttttctgattgggtttatctgataatcattcttttcatgatgaccttagttgaaatgaagagctgttagaactacaaggcctgctttagtgtcagaagaagatttaatcaggagtcttatcatccagtgagaaaaatgcctttcattctcttttcatttatttgaaattacttagtga

SEQ ID NO: 116713 - DNA, 1096 bp, Homo sapiens
ggattgcatatatactatgcacataaagatattgtaccaagaatgggcatggtacatagtaggagctcagaaaatctttgcataatgaatgaatgaaagattgtaggttgtgtgctgggtcttttttttttcttgaaatccatgattttttttgttttaaacagagacagcgtcttgctattttgtccaggatggtctcctgtgcctgggcttctagcagtcttccccacctccgcttcgtgagtagctgttatagtaggtacacaccactgtgcccagcttgaagtgcatgatttttgaatctgagttttttataggtccacttactttaagtagatgccctcctatcaggcaaaaaattaaactgtattgtgtttccacttctatttgaatttcactctagccgcaacagagcacttcagtccaaatcctgcattgcccatctcaagttctcccactagaaggtagaaaagaagaatagtacttatattattaatagttattaattcttcctatttccttttgaacaagtggaaactcttcaggcaaacttgcctctcaatacgcattttcttttcttcctattttacttactttcccgcttcattgtcatgtctgaaattgcagataatggtggcggggaaagctgttgtgagcattgggtggtggtgctggtggtgactctttacctgcttctctgattagaaagcaaacttccccaaaacaggcagaaatctattctatcaactttgatatctctccaggtttttaaaacagtgaccagcatctggttggtgctgaatgaatgttcctagaattaatggttaagtgagtaggaaatactgttccagttccattttctcctgtatttggagactctgtggttctctctctctctctttctctctctctctctctctctgtgtgtgtgtgtgtgtgtgtgtgtgtgtatgtgcacatgtaagtatgtgtaatgtttagtttttttatgggtttaaatttatggtaaggtaggataagagtagcggtatctgctgaattagggttaatattttctgtgttaaagctgaagatatgcagtgggcaaaagccttta

SEQ ID NO: 116714 - DNA, 1597 bp, Homo sapiens
ggtgggaggattgctggaggccaggagtttgagaccagtctgggcaacatagagatatcccatctctaaaaaaaattttttttaaattaattagccaggtgtggtggtgtgtacctatagtcctagctactacctaagggaggaagatcctttgagctcaggagtttgaggttacagtgagctatggctgcgctacttcactccactctgggtgatagagccagagtaagaacttgtctcaaaaaaatagtaagaaaaaaaaagaagacatactgtgtactattctgtttgctaggatgatgacttgtgaatttcaaatggtggttctgcatttactaaagttattaacaaccatttgtacacagcaccacattttaattggactaggacttctatttcactccagtacctaggtgcagccagtgcttcattaaataacactgataatcagttcataagatcttacttcagtgagtgatcatctgtcatgacagacttgaaaacaggtttgtaatgcatgaatttatcagttgtcataagcaagcaaaggaattggctttcaatgtgtctgtagctatagtaatgaggagatttgttgagcctatacttaatcttctatattgtaatttaagaaaaccaacttaactatgttcaactaaattgtacatttcattaaaatttgaaaatcatagtaacaagacagggatttctgagttataatcaataagactaatttaatttaggggtagctgaggagaaagatgaaaatcaagtactgtagtttgaattatggaaagtgtcatattttaatttcacaattggttctggtgtgtttggggatttagaataattttataccttaacattcaatctttattttccagtgaataagctaattttagatgattgctaaacctgtttctgcttgctgttatgcaatattagctttggaataatctggtaattcttacttaacaccaattaataaggaattagagtaataattttagatgtgaataaattgcttcaaattataacatgttttgtagtttatataaattgttattagtgatgggaaaataatcaacaaggcatgctgcctgctggtgattttttttttatttttctttgttctgctttgtacatatatattgggagaaattggtgattgaattcaataatcattctttcttacttattggtggtagctgcatataagaatgcatagacaatctcaaaaacctcacctgtgaaattagagtatataccagctggccacctaatgtcaaaacagccaatgaaattttctcagttgagtcaaaccaatggctattcagaaataaaaattttaaaaagtttccttctttattagctctgcatagtatttcaaaaattagttgctacagcgtaagtttggaagttattttggtgagtttccgctactttcaattaataaatctctcagacatatttacatgttcacattttgaattgcgttaaggccagcattgtgcatgcatgctggataaaaacacagaaagctacaggaatgttaaagttaacccagtacaaattactgaagctatttttgtttggc

SEQ ID NO: 116715 - DNA, 1377 bp, Homo sapiens
tttaaacaatataatggaagttcaaaggtagagattaaaaacattctatgcctttgaacattctttccttcctttcactagagacaaataaatgacactttaggaaaatcacttaggatgccgaagaaactacagtttcagataaaatagagctcttaccatttattttctgtatttgcagaaaatacaatgattatatgagatagtttgtccatcctttcttcttcgtctccttatatgacttgtttttagtattgtaataatgaacagaagtgatatcagcatcttccccagacctcaaaaatactacctttctttgtcctaaataaggccttctcttttcacagccttcagaagactaagggacagcttgcatgggattcacatccattttattttggcttcatattccctctttgagttacattgtagttttgctttcagcccattactcattatcaatgtaatatttagtatttatctatggttcccctggtataatatgttgtggtattttcaataatgtatagattagctacttttctagactatgtctagcttatagtctaaataggaaacagtaacaaaaaaacccacttccaatgttctatatacttagtgacaaattttcataatgaatggattggggaaagtggagcaaaatattaattctaggtactttttgttttgagtttcattttatatgctataatatatttttaggctatgtctaacaggaactgtctaaagtattacaatatgtgtaacttaataagcctatttatttttaaaattaaagttctccaggtgctggtaatatagagcatttgattcatatgagacttcttaagaggcatcatgacataactggcttattttagatgttagaacataagctttagaagcaattatcttccactagctgtgtagtcttaatcaagttctttaccttcttggtgcatcgttattcctatctgtaaaatagatatgataacaatacctatctcacagtgttattttatggatgacattgagttattatatgtgaagtgcttagtactgtacatggcatgcagtaagaaattaataagcattaatttttattatttgaatgatatattactatagatctagcctagttaatcttgatgctttattttaattcattctcattgagtaatgacatgtattttgaaactaagtatcgtatagctctgatggagataataaatgtatttcataattgacagtgagcaatgctaatgaataggacttagtctcttctagtaaaaacaaatgtttgcaacttgtgtaaacatcattgtggtaattgaaatggaaattcatcaaatataaaatacatgattcaacaaatga

SEQ ID NO: 116716 - DNA, 1024 bp, Homo sapiens
atgatgggatatggtaactcttctggaaatacataccttaaacagataaatcaaacacatctttcagattttctgtttcattaatagcttgagggtgtccagaagaaacttacatgtcatttggttaaaacttgtcatggcttcctgaagtttctcaccgttttggattattaatctataaaggatgtgataaagcattttcttgtattgaatttgaacatgctttgtgctttgggctccatgaaatattaaattctgttcgccatccttgcaggcaagctgggcaggaaaacttttgcacgcatatgcagcgtgtggggaggggattgaagttatgcatcttgattcaaggactttttttttctcatttaacagtgatgttaatctggaatacctcttgaggagagtcttaggagtcacacacatatatgcaaaacagatttatgtacacacacatatataaaatatgttttcatggtagttttattactagcattagttaagaactttagatgccttttgtctgatactctgatttcagcatcagttatagcatgcagaatatctaatgtggtagcttaagtgactcatttaaacaaaaatattttaaagtcataaaaaggataagaaaggagaaaatattttaagcattgatgctttaataatattttcaacccatgtcccttaggtttaactgtccctgagaagtttcatttgcccacaatctgggtgaactagcatgaccttgttgaatgttggctcactcctgagaccatccatcctaaggatgaatgcttttactaacctggacttcactgtcagtgtgtctgcacagagctgaattgatacatctccatttcttaatgaggagtttggtcttaaatgtagtgaaccctctcactgtgaggctgtctgttacctaaggctcaaaatctatcataattaccatttctcttaaacacccatcattaaggagtgcacaaaatgcttgccttaaaaggatagtttcatggagattgcttct

SEQ ID NO: 116717 - DNA, 1318 bp, Homo sapiens
ggttattctgtgtgtggtgggtatgggatagagaaaaatgggaaaatgttaaatcaccgaagtaatatgttgtgttttaaatgaaacgcttttataactgaaggctgaatttttactacctgagtgctttctatatgcttttacagtattctgcaacacaccacatgtatcttttttctattttattaaatccatttattttaattgacaagtaaaaactatgtatttatggtttacaatgttttgatgtatgtatacattgtagaatggctaaagcaagctatttaacatatgcattagttcacatacttatttttttgtgtgtgtatatgtgtgtgtgtatgtgtgtgtatagtgagaacgcttaagatctattctgttagaaattttgaagtacattcatccctcggtatccgtggaggattgtttccagaaactctatggataccaaagtcctcagatggtcaagtcccttatataaaattgaaatggtatcatgtttgcatataacatatgcacatccttctgtataatctagatcatccccaggttacttataatacctaatacaacatagatgctatgtaaatagttgtcatactgtattttaaattttgcatttttgtattgttatatcttacttttttaaaaatatttttgatccatgcctgtttgaatttgtggttgcagtaggtcaactctatacaatgtattgttattagctgtagccaccatgttgtataatagatctcttgaacttatttcacttaactgaaattttgtgttctttgactaacatctctctactttcttcacccacccgccccagtccctggaaaccatctttttactctctctctatgagttctacttttttagcctctgcatataagtgagatcacgcggtgttgtatctctgataagatttcttgtgtggattggaaagcaggaacccttaggttatctatgattagaagtagttgaaatgcaaaagtggactaaaaaagtaaactgttggccgggcacgatggctcaagcctgtaatcccagcactttgagaggccaaggtggacggatcatgaggtcaggagatcgagaccatcctggctaacatggtgaaaccccgtctctactaaaaaaaaaaaatacaaaaaattagccaggcgtggtggcaggtgcgtgtagtcccagctacttgggaggctgaggcaggagaatggcatgaacccaggaggcggagcttgcagttagccgagatagtgccactgcactccagcctgggcgacagagtgagactccgtcaaaaataaataaataa

SEQ ID NO: 116718 - DNA, 1298 bp, Homo sapiens
agaattgcttgaacccaggagacggaggttgcagtgagccgagattgcaccattgcactccaaactgggtggcagggcaagactgtctcaaaaaaacaaacaaaaaacaaaacagaaaaaagtagacagtagtcacttaaaatttgttgaggaaattcacttcttaaactcttgattgagcatctattatgtgtcagttaccaactaggtaattaacaaagattttttgatgacaaaataaacagttattcatgaaaaaataactggatttgtctgcttgttacagcaaaaaatatacaagtttctatttacatatgagatttctttggatgcaagtattttttctgtttaatgagcctattccgatagaccatgttttgttcactaatttgaataaataatttttgaaacgaagcaaaatgttctcatttttttctacataatgattcttttttttcctcattttttaagtaaacactaaagtttttctgaaggttactagaagataacaagtagcaatatagtatttgtctgacgaatctgagccaaggtgactatttatcactaatggaggatgacgacgacggatttaagaagtcatcccctgtattgtctccagcacaaaaaccttccgcctgcatctttcagcttgtatcgccacttctaaaggatccatgggcaaactgctgaatttttattaatcagcttaacttaatgagatgaaaagacttttcccaaagaatggagaagggagagacagatactgagagctactctaattcttttccatgaaaaaaacattttcctccctgattttctagggaagacatgttcagttgtttccaggtaattcatccgaaaagtctttctaattttcacacacagactttctctagccatgtgctgcctttattattattattattattattattattaaagaaaatagacagctataaagaagaattaatgagagttgaggggggaaatacctttgggaaagaaggcaggaaagcttaagctgataaaacatgactcttttttgatgggggctctctttggataacttgcccttgtctaaattcttctctcttctggtccttcctgtccccactcccccattcactccccctctcgtcaagcttacttcataaatggtaccagctggagatcttttagtggcattcagggattacttcccttcggggttttaataagccctgatgcttgaaacacagtgaaggtgcttctggagacaatcacctttcaggctgggaccatgggacccttttgggggc

SEQ ID NO: 116719 - DNA, 1077 bp, Homo sapiens
tctcaatttcagtggaatatatataataaaatactatttctggagaaacttagagaactgacccaaatgtctgtacttttctcatacaggaaaatcccatacaatgaagctttttaaataagctttaaaaaaatttatttgtggtcaaggacattctatattaagaaccactttcagtgatagtacccactgatagtaagtagaagtatccccctcaccatgtaaatatttttttcagaagcagttgaatgttttctcaacagcttcccatttcaataagatatgcacaaaatgagtcaatatgtgtgaccctttctgtctcagtgtttacagggagatccaggaactcaagtagatttgtaaaaggaagaactagtaccaacatgtttaatcagtattaccctttactatccctcagtaatatttatctcacctcactggacattaataccagatacttataatctacttggtttctttttgtttacagtagtcaacatagtgcttggcacacagtaggcatgttgtagaatttttaaaatatgagaatgataatgcctttaagcatatagtatctttaaatttttcaaaaatattttgtatataagatgtacgacatgtacaccatgatatatgtatatcatgttttgatatacagagtgaaataattaccatagtcaaggaagtcagtttatccaatctatcccttttagcatactttcagtatacaacacaatattactaactatagtcatcatgctgtacattccatctctagactgcaactgcgtactcttttcctataccttagatactaattactaagcatatagtgtctgttagattctgctcacctatcatttcacagaaaaagagctgtgctttagttaaccaattttttatttgttaattggaagccagagctaacctatgattattcttcacagcagaagtgtaaatagatccttatccattgtttctctcagctgcattggtctcagcctcttaggtatttgaaaagatagattgacgatggcaaaacaggtgacggcttcaggccacagggaatatgtggtc

SEQ ID NO: 116720 - DNA, 1888 bp, Homo sapiens
aagagattcatttttgctttataggccacagaagtacttatgtgcccctctaggaattgacttgaatagctcccatttattgagcacttactgtgtctgagcacagtcctttatagactaaatcatcatttttaaaaatcctgacaaaagctcttgtgagggaagtattataattcttgttttgctgctgagaaaactgatttttacatactttatactagccaaaggtcccttggccagtaaatggcccttaccactcagctgggctatgtggagtgatacagtttgtctaacagaacttgatgaaatgttgaagggtgaccttggggcagaatttccgaggaggtgtagtggaggagaatggtagggactatatgctaatatgaaaagagcattaaaaatgcacatttttattcctctttgttgagcatttaatggactgaggtagcaagccataatttggcatccactacaaataactagtataaccggaggttaaatgtttcgtggactggttctttggagctaattgtgaggccatgtgtatgtacaatctgtatatacaaccaaattgctagggattcacataccactggcccttcttgcctgcatgcaggtaagcttggttcctgaaggctggcaaaggtatagagctatttttgaagacgttcagaagaaattctggatattccctgaataaaagttttagaatttagcaatcatacagtcaggaaattttcctctatagtcaacctaaattatttcacttaaagtcagttttggtttacataataacaatatacctttacttaagaattttaaatgcagattttgctttctgtattataagcacattttgagcaagaaataatcatttttaagctatagggaacaatacatagatgcttgaagtgactctgcgttattttgtgtcccaaatccctcactttcatcttagtttcccttccttttgtttcattccttcacaagagttcttgccatagagtttaacagccagtaaattcttcctgattagtttcaaagacagaagtctcctgataggcagtgagtggatcaggttctcacctaatctccagagagacaacaagtaaggggaagaaagggtttgacactttatccattatgtacctctctgctttgccagactaacccaagtcttttcgttgaattgcgtgtctgcaaacattaggcaattcattccttagcatagctgtttgtacctctgcagtggaagttgttaccccatcttctaatttagttgtttatatgggtaatattagtatatgagttatactatagtttatatatgttatctgcatttttgcatgtgttcccattactagattctaagattcttgaggtcagagattgagtcatggcaaaaacaccatactcaagggctggcccatgatgcttaagaacttgaggtgggttggttctgggtacacttctctgctcctccactgactacttgctgtggtcctagacaagttacttaatcattccctgtttcatctttctcatttatatatggaaatactaatctatttgtctgatagagttactgtgatgattaaatgatgtattattaaacataaagcatagaaaaatgcctggcgcatagtatgtggtcaataaattttagctattaatactttcaaatgtatttctgtattattatataaaaataccatataattatacagagatatgtcaaagagagagcatagtctaactttagagttgaggtgacctgggatcaaatgctgcctcttttctccaaccctcaattttcacttatgtaaaataggatgtataatttgcaaaattgtgttgattcagtgagaaagtaaacgcatgtaaaatg

SEQ ID NO: 116721 - DNA, 1600 bp, Homo sapiens
ctatgaatttcttccttaggtatctaacaaatctttagtaattttatatagccttaatcattttagtaaaatttcccaactgtcactttgggttagttctatggcaattgacctttaaaaaaaaagtttaaacccactggcaaatacaaaaatccttatggttaagtagtttcatatttaatatagaaggtctgtctatatttatgtcaacagaaggcaatgtaaacccacagggaagctttattggctctaatatggtattagaacaaactatccatcttacctctcacatgctgtcccatagtaagcctcttttactggtgggaagagagtatttgtgacttttttttcctagtcactcccttcatagccatagattaacctttccaatctactgcaaagataacaggcatacttactagtgtttatcatagcatactcttaattcatggggtttggtaatcacaacttcattttgtaatcacatattaatagtatacataagacctggtttggaattcagtcgtggagtttgggttaacttcacctagagctcttgcattaccattctgggcagagtaggcaaacattggcaagctcttgagtggttgataggatcaggactctgctcacaagatatacatgggtcacattaagtagatttgcactgcagcctgaatatggagttttaagactgcaataatcagtgttggaagacgattggtttttcttgttataaattgctaattagtattgaaaatctaacctgttttgttgaacagcctctcttattttctctgagaaagtggtttggacagtaatctatttatctccatacccctcttccctctagttaaaataaaatctagaaacctctggggactccccctgttgagttgtgcttggaaggagctttaaaacagtgcctccaaactgaagtaaatattgactgggtctggggcttgagccctgctcaaagcctcctattgttcctccttagtcagcactccagagcgggctcaagtatgcatgtgttaggaagagaagaaaggctgtggagggaaattaacagggcccacagccgaactcataaatgcaccatatagaggaaagggaagctgactacaaagccagctggagcttacactgggttatggagaacttaggagactgaagtgcagaaacgctgaccagtctgtctgctttagtgaagtttaaggtacacaaagctgcttgtcttggtgggtccagcccatttctgagtgaaacctttgggtcagtgatgctgtcttctcaaggagatgtaaattgcagcattttggtgaacttggaagaaagtaaaagggtaaaccctcagattccagaatgatgcttctccctccctggtacctgttctgatgcctctgtcagccttccctctttcagctgtcatgtcggattacacactctcttgggtctcctaagtgccttggcatccctggggcatcagatgggtgagggagaaccatatgccatttgaaatgaaagttctgaagaggagatgttcttattatatgaaaaatttaaactatttttttttagaaaaagaaaattaaatcat

SEQ ID NO: 116722 - DNA, 1035 bp, Homo sapiens
actggaataaaaatactaccttggtccaaaaagtttaaggaggatcctgtcataaatgtctaaagatattaagcaaaccctcccaagatgtattttatgtggcaatgccagaattacaccgcagaaacagatttttaacactttccaacttaaatccgtatggttaaattaaccccaaatgttctttttacattaacataaaagatgactaacagtttttctactttcaatgtctgggtttcttgtgggtggctttcaggagcctgtaatttcaatggagttataaaagacttgggacaaaatgcgttctttctgtaaagttctatgattctagtagtcttagtgagaaacttttgctcctgtagagtctaggtaatataagatctgcaaatatgcttctgctttcctcacagcgtatgtattatttgctttttcaaagcaaatctttgtattaacaagtaaggaatggaactagttaaattcagaagattactctgcgttttttgttttttgtttttactgatcttcactctgtgtatataaatacaatattactaatctaaatgaactttcaagtctttgaaagcatcagttaagtagactgacttaattgaaatgtacctctatggaatgattatttttaaaagagataaaacggtttgtactttaagtcaggtgtatttttatgaaaggaaacagatgaacaggacagtgaccacttaagtataattttattttaaaaagaaatttttaccaacaatttttgatagttaattttaaaacagaagcaaatatttttctttttaaatcctcaatggctttaattagaacattgggtactatttcataataactatgaatattattaagaatagtaaatcaagacagtactgttttctttgtaagtttatgtttatgttcactgtggtgtaaacgagggttctcaaacagtgaatttgggggtgacaagcacttagcgtttccagttttatgattctcatagatcctgaaatgctagaaccttctgtgactctg

SEQ ID NO: 116723 - DNA, 1186 bp, Homo sapiens
gacctgttttaaaaatcgctttgctattaatgatttaaaataaccacgcagtataatatatggattaccatgttggaaacacatgaatacctacttagagattagaaaaaatatgattaagtgcttatttcctgatttagaaaagcttgttttttggctttcagttaaatcagcgtgttttttttcccccctagaagcagccatcttgttttaagaccgattttatttctttcgtgaaattggttcggaaatgaatatggacgatagaaaaggactaaaccactttatgatcattttggcagggctctctacatttaaagcgctatcttatttgcgaacttactaaaatgctatcttcttatatttagttgacagaaaaggatgttttaacttagtaataatatgcttaaacccaggcatattatatattaatgttaaatgttgggctgtaccatgtttccatacatatttttttctcgaagcttatactttatggctaacttcaaagtgatatattaatagcccctattgtcacctccaccctcaaatcctgatttcatttttctgactatgctaagtagttctttttatttgttggttgccttttttttttttttttaattactcaagtctacccggaatctttctcccgcaaaaggtactgataagagtataggtacctctaaatatgaagcagttggggttaagatgcgttatattaagtcagagcctttttgtctctgaaatataggctcttcctatcacattagaacaaatctttcttgtgggttctcatagattattttacaagtaaattcatatttgttactaaaaattatgagagtatatcaactgactgctatattttctgtcatgttttgtatttctggatacatttggaaaaccaagtgacctaataaactttactaaaaatttatactatactgcttactactgcatgtgtttgatgatggctgggaacattattctcatgtactgcagtaaaagcagagcttccgtaagattaatttcaaaagtaacctgacttagcctgattaagctgggcacagtgaaatattacttatgtcacttatgaaaaactgcttcagttcattagaggtaggattttgggtggttgtagatgtagtgtaaaggcaataaatgcatgttttaataacagatacat

SEQ ID NO: 116724 - DNA, 1557 bp, Homo sapiens
tttgagattagcacattgatttttgtcacaggtcatgttttttaatagatctgccctgcctgcagaaaactcttctgctcaggatgccatggaggctttgaacctgcccagacaaagttaatctgcagaattttaaaataccaagagtatttctaaatcggtattctaacttcaggtttgtagaattacctttctatttgatcattatcagtttgataatggccaaaagaaagaatgatgtacccctcttaaccccaagagatacagccctaacacttattattcttaggaatttatggacacatttatcttggtatgttatcacagttaaaaacttactttaaaaacaatattttaaaagtaggcagttttatctctgaagtgttgaataagatgttgctcttttgatgcattaagaaaagtcaacttggatataagaggccacatgccaaataagtattttaaaaataaaaactaacagttttccacaaacaatagtaagaaaatatttcagaaaatttccacgggtttagtaaattttataaattcactgttgtgcaattccttttcctgtatgttatttcataaagtaagctagccatgctttgtgtctttatatagaacctatctgttaaaattttgctaaactagtaagacttcaatcttttgaaaaaagaatagaggactttaattgcaacttaaataattttttttatttttccctcagaatataatatgttcagtgggcacgttaaactgatgataatgtacactgtgtctaaacgaagtaaatctactttagcttatactaacagattcaatttgaaattatgtttaggtaaaatcagaattaaatgtatcttgatcacagggattaagtacagtatcttactgtgtaacttgtgtcacttgtgtatctggtaggagtttatcttctacatggagtttcattactgcctctccattgataaatgagcatctatagatgtagtttcacgggaaaaaatattaaatttatttgctgtcagaatagttttactgttacaatctatgtacccaggtattcacttctgagaagtggatactgagttttcaaatgctgataacttttagttggtagtatttattggataggggaccaaactgatttttttatgtgttgaattggcacaaatttgtgaaatagccactcagaactatcagtttgaatagaaatatatgataacatttgcctaaatagatcttctatatttccaaaatttgaaaacttgtataagttttacctaaaagtgtaaataatcaaatcatccttttaatattattctgaattctaaactggaatgtcaccaagtaactttgagtaatgaaaatccacatcaagaagaatataactatttgtccttaatttctttaagaatgtaaaaagcttttaaataaagttaaaaagacttccagtaataaaagtttatttacattctcctttagtagctatgcttataaagagagtcataatactaagaacatgcctcttcatctgaagtatgccataagcagttt

SEQ ID NO: 116725 - DNA, 1044 bp, Homo sapiens
aggcacttacactctctcacatattcacacgtgtgcacatctacaccagggctctgatctactctagatcgtttcctgacagagaagccttcttccaggccactaaggtagcatgttatccactgtggcactgcctaactccgtgtatcctcgggtggccaacttgctatctggtgggtgacttggggactagaaagaataaagccttttctaaatttgttatatagaggcaacagtctgaactctcctggccagctcacgaaagttaattatacattattctacaaatgcattctgttgagcactaaatattttagttggttttatgttaacattgtgttagcttttatttcctggatagtaactggtcaggatatattttaatgatatttgaaactaatcttagcattgaagccaccaatgtaattaatggtgtgcagttattttaaaaactacagatcatttcattattttcttaattttggtaattattaaagtctatttctgagatacgagagggtagtcacattaatagaagattcatgagtgagatataagtagacaatctttctactgttgttgctctttttgctttgctttgggttcttgaacaggttttttggatatatgcatgttgtcattttggactagttctcatgctactgcaaagatctattgctagctaatatatgagttaagaaagaaaattagaaaatctgttcattgaaattctgtttacacttgtcagaaataagcatttctttgtttaattaaggattgccagcttcagttaagacaagacctatcagtaaatgaatatatgttttgatttaacacatctttacaattaattcataatagggactcaggctcaaataactgttcctgtgtctagatttataatgaggacatcagggagcctttttaagctaaagagtgattatctttcacagtagaactagaaacaaaaccctaacttgtgaagttgctatttatttttccctgagtgaatataactgttatttggtctttaacagatatact

SEQ ID NO: 116726 - DNA, 1045 bp, Homo sapiens
catcagagagaccctccctgaagcccccagctaaatgttgttctgtcctacagtggtcagtccatttccttcagagcacttgtcacaatttagagttatgtttactttcatgtttatttgtttcacatctgtctcttctgctagactataaacttcgtaacatcaaggactctgcttggttttgttactctgtgtctcttatacctaccccagtgccattaatcactgaataaatctctctgaaatgagtcttcccactttcttgtacttgtttttacttcagccacgtagaatacctgcggctcacttgtcctttctcatctctactttcacacatgctgtttcctttgcccagcatacctatccttgctcctttgtttatctggaaaaccattactcatccttcaagacctaactcagctgttctgtgagggcttctgatgtatccacatttccctgaagcgtgagggggctcttacacccccttagcgtgcctctgttacagttgttgctgtattcaatggatatgtttaagaaccttctctgtacgaggcatgtgctaggtgctgggcattgacagcagtgaataggagctgtcgttctaatgagggagtgggccacaaagaagtaaacaaataataacattcccaatagcaataaatgctagggtgatcagttctgagaagttgacctttgacctgagatctgaaagctaaggagttgggaaagggaagagatggggggtaagccttggattgtgactgtttactgggctgttccttatttctaccccacgtcgcacccaccccccacctccactcaactggcctctgagctccatgaatcttatattcccagtagccaacacaggcccaatatgtcacactgcagttccaccactggtggcatggcctatcagaactaccaggtgccttgccccatgattctgctgggagctggctcccaacttaaaatccactcccccacttactatcttgtgacactaggaaagttattcaatctctctgtgactccgtttcctgat

SEQ ID NO: 116727 - DNA, 1038 bp, Homo sapiens
atttggtcctttagcaaatttatttaagcaaaatatatttttgggttttgttattacattttattattagcatgaataaatattccattaaggagcccaacctgtcagtggatattacttacctgccaaaacctgagttatctagtgtttatgatgtctgtgcttttgctctaggccccaaagcaggctatttaaggagagaaggtggtttttcatcttttaaatatgcttggtataactagaaactagatatagttatatatcagatgatgtaacagaaagtttcctttctaagaaagctaggttggagtggggcaagactggagtcaagaaaccagttagacttggtcgttgactggggagagatgatgaggatccaaatagagcagagtcagtggggttggagatgctgaaagagatggtagagttatttaggagacaggatcaatagtgagttactgatttgaacttggaggccagtggcagcgggagaagggggtgtctctcctggctctgatctggacaagtctgtggtgccatcgtgagataggaaataggaggaagaataggtttagagacaaaagagtgagtttataaatggacatgttgcttttgagtacctctagagcatccaggtgaagccccggaggcagaaatgcagtggagagctctggaaaggggatctaggcttggagtcattaatattttagaagtctgtttgttttgtaatgaattatgcagatatcaaagtcaaaatgtaattctcataaatatgtaactatagatattttagagaaagctgcccttgtagtacttggatcgtataatcaatacttctctcttgccaaccagtgacatggtgctctaatggcctcaagaaaaaagcacttgagaaatgaagaacagcagaggaaaattgattctgaagttgcaccagtaaagctcaaatcatggtgtaaaaacgaatgtcccaatattttgcattttgtgttaggatggtttctatttttcctggtaattttggcattattatttctc

SEQ ID NO: 116728 - DNA, 1328 bp, Homo sapiens
actccaactccaatttttgccttttacaccaaattaatattgtcaataaatcagcattttagatttagagtaaacctgaagcttttagaaactctcaataccagaataaattacatatattatgtgtgtgcttaagtatttttattttactattgcacacacatatatcctatcctggctaaacactgtttttataataatttactatgtgttcccactaagtagtagtaaaggtaattttagagcatttaggttaatttatcagatttaataatgccaaacaaatatggctcttttaagtaatgagaccagagtaggaaagaagcatcaggacaaatctgaaaccacagaataattagatttaggctttcaaaagcacttggctccatatcctccatcccacccacaaggaaataaaaggacaaggcatttaaaaatgaattattctctgaagactttccctactgtgtctgtttagtcttcacagttttcaatattgacagtgagtttcttttcaccaccaatatggcaagttcctttgagataaagagagatttcacctttcattgccttgtgttatttcccctctactgaactatgtaaagaaaggtaaatggtaaaatggcagtgcaagaaatggagagctttggactattcactcctgcacaagaagattgttttcttttttatggtgtcagttgatatttggaaaaaaaaaatctgctttagcaaagaattctttttccagagaggtgatgaggaaatatgtataacttctgttttaagggcatgttttctacaaatggctgcttacacttagagacactgataattgtgtaattgtaggtgagcccacagctaggtagcaagtgaaagactaggactcaaaagattagggatacatgccttttgctctgcttatagtaataatatagtagataatcctgttaaaaccactacctctttctcatcaagctctctccttccccccaaaaatgaatttttgaagctattgatcagtgaattaaatgtgccaattacttatctttctcaaatctgagcatataagattacttagaagtaatattaccaggttgagtttctgtatgtacaattaaatgtaatattatttcaaaatacaatacagcctctttcaaaaagagtaactagggagtatttggggtgggggtcatctttgctgacttaaaaaaaaaaacaaagtatgtagctttttgtctcttggaaagaatcctagagccaaactctcttaagtaaataaaggtttaaaagaataaatgtttctcaactaatggtgtgatggattgcca

SEQ ID NO: 116729 - DNA, 1094 bp, Homo sapiens
tagaaggtggtgcaaggggaggaagaataattagctagaaggtaaaagaaaagcagcaaatgtatgaggattctcagcccctgggaattttttttaaaaaaataaatagtaaattaagtaacttgcaagcatttttgaccccatttaacagtaaattgagtaatcttgccacccaaaacaaataaatgtaaacagagaattgataccttgcctttttcagctattaagaatttgaaaagatttgagtgtaaaacagttatataaactttgaagatacatgatgccttaatgagagattataaaattattgaatttgaaaaattaagttaattttcaaactcatctcatattgcaattgaatgcaaactaaaagaaactatcaatacaactttagaaaaatggataccatactcctagtaataacacaaggaagtaagatttcttcaaagcagattgcatactgcaaagtggctgatttgaactacagtattattaatatatgggtgttgatgatttgactgagtgttgtaagtttaaaagagaattcccaattaagtttttctgtgtacttgaccctacagccccactcagattctccaggatttcttgagcttgcaaacagttctaattgattagcaggtggcatgcagtttgctgtcttcccccaccctttcaggttgctatggtgatacaatctttgcttcccctccattgcttccatgttccaactgatctatggaatgagatcttgtgaacctattggacaagctggtgctggcatttctattcagacttgttacctaacacttctgtttggcttagtaattggaaaatggccctttataccaacttacgtgcttacatcttgcaaaatggtccaagaaaaaataatgatgtaattctgtttattactacctctctattgttgctcctaaagtacaagaatgtaaaatgttttgaaggcaaaccttgaaagcacattcgtcttctttcttaaagattcttaactatcactgtgaaaagcgttccattaccactgacaatactttttttaaaagacgttaaacacaatattttgagataaggcgcgcaca

SEQ ID NO: 116730 - DNA, 1025 bp, Homo sapiens
attcaaccttaagagtttttgtattttagaaaagaagtttgtaaaggtcctagaaatacaatattatgaataactgggtttatattcaatgcattttaaaataattgttttcctatttaattattataaatatttcaaaacctatggaagagataagaccaaaggataaagaagggccactattattcaggtataaaagtgaagcatctggctgttttctagaagatatgtttatggaaatataacatatgggcaacatatggagaatgtcgggttggaagctctctggagagtatactaatatatcaccactaagcagatgtaaattgcagtgccttagtcacctactgactttctctcttagcaattaaaggagtttttcaatagctgaaagtgaagttatttttaaagataaaaatcatttaggcacctatttacatacaatgtatttatttttatctttagtgtttaaagttcatgctacttcttctgactacagtttgtgaagaccgatgtcactaaaagacagataaatgactaacaacccctttcaccctaggttcatagaaactagtgactttgatgcctagaaccatgttttcccacatagttttttctcagtatgagctaccccgttttttgattactgataagcaagttgatctcagcttttctgttttcccaggatttttttttttttcttaaacagcttggctgtatcattttgaacagtacttcactgggttctttaaagcatttctaacactcatccggcttacattaatcccatttcaggtcaccataaagcagttgttttcatgtctaatcagcaggcttgcatgatccacaagaagcctgtcgtcaagtgcacgtcttcaagctggtaaatttgctgcattctgggattctgatgtttgtgctcctctctcagtgtttactgttatttaaagtattactcacatgtgatgctgatgaaattgtgcagataatcagatgtggtcagttcaggtctctagccatgtagg

SEQ ID NO: 116731 - DNA, 1346 bp, Homo sapiens
ttgccaatttgctctccaaagtaagttgtgctaatttatactctcaccatcaggtataacatttctcattgctcaatatccttgccaatgattgatgttgccagactttttaatgtttgccaatccgattgctgtgaaactgaatctccttaaggtttaaatttatatttacttgatttctgatgaggtagagcctttttaggtatgtgtattgaatcttcaagtttcctcatattttagattgtccattcatatcttttttttatttagaagattcaatttttttctattgatttgtagttattcttagacagtctggatgctaatcttttgtcagttatattttttactggtatgaattctccaaattcatggcttgacttttattttattatgttatctcaatgaacaaatttttcattttaatgtagttgaagttatcttttgctttgttcagtttcttctattttgcatttttaaggccttctttattccaactttataaagataattttctcctgaaagtttgaatttgctttttatatttagatcttttatctacttgaatccaatagtcttttaaaaaattggatatacgtttattgagtagtccattcttttttcagtgtgatttaattgaatgaacaaaaaagacattccagaacatgtggcagtctcatcaaagttaataggttaacaaaattatctatttgaagatggttgtcattgctgaaaatatttctaaaattatcttttcaaaattacatccaatgtctgctgttccttacttaacaactaccaacattggtaaactttttcctttaagggcagatttgattttttgaaagattcaaactcctttagaacatgcttgctgatgaagctggagagtaacgttttggtttaatttaaaatgaaatgttaactttgaaatgttaagatggcctttcttgaatgaacataaagtgattctgagagcagacacatagaagaatttctcaaactattttgaaataaaattgaccttgatataaataagggcataaaacctaccattacattcatttggaagtttattcttggtatatttaagtcaggtcctcatgacttagcaagacaaccagatgtgtaaatagaagaatgaatgaatgaaatagtgataaatgcaaaatagacaaatgtacaaagtatatggaaataaggtatgtagggaggatctcactgttgagaggagtcaaggaaggcttacatggtgatgacatttgaactgaatctgggaggatgaaaatgaattattcacatcaagggcatggtatacaaaatgcacagcatatgcaacagcacag

SEQ ID NO: 116732 - DNA, 1047 bp, Homo sapiens
tggtagaaattatcagaacagaagaatatattttagtgagaacttctcatcttaggaattagtaggtttggcaggtgagaaaagggggaaaagagcttacagtggatactccaatgacagttagcaacacatggtcaaggtcagtcaagataatgagccagtaagcacccacaaacctaggggtcaaggtgagccaaagttgccaagtggcctggtgggcatattttagatactcagaagaaactcaggcacctcccagcccaggcaaggcctgtgccatgttacctgccagagcttaaagcccataggaaggaagaggcatgagacatttcaactcagaagctaaaactaaagtcttaatacacaagaagctgagaccttgaaatcgtctccattgcccatagcaatgccgcggtaaaggccattgtactttacctgtcaggatctgtcagccatcattttctgatcagcccgtgaaaaaagtcatgttggtgtgattagaagctggaactggagtttactgagagacgtaggtgagaaaaataatacatctttcacaatagaggagctagatcagtgcatcttacaagggctttcttttttaattatttaattaacttttgaataggtaatacctttacatggtttgaattgcaaaaaaacaaaaaggtatatgaaaaaaaaatcaccctccagatgtcactgtgcgctacccagtacccattcctgctaattgctaagcatggttcttatgtattatccattcatgggtatttttctccatatgcaagccacacaaatataatattctcatttctttttattttttacaaagtggtactataatatatacactattctgcatattactgttttcatttgataattatgattattttcttaatacagagtcatctccagcccaaaaattatgcaggggcttctgtccctgacaaagatttcaagatacaagattgtgattcaagattaaatgagattagctggaagctgtggcccatgcctgtaatcccaacactttgggaagcc

SEQ ID NO: 116733 - DNA, 1915 bp, Homo sapiens
cagatttgaggttgtaaattggttcccaaatattcaatttagggaaattatatctcacccagctctaaaacatgttctaagtgagcaaattgtattttttactatcactgcaaaattgtgccagatgagaccatatgagacatctgagtggagtactgtacccaaaagtttctaacggaatggcatatttgtacattctgtgggacgttctgctttttgccattacctcatttatctaccccatatttatatgtatctcaaattattccaaaacattttattttacaaactctgtctttatggggaatattatataatgattattctatattcagaatattcacagtgttaataacttccaattaaacttttttagtctaatggcaagaagatatttgtaaagattactatatatttttattttctctgagatccctttgttaaatagggatcaaatattgtatatttaaaataattgtatatctaaagtgatcccggaaatttgctttctaaatgagcagagaggtctcctatagggtcctctctggttgcagggacttctgtctttttcttggagggtttgcctaggctaatgttccccttcttcaacaaccctctccctttcatgtgaattgctgtacatttccaggaaatcgtacactttcatctgttcagaaaaactttcttttctgacaaatcttagtaacaggaaattaaaggcatatgggacagcagtcaacaaagtgactgcagaaagttatgtgagatggaaacatggaaattacgaggtggggggcattcacaaatcatctggtttagaagtcatgtagaacgtaaactaatagtcgaactcaggaaccaagcagcttggatttcgctcctgtttcagctacttcctgttggacagtgggcaagtcacttaacctatcaatttcctcatcagtaaaatgggagtatctatttcttggagttgttgtgaggattaaatgaataattttgtaaagctcctagcatatcattaagtgcttagtaaatgttagctgctcttatctagtctgtgcttctatccaaaaggaaattcttttcacatggttctaaaagggtgatcattcagcctgtacgtaaaactttccctgtgaagagccatttgctcctctcccaagtattttcccctcatttttggatagttctaataatgagaatggaagtcttccttcttgtgatttctgtgctttgggtccagccctgctcattaaaacatgtagaatgtgttgtctgtaaaaagatttttcaaatatttgaaatatcttgtctatctactcttccagatcttttcttctcaagggtaattacccaggtcccttaactttcatatataacattctttgcaggccccttacctccctacttgccttaaattggtcattaatgtccctgttaagatatggtacctagaataaaaccaaatattatctgaccaatgtaacatgttacttctcttgttgtatatataagtaacatcatggtctaagatttctttctttcttttttttttttttatgaagtgcattgacagatgtggtgtggaagccactgtgctcttagctacttgccattcacctaaaatccttaagatcttttcacactaactgtgaaaatgccctaagccatttttggtactattgatctttgaccccaagtgcaagacttcatatagttactaggagtctccttgttgatatagtgatgagaaaaagacaaaggttgagagaagttttagaaaggcttcattagtttttttgaagtgcctagcttagtgttacacacagagcgaatgctctgtctgtattgactattaaattttcaaatagttaacactcattgagcgcttgctatgtaccaagagctatcttaa

SEQ ID NO: 116734 - DNA, 1782 bp, Homo sapiens
atagatatagatttccccctagttatttggattgaatatttatatattatgcatcaggaaagtcaaattaacttattacctattctaagaaaagctggacttccttagtccaaactatattcatgtacactgtatagtttaatctgaatgtgtgaatatttcaacatgccatttatgccgtttgaatagttcagctagccttgcttcaatctctgattacttactccaggtctacattttggaaccatgccaatatttgaaatgtaaccactgaaaacgtcattgggttatctgagctttttgatggtatattaaaataagacaatcacatttgtgcgttcaaaatgtaacatacatcagagaacctgtaattcaaacagttccacgaagacctaacaatactttctttaagatttgaccctttaataagaaacaattatattaaaatactcatcatttctaaccaactctgtgactgaagtctgcaaataacaagtaaactttatccctaaagatgatactgaaatagtttcagttatagtggaggcagatgtagaaaattgccagcacctaatacatccactttaatttcaagactattagtgatacaaaaaaattcagtttctattctgtcaagggaaataaaccatagaaggatcattacagaagaatacaaagagtaaatgtaaaaatatttgaaagagaggagccatcagttatttattttatgtttctgcacataaattggcatatatgtgcctacttgcacaattgactaaaggagttttttttttaatgcttgtgttttcctattgtcgatgttctgcaagtgttaaaatagtcaaaattttcagaaattaattgagcttatatatggcaagaaatattcagattatcatttattcttatgagaatttactgttttgggacagctttcttttagacagttgtgagaaaaagctttgaaaagccaattagagttttgcttttttaaaactggttttgtacaagtaaaggttgtttgcacccatctcacaggtgctgtgcagagaatttttgttgctactgttgatctatgaaaatgtatttgatgcaataaactgccatttttagcacaattatgtactaaatgctttaatacactatttaatcctcacaacaacttgttttcattcttggagagagaacttgagacagagagctgacatcattgcctgggattacctaggctagtagatggcaaagccagagttagatccatttgcttagctctctcatatactgcccttgatttcttggccatctgctcagggcaccatgctcagtgccaggtacgtcaagataaaaaagactttctccctcacctcatggcattcagtctagcagggtaggtgcattgcagcaccaggcccactaggccctgccagagtatgtgcttcccccagttatcaagtgccatcagctaagcacctgttctgccagaatgcactggcagttttttatctgaatgccaatgtgacggttgctgaaagtaagctctacacataaataaaacgttttaattgttgtgacactaaattactaaattacaagtacttttcaagtcttctgatattctctcagcagaaaatagggaagaaatattgcataagaccaaaattaagcagacatattacccatatgcattgaaaatgtgtttatgccatgtgcatcagaactctcaggcacatcgaaccctgagactgagccagtaatgagacttacttttttccagcaccctgt

SEQ ID NO: 116735 - DNA, 1100 bp, Homo sapiens
tgaaagagaaattgtatagatattttatttttaatcttaaaatggttcttcctttcaaagaactatacaatagaagtatatttaacagatctatagtgaacataattttgtgctcacatttgttattccaaaggcatttcactgtctgatgagtcacatttacaattagtttcttattgtaaatgtaaataaaagtatcattttaaaaatgttaaccttttcttcttcaaaccccaagagcctgtctcctagcctgtgttccctctcacctatctgcacagacatagaccctatcccatgatcatttgaaataaaaaagtttagctgagaagcccatgcaaccatgagataggctgtctcacattgaaatgcaagcattcttgaatcaggtatcttttaacaaataaaatatttatcaggacatacattttatgattttatgttccattttatccaaatcttaccaggttttgactcattttgtcttaatcatgagtttgaataatttgtaactacttcttctgtccttgccccttgccccactcttactgcctactcccactctacacccccatcacattggttaatcagaagttgcctggccagatgtggtgcctcacacctgtattcctagcactttggcagctcaggcaggtagatcgcttgagcctaggagttagagtccagcctgggcaacatggcgaaaccctgtccctaccaaaaaaattacaaaaattagccaggcctggtgttatgtgcctgtagtcccaactacttgggaggctgaggtgggagaatatcttgagcctgggaggtcaaggctgcagtgagccaagattgcaccagtgcactccagcctgggcaacagagcaagaccctgtctcaaaaacaaaacaaaaccccccaaaaaaagaaaagaaaaagaaaaaaagaaagaaagaaaagaaaagaaaaaagcagctgacagcacctaaagttcccatgtctgtgcttcttgcatgtgttgcttattctacctgacgtgtctctcaccaacctggacccccacttctttccagccagcctgcttctccgtatcactttttactcagcttagactt

SEQ ID NO: 116736 - DNA, 1109 bp, Homo sapiens
ttggattgtaaggtactttcatgagtttccccaattagccagccatccctgacaaaatccaaaaagaagagattatgagttcttagagcttttgtctatatagttgtgatttgtatacctgggtgaatgtagccttgccttctttttatgtaaattgaggtctttggggtctcagttattagcttgctataaatagccttgaaggtaaagctatccattgtatataaagtcttaactgtgtactaatgataatgggacaaaatttaatggggactatcagttctattaagattcttaaagtatgagaattgggtacagcttcttggctcaggatttttatcttgtgtagttatgatccagtttggatatttgtgttacattttatatttgtattacattttattactcttcattctgggtaatttttttaaaggaacagataatcagtaatttcgtaatgtttattctctaaataataagttttatccctgagaataattgatggctctaattgtactttgcctatacactgcatcccctgtgatttttattgttgttgtttgatcatataaggcagcagcaattctgccagctcaccacatgaaagcacatatgacaaagtgatctctttgggcaaaattatccatttggatgaagaaaatgggaacctttggttgatgccaggtcttcactacacaaagtgaagtaaaaagttgccagctgtgcagtgaattcacctgtctgtactagagtggaaccataataaatcttataaagctcccactgacataaaaactatgctactttattcatatttctcaaactttgtttggacatttgcctaagtgataaatgtgttaggtctccattgtactggtaaagcaagatgaacttcagaaatatttaaaggatttttagatgttctgaattatctgatgattaacctcattaattagaaaagaatctatttcctacaatttttagtttctgttttataaagcctagagtgagttttcaaataataaaattgtttatttgtttctctgaagtttgagtctgacacagagaagcaacatgattttccatgctcccagagctaaatgtgcttt

SEQ ID NO: 116737 - DNA, 1064 bp, Homo sapiens
gtaatagaaatggtccttaccaataatcaagcccctataatagattcatactctttttagagaagaccacatttgctgcctcatttccagagggggcttgtgagagaaccagcgccggaagtcacagctgtcagactctggagtctcagcaagggatgctggcttggagaaccagctttccaaagggtcaaggaagcagaaactgatttctcacacaccattacgcaatttaactaacataacaaatgccaaataattactggcactaatgggtaggtggatgtttactttgtgtggttaccatggattcccttaacattgatgggtccactttgattgaaatgctggaactttaaggaaatagtaatgatatgattagcttgactcaataatttgaacaggatttatttatctgaaagatgattaaactatattatacccaacttgctttgatttaatatattatcctattctgtgggaattgtttcagtattacataattccgtttactccaaggagacatgtatatattttatgtataaagcttattgagctattaagtttattgacttatacataaagtttatagagctcttaatgtatgtcaggaactggagtaaccgtttcacatgcattgtctcttttaatcttcacaagacatatttatccccattttacagttagaaaactgagatagaagttaacttgacaatgattccacatctggtaaaacccagaatttaaactccatttgtcaccagagcctatgtttcagcccttatatgtggttctgtaatctcctgacaaattcttcctgccccctgcacaaacaaaaccagttcactgagaccatggtattgcagtaaagaaggagtttaattaacgtgaggctagccacatgcaagacaacagagttattacttaaatctcaaatattcagccagtctctccgaaggcttggagattggggttttttcaaggatagtttggtgggcagtggggtagggaatggggaatgttgattggttgggaatgaaatcatagggatgtggaaaatggtcctc

SEQ ID NO: 116738 - DNA, 1027 bp, Homo sapiens
ataatgcggtttttaagtcatggagccagaattcaaattgacagagaccaactccagagtttgctctaatcattattcacttaataatcaaatgataaatgaataaatgatgataaacatcttttaccccaaagctaatgcagaactctaattttaaaaacacatggtccttttgccttaaggaccaaatgagtttctgctcccaaacatcaatcttataattagtaaccctgttgaaataaaaagccatacccatccctactatcccagaccttgtctccctagggcgatagccccagttctgtatgccccagctgaaagaaaaaggaatgttagggatcttgaatttaccttactagtttcctgtcataggaggatgccagaagaaagcaacaaccacagtagataaagaaaagctcttacctctttctaaagtttcatccctagaatatgttgctcagttactatcccagaatccagtttcagatctgcactcctcctcctttgagagaaatgaaaaggggttaggggaagagaagaaaagaacttcacagctttcttctagagcccagcagtggtggtccttttcatgtagaagtccaggaacagttccaatcagtaaacctggtggagaaattaaccaattttatatttgtcttaattcaggaagtcacaatattttttttatttatgtagaaatattacaagctgcaaatacacccttatttagatgttctgatgaaaacaccttcttggggaatgtaaattagcacagcaactatggaaaatagtatggaggttcccaaaaaaaactaaacgtagaactaccatatgatccagcagtcccacagctgggtatatatccaagagaaaggaaatcagtgtttatcgaagagatagctgcacttctattactattgcagcactattcacaataaccaagatatggaattaacctgtgtccatcaacagatgaatggatgaaggcatggtgcatattcacaatggaatattattcagccataaa

SEQ ID NO: 116739 - DNA, 1529 bp, Homo sapiens
aatgtacttcagcttttttctgagaatcatcccttctgctctggtttacataagaaattggttgaaatcctctaaagcattcgttttcaactttgccattataacacaccttgcattcaaggtttgcaaatgattaactttcaaaaaaattataaattggaacagattaagtgatatcttcttttcactctcttggaccctgacaaaattttaagcgctagaaacagggatgagggtatcaagcatgttgatatttgcacatgatttctggtttctttgttgtcacagcttttgatgcttgtacttaccagtgtacgatttattagttatttacattcctgtgaagtgtattattgttataaagtctagtcccttattcccctaatgcatattccccccacatttctgtcacgttcttttatttccacaatattttggggctacagaaaattcagggaatgcgcatgaatatgtgccgcacatgtaaacattatccatcacattcatcattcggtggaggaacatgctgattctagagctggaggaggtccttgaggacaaataggacaccaaacagcacaaacctgatgacgctctcacatactctacattatgtggaaaggtacagcctttctatcgttatgctgtcttttgcatgaagttcatgcttcatcttcgttcctagacttcatttgaaatctacgctctcagatttatgaaaaaatatactttttaaatattgttcataagtgtggtcttgatatttagtagcctacataccgtatactcggcatttaacttagaaacctactataatttcccaagtttttctggtaatgggaaggtcctttaagacattttttacgtgcagtgggctctacaaatatttacttttttttttcacctttaagaaactggttgaaaattgtagaattagactttgaagctgtgtagtgtatttttggactattacatttctatctaaatctacaacctgctaggaaagatcggatcccttccagcttgtgattgtaatatatgatttgtgtggactctagtctgtctcacaaatgcgtttagtattttctgaactgagcttctgttgtgtgccaggcaggtttctaactgtgcgtgttcagtccactgattgactgactgagagccaagttattctcactaacacatactcaattcccaactactacagaaaagatggactccagggcctaaattggaccctcactaacaaagcttgctttctgccagtagtcatacttaaacagtgaatgaaaattcagtgacctatattcttccatttaaaaccttaaaattttaaattaaaactttgtcaacagtaattttaaccatactgaggcaaaaagagcgttccctgcaatctggcagcactaaatataattcataactatcaaaaatccgttttctctgcataacttttaagaacgctcctgatgtcttcaaaattccatgcaattttctttaaaagttggtttggaatgccactgtgcatc

SEQ ID NO: 116740 - DNA, 1049 bp, Homo sapiens
cagatgcccttttccttctttgactggacgagtagaaacatattctataggactttttgattattgaagctacttagaaattgtaaaatttgatgtacatctgatacagcgggaaattcatcctttaagagactaccccatgattctgcttcctattgctttactcgtattcaagctggtgagtctgtttttggcctcctctttctatggtggtgggtatgtacattcttttagtacagtatactgagattttttatttttttttacaggcttcattgattcaggaacagctcctcacctggcatatcatttgtaatttttgtcaagattctcacaggtgttaaatgtagtattatagtacttggtaacacctggccaggctgttacagagttatgtttattttaattgatatatgatatagttgtcataaagaaaacgatcatgctaataggcttcttactccccaaactgaacatagatatttatggtaaagggtagcaactataaacaaatcaataattcagacacagctaaatagaaaatacagtcttgggaaattgctccctaaagagaaatataatattgtcattcctttatcactgaacaaatgtatgtcattggcagtgttgtggaaaaaaaatcaaacttaggtgtcagagagttcggttaaaattccagctttgccacttattttctttgtgacctaaagcaagttacttaacttcctagttttgccatctgttaatccacgtgatgatacatgccacatacgttagtgaaaatcaatataaaacacttgtggagtgcctggtggcatagtcgacactcactaattggcagttcttgtcatacagaatcttctttctctttccctctgaagaagaattagccttctcctcttccaaatgtgacttttctgtttgtggaaatcattatttagaaatttgacctacattagtctatacctgcctacttgatctccagagctaagctagctaaacaagattattagtaggcaatagaaaaagatacagcaaaaagtctaaaa

SEQ ID NO: 116741 - DNA, 1013 bp, Homo sapiens
ttcatttgaaacttgtcattacctgctcttccagtctttttgtatatttccccctttttcactgccaattgtcaggtagctaatagccaggagttatggatagtaaatcccttataatgaactcttctgagattctgcagtgtaaaatgttgttaaagtcacactttatcctgaaggcatagagatacttcatgtcataacaaaggcagtgcccagcacctactattaagttatcaagtacaaaaagaaatgttccagaagataattgagaaggtaaaaagctctggagttgagacagatctgggatcaagttctgtctttgttctttgaccttagggaagttccttcacatataggacactccatttcctcagttgtaaaatggggaattaatgtctgacttcatgcttctgtatgtatctggtacctaacctcgtgagtagcacagtgtacactgctagtaagtgttgtttttctacaggagtgggataaaaacaagattcacttagaatttttctgccacctttcctttcctaagtcttagaagaggtttatgttaaaaccttaccaatatggtttacatttatttgtgtctctgaattattttagttcagtgtttctcaaccctgtctgcacattagactgtctgaagagtttctaaaacatattgacgtataagcctcacctaaaactagtcaaattagaatttctatgaaatggggcccaaccagtcattttgtaaaacttgcctaaatgaagataatgtcaggcaaagttgacaactgatcttgtccatttgagcggaatcggaagtgaaaattttgtggactttcctctccgtggtgataagaaattgatcatgatttttcttgcacctcagtccctccagctctcaagctctctgccccatcttaccttccttcttcattaggatttcaggtattcaaaaggttcatggtgaaagtttttgcatctgttgattctgttctccaaaatgttggcgcacaattgag

SEQ ID NO: 116742 - DNA, 1525 bp, Homo sapiens
atttggtatgtatgtagaatgggccattgttttccataattcaaggctcttttgaattcctttgatagttttgaagcttacacagcttaattcattaacctttacccttcacataaatcatatgattacgaatctattgctaaggagacagattttccctccactgaaagtaagtaatgccttctcatctttgaaaaaaaatcctatctagcttaccaaagtaacctttctgttgcttttcatatttcatcaaatgtttcaggtgcattttagaacattatcaaaaccaagtgagcataaaattacattattatcaaaaataactctggatgcttaggatactttggagcaggttttctggccctttctctgtattccaaaagagtttatatatatgtactcaacagctgttactcaagaatttacaatggtagcaatgtcttttttttaattctcttcagacccctgccaaaacataaaagcaggaaaataaactgagggtaggcaattcagaataaattaaagtatatttaaatgaaccgaagacatttgatttggataactttttcatatggagttatcttgtagagaatgatgatatagggctccaaaaaatgtacgtgattgttctgtgattccctggaggtaagactagaatgtcttttgattcttttattctctcttgttaagacagatctctccttagggtttagtaatcttaattgtgcttgacattcatgagctactttaaaagtatttgatattcctcagcatttatccactatgccattttcccatgttatgaatttttcttaattatcttatacacggatactttctgtaaggagacagttctttttccaaattttataactccttatgttgtcatacatgaagtgggaaatctttgaacctactgatccatagagaatggccatgtgatattctgagctttgcctataggagtgatggggacaaggggttggggaaaaataggaataacttgaattctagattctgagtttagagactcatggcttgctcctacagaccaaactaattcatgactatgattaatgaatgttcttctatgtagtatctgtaagaaaggtgatgaagaagtaaacattttaaatgtggtctttggttctgtcactctccttctcacttcaagattatcactttgcacacatttctctcttttattggtatcagtttataaatgcctcttaacttgctgtacctgtagtccatactaagatttatgactttgttttttgcatacatactatacagtgagctgggaattgctctgattttaatacaccaaaggttatgactagagccaagattctttgtgaaacagtggaattatttaaagtaagtatgttcacagacttgtgttatgtactacttgtaagcatgttatagaatggactctaaaagtttcaggagaaaaggatagtcaccacccacaatctctcatcatgaactgctatcaccacatgctgccagggaaacgcga

SEQ ID NO: 116743 - DNA, 1033 bp, Homo sapiens
atctcatcttctgagtgcttttatattccactaaaataatttagtcttagccattttaaattaaaagtaagcttaaaatacatgctctgttgaactgagactttcatatcaatacttatagcagttaagataaagggaacaggctgggcagagagattatcatcaattatatgtttaatatttcacctaaatttcacggtatcctttttagctatttggagccctgacaaatctctttacaatgtttctagttttcactattaatgtttttgtggtgggcatcagtttcgagttgcagaattttgcctgactctttttcaggacaagaatggtctctaaagaattacaattcattaacctagattgtagttttaaatgttttagtatttctgcttttctagggtcctgagcttttgtttccacatggtaaatccttgttacatgtagggtgacaaagtcttctcttctgctgtctgtattaaaatatgccagaacaccataaagatagcaccagtcttaactatatcaaaattttacagtatctggattccattagagttacggattatgaattgatggaaactcacaaaccttaaaagatggaggaggtttcttagcatttccttattcaaagtaactaactacatgtgtttctaccgaagaatgaataaactggtgaattaggaaagcttgcctttaattttttttctagcgtttcctttagtcctgaaatattttatttacaggactaaaggaaatgctgaccttcagttgatttttgatagttatagagatagtaatatgactttgctgctcctaggtaggaacattaatatcaactacagtcacaaaaaataaacaatatttgatccatcaaggttataagtattatgttcatcattttataataatgtggcttttgattatatcttttagtatttctaaaacatagtttacactcaatgaaacattcttgaattaagtgaattaattaataaataaagcttagcatcttttttctgcttcttgcata

SEQ ID NO: 116744 - DNA, 1070 bp, Homo sapiens
ttgtagcttcttttgaacatctgatttttttaactcctatgatattatgcataaattaccatgcttccctctttctttggttctttgaaagcttgaaattttatcccacttgtggaagctttccaggtctgaattatatgaatgccttcaggatgggtatatcccagattttattatttttctacctattttttaccctcattgcctttctcaaatatttcttttatagttttatatgaatttctaatcgaatacagctaaatataagtaaacagctaaaataaatttgggctccttagtaattgtgcaatatatggagtattatttcttttctttttccccattacagtgttctctccacaaacttaaattactaactcaactaatgcttccctgagtatatatccacattcgctaacttgcttatactgttaccttttataatttgtcacctttttcagagtgcgatatgtcattgaattgctcttacttttcccagagccccaaatgttgccaaatggcctaatagtattgtgaatctaatgaccctgtctgtgcttacctttcaataaaagatctccaaaaaatgaatttatgctctaactttatttttttctataaaattctgtcattaccaggatggaattcatgatgccctcacgacctatagaagcacaaaactgaccaactgattccaggcacatttacctgccatctctttcaaacacctgccattgctccccttccttattccactaatgacttttgaaaataataaactatttctcctgaactctcaatctttctttcacagaatgccagaatgttatgcctttatttagttgggtacttgaaaggagtgctgtttgtgtagagcagaagtttttaatacagttactctcttttgctaaatggtttgttgattatgcagacagaacagtaactgtattaattaatagtagatcatttcaaaatacgccaaagagatgcactgttcattttggtttatcctttaaaataacgcaaatctgagtactggattgggaatgttggttgtttctgctggctgt

SEQ ID NO: 116745 - DNA, 1023 bp, Homo sapiens
actctgggaaactgtctttaaattcctacatgaaaatcatactatttcttctgtcatgcttaagatatgtcattaaatctattaatttcacaacacaaatatattattggtattacagttttgctctggctattttaatgtgttttcaaattaatttctgatgtgaacttttagtagtttggcccaaaaatttaaggcatttttttgtaaactagattattctgagacatgtattatatttatcttacattatatcaaacactttttacttaaatttttcatttaaatagttaacctctttgaatagaataatgtttttgaagtcatttgcaaaatgcttttggatgcaaaatgcttttggatgcttttggatgctttttgttaaatctctattcttttgaacatttaggagaaaggtccagattactgggctatgtctctaacgacctggctgcttattctgtctattgcaactgtctattcatagttcactttccaagtgagaatagttaggttggcattttataatgtcctgtaggagttaagtgtgtatgcagaaatggtcttaaaattgtatttttgagaaaagctgtccaaacatgtaaattattgtcccatctaagatgtgcttaaattggtgacatttcaaaagttcatggactaggtgtctatttttattccattaatgacggcagagagtgctccttagctagttttctaggaggtcatcatagagtatatgaacttctatattgtttcatttgtagtcacagcactgtctcaacactgtggctgcctacatctcactgagaggtcatcatttcttatctgcatcaatatattagggttgactactttatgtatttgtaaaactcatcaccagttggctggggtgatagacccagcatatgcactaatcttgtctcagatcatattagggttttctattttgcacataaccaatcacagaaagggagtgaacaaaactagaaaactaattacagacaaattattccccactac

SEQ ID NO: 116746 - DNA, 1093 bp, Homo sapiens
gcattacactgcatctgtggggaagggccccagggatgtagaaaatcaaaggaatggggactaagaacgtcttttttccactttcccttttggtggtggtgtgcggattgatgtaatacatgcatatggaggtggcagtgaaaggactctgggaagtttggtttacactgagaagggaggccataggattgtgtgtgggagggggggatggaatgagaaaagttaaaaccagggaagacagggtctgagagagagttctatgggaactgagagatttaaatatactggttagaagttgttgattttctaggatgaatgggactttaggaagatcactttctgaaaaaggttttttcagaagtgtaactagacaataagagactagtggctacatagagtactacttgataagagattactgaactcactggcatgtgacactttttgcctggtgtaaaaaatatatcaaaaagtgctatatgtcccatgtactaatttgagatggctggttgagaacaaatgacataaaataataaacagattggctgaacagcagagggatggtgacacaatctcactgcctctttaccatgtgtaatccaaccggagtaatttcttaaataatataattacttaatcaactctaaaataaactttcttctccatttagctgaaaaatagtgtgaagcagaagtagtaataccaatcaatatatttttagtggtgatatatctatatctatatatatatgtacacatatgtggaatagagatatttagataacatgtagatttgtacttagtataatattactacaaatatagaaacttcaaatgtcctgctgaatatatatattcatatgttttatatatattcagtaaatgaatatgtaaatatatatattcaggatatataggtttttatatatattcagtatataaaaacatattcagtgtatatttatatatatttatatgctgaaagtgtatatataatttatatacatttccactagaaaaaccgctttaaaatcactctctatgtaggtatgatgaaaaacacttaatttttcccccaagttatccatataaaa

SEQ ID NO: 116747 - DNA, 1100 bp, Homo sapiens
taacagttttaaaacattgaatctatatctaggaagataactagattgatatggtaatcatgctgtttaaacagatttagagcagttttagctccttagaattttaaacttacagaacaattttatctatgtttttagaagttgtgttttggcatagagagtatgtccatgtcttgcaatgatcttacctgtctaggaaattgatttatcagtttttcttacttctgagaagacagttctcttcataaaatttcctagttcttttcaaacaatcgaatttgtgtcattttgttctgttgaaaactctgtgaatgatgccatttatcatcatattagttcttattatgaataaattgtaagtaaatttgccatttattgtctctaataataaaagtgctaaattgtacataatgggttcctaacacattatatgttcctaatacaccaaatattgttaagatttgttgaagaatcaaaaattatctaaattgtcaataaattatcaaaacagatgctctaaaatattttgttaatttatttaattagctactcaactgatctaccctatacagtatatgaggttaggactagaagagacttcttcaataatttctttgttaatagcttactaaaatactttatttaaattttatttagattgagtttctccacacagtggacataaatatcatcccctctctttcttcctgtatggtaaaggttaaataaataccacatattaagtgagaaagcatctgaggttcccaccgatatctgttctcagttctttattttcatattgtaggtaaaattttttttttttaaccatttgatggtatttataaaagttgatttgggacctttaaaagtagaattctgatggacacatggaaaatgcttaccattaataggaagaaaaattcatgagcctccccaaatgtaaatatattacgttatgatttttaaatgaatgttgtaaatggcttatttgctttttaagaggactcacttatatacaaagtagaagagctaaatatatcacttatcatatttggccagagaagcaagttttttcctcagtgtgatgattgcttccctac

SEQ ID NO: 116748 - DNA, 1052 bp, Homo sapiens
ttaaaagattattataattggggattatcctgagagatcagaaggtcttagaaactttgtgtttgcaggatgtagcatgtaactagatcttgtatacagcattcaataaatacttaagaatgaatgatagtgtagctaatttataagcatattctgctaagaaatgcttacagccttttctcttagttcccaagatagcttaaataaataagaatatgatgatgtgttttagagaaaaataatctgacttcagtttgaactatcatgaatattatttattgacaattccaaaaaactttaaatgtaacattgatatctaagttatatagtcttgttttgtttccaattatcatatcaaacaattgaaaaataccaatccaatcaaacctttatttgtaactgctgctccctctttcttctttttcttttcttttctttcttttttttttcttctttttacttatttctgttcatgttttgaaaagcagggtctgcagatagttatttatatgtatgaattcactggttcattctagtgcgaaataggtcattctgaaacagtgagaaatgtgattgctgaatttcaagcagtttttgctgctcagctggaactgtagaaaaaggaaaggggtcaggccagcacttgttgaagatttcttgttgccattgtcctagtaaaagagacttgatgctggtgaatgtggactattcaatgtattagggaggaggaaagggaggcttagtacctagtttaataattattatgatattttagtttaaccactctttagaaggttaatacaaaaaatcaaatgccatcctaataaagatgtgcagggctttttctccttaaaaagaaactaggtacagcaaataatggcactgtgaaaactttgaggcacaaattcgccccttttttttttgcatgctaatatactgaaaaagaaagaaagctgcagtaggattggcaggttatgattctcataaaaaataacaaatttttaaacaagaaaataaagaatactttgaaaaaattgtacattactcagcat

SEQ ID NO: 116749 - DNA, 1038 bp, Homo sapiens
atcagaggtgactgcgaggaacatgttgttttcttgcacatgcttttccaaaatgctctaggaatgagaccatactataggaagaggcagaggcagtgctgtctgggcagttcctcgtgggcattttctgtaaagctttttgcagataaataattcagtagacaatattaagagtcatttgcatttgcctccctgactttgagtatatgttactcaatgtcttgcttttgtgtgaatacacaattggcattcgttttacatttctgtaatgttggttttctaattatactcatttctctctagagattatttctgtttctttcctgctgtatgcattcacctcccattcatggtaaaataagttaccataaaacataagtccatattttaagggaaattcataaatggatttattaaaagattgtaaattatctttacattttgtaacaatatacttaatttgtgatattttcacaaaaaattaaaatgtatttctttatgaagtatagtactgtggttaagaacatgaaatcaagagccagaccctgaatttgaatcctggctttgttatgtattagctgtgtgacctaacagcatgttatttaatatctgtatgcctgagcgttttcatgtttaaaatggagactatcccatctactttgtaggatttttgtgagaatcaaatatatgtgcattgtacttagtacttcataaattatataaaaactatgtattttaatattatgatatatatagtacctagtatagtacctggtacataataagcccttttcaaaatgtggtttataacttagagaatattatttcattgcctttcaaagatgtttttaatatttattaatttgattccatctgttttctagtgcctagaattagagtattagtctttcaaataaaagcaaaattttggggttggagtagatgttaaaaatacagagtaacaaagtatctcttgtcatcctctttaaaaataagataaagaaaacttttaaattgtaaatatatttttgggccgag

SEQ ID NO: 116750 - DNA, 1023 bp, Homo sapiens
actgtgggcctcatcatagccttaatttctactatagtgaggatgataggcaatttgaaagcacttctacaaagacataagtgttggtgtcttccaaatttataattactttcttagacaaaactggctttagaaaatttcatgtgcatatctttctccttattcttgtttgcacaagcaaactaaaaaacaaaacatacacataaacaacaagaatgttaataaaatcatgtttaatctgaagtaaatatagtctgatttgaattggatgaaattgtattaggaacccaagggtttctggtgactttaaatggaaattttttgatgtttatagtagtattcagtgagtactgagattttttcttttatttttgcttttacttttagttgacacgatattttcttttgactctcaatggcatttttttcttctttttcttttttgctaaatgtatctttaggtgaattaaagaatagactaaacctttttatcaaaaatattgtgctgtgaaagctttttaaagtcagtgagctttgtcatctgacccttcttttagaaaataggcctttagctgactcatgttatgtatgtgtgtatatatatatatatatatatgtatatatatatagagagagagagagagagagacagagagacagagagataatcttatatagcatgagttgctccaagaattaatgatatatacacacatatataaaataacctatgcctgatggtaaaaatataaactgtcaatttcttcttttagggtcttagctgtctagaatgttaataaaatcatgtttaatctgaagtaaatatagtctgatttgaattggatgaaatttttaggcttattactttcacaggtgatttttaaaaaaatgcatagtggtttaacaaaagaaactgaatcttaaatgaaaatagagggaagtgagtgaacctgatctagtttcacctacaagacctccaaaatagtttctaagaaaatgtgcctttggaccgatgtctcatat

SEQ ID NO: 116751 - DNA, 1052 bp, Homo sapiens
tgggcaacatagtgagaccccatctgtacagaaaacagaaaaattagcttgatgtggtgacatgtgcctatagtcccaactacttggcaggatgaggcaggaggattgcttgagcccaggaggcagaggttgcagtgagctgagatgactctactgcactgcagcctgggtgacagagtaccctgtctcaaacaaacaaacaaaaaatgatagggtgggggactaaacccagattataatacactgaggagtttcactttgtttagtctttcaaagtgggagaaacttaaacgtgtttaggggctgagccaaaggagataagagagagatgtaagtgagaggaaggagaaattcatggaagaagttcaggaagaattcagaaggcatgcaaattgcacactgaatcactagtaagtaagtagttaagaataaggtaatatcagaaggaattaacctgaaggaggcggggagtagatgccttctagctctaagaaagaagatggatggtgattaaacatttccaagagtttgtggagtgttagaagctgagagaatgcaggcttgagatcctctcattattctttgaagccaatcaaattgtgagataaaaacctgagccagagaagcaattgggtagggcccttgggacaggagctaaaatttggaagagctgctattagaagtggcagagggagctgacgagcagaatgtagaattgctgagtggttttgagagcttggaaactataaatttgtagtggcatcggtccacatgattgttgtatttcctccagcagaagtcagcagtccacttatgagaactcaaaaaatgctgattgaaactgaaactggaggtgctgtgaatccaagatggtataagacacctatcaaatttcataaattcagatttgtatatgacaatagactgaattattttgtgatttctaaaattagcgaatgctgtatctcaggtgctaaatggacacaacttgttttctatgtaatgtttcctatccaggaatatcctccgttacttaaacactgtaatcacta

SEQ ID NO: 116752 - DNA, 1011 bp, Homo sapiens
gccagggatttaaagataaatgtaacaacctccattctgaaggagctgacattctagtaggagaaacacatttttaaaccaataattaaaacacagagagtgagtcaaacgtattgagctctgctggaagtatatcagagagcaagtcaatcaactcaacttggggtgggagtagtgaggtcagaaatgattcacagaggtgtgaggtttacactgaagcttgaaggataagggggactttcccatgtggacactggaggagagcagtgcaggcctggggcacagaacaacgtatagtctgattgctagaatctgacaggaggatgagtgttagaaagtgactgaagcaaacaggttcaggtgggtcttacagagattaggatgccatcttgaggtgtttgaaaatttctccagaggctccgcattgccttcagattaattaggcaagtaacctgcccagatctgtttttagaaatagaactcctgtagatgtgtagaagagtgatgggaaagagaaaggactgatgtccttcttttcattgaaaaagatattgtttaggtcctacaatggcttaggtatggtttgagactctggggttacaaagcaaagaaaacctggcctctgccctgctcagagaacagcagggatagcatgttagcaaataagtatatagtgtggaaaggtctgtagtcaatagcagtcattttgacaataggaaaaggaatgtgtgaaacttctgggtctgtgtgtgtgttggggttggtgggtcaagggaggggatccaaagatggtttcactaagaagggaaaaacaccggacctgagacttgaatgcaagtagaattttgccaggcagatgatctgttcttccaggtagataatccatcctgggcagacaaaaccaggctgtagaaggaacaccatgtgtggagcaatagaaatatctcattgttactggagtataatgcatgcaagaagcaggcaaggtagacaggggccaccgtgaaggaa

SEQ ID NO: 116753 - DNA, 1069 bp, Homo sapiens
ctgccgtcttgtgcatttctctctcagtgtcggtactgattatctctacattgtaatgaattattattattattattattattattattgtttaggcaaccgaaaatttagtgctatattttgtaagaaaaatggttcctttgctgccctttaaaaatgtcctttgggaactgacctagccacttaaagttctgatttcaaataactcttcaaaactgacctcactgttgtttagaataattctcactatctgataagtcattttctttatttgtagaactgggactaaaaatgtaacctgtttcatatccctgacttccccatagtaaacattgtaagacacttcttaacatttctgcgttagtaaatgaaagtaagtgggagaaggaaggaaattggctagttagtattgcttaatgagggaaattattaagtaagctggtttagtggggagataaaatggaagatgtctttacctatctggtgttggattttatgaactttagagttctgtctgattctagcagttctgagagagaagaaatctgtgatgctcttgtgttcagggaatacagttctgcttgttaccatgtgatctctactcatttacttttattaagttcattgttttatttctgatgtatttttcctacaagtacttccttacttgtaatgacagaagtagaaaattatctgaccagtaaacttcatgtatgcttttttaatctaaattatattcctcaatccatcattggcaagtgttataaactagagtatatcaaagtatatggaaaatttgatcctaatttactattatcttaaaaatttttgtgaaactgatagtgaagcaactgctttctctacttaatgccattttttcttggttctagcaggttttgattgaaaatgcataatcctaaaacaatgtgtttaaaatgttattatgcttctctatcacatttgcatttttaaatatagaaaagttagcaaaattatcagtctgtaagtctaactaaattacttgaatattaaacgtgtttattttcaatttatatggagattcagagtc

SEQ ID NO: 116754 - DNA, 1051 bp, Homo sapiens
tttttaaaaattgaatgtttactttgaaggatacaagaaagataaatctgatatagagcccaccctcaaggaatttatattgttgaattataacatatatgtctataaatcattgtcatcctacaagagacactgtgtacatttcacaaaacagtggtggaaagagaacaggctttggagtcatataattagaacctgtcatttgccatgtgctttgtaaccttgacaaaataacttgtcttgcatttattgttagcaaagcaaggggcctctgttttgcttgagtcatgaggactcataatgttttacataacacaggactgacatgtagttaacatttaagagattataaacatgatagtattagtgatattgttgtgacatacttttatatagttcagcattctttgttttttccagaacctgtagcatgaactgccacttagtggcagccatcagaattacatatgctactgtagaggatgaaatcacttggcctgatgtgtcctgtgagaccaccctgagatattaatctgtaatctttggatgtggatattcaatttttcagagtcttcctcactatactcttaggttggcacattttagcatagattttgtcacctgtgtaattctatataattacgttttgcctatttttgtttctttatatagatgtaatcatactgtgtgtattcctctatgacttgcttcttttgtttgataaaagataaactgaggcacattaaaaacttagagggtttatttggacagacagtgattcatgaaccaggcagctccagaccatagatggtttggggctccgctaaagggacacgaggggaagatttttacaaggcaaatgcagaagcaaggcaaaagaaatatttgattggttaaagtggagcactagccttatttggatcatctcagtggaaagtgtcagtggaatatcaggattccctggcacttatttttttctttgtttagcagttatgtactcttattatctgatattttaatgattacactcactattttaatatacacattt

SEQ ID NO: 116755 - DNA, 1028 bp, Homo sapiens
attgtgatgaaacacaagagcaaaaattaaaggagaatgacaattaaatgcattgcatgatcccttgttgcatcttggattgaaagaaatctgttaagaacatgattgggggccaggcatggtggctcatgcctataatcccagcactttgggaggtggaagccagaggattacttgagctcaggagtttgagatcagcctgggcaccgtagggagaccctatctctgcaaaaagtaaaaaagttagccaagtgtggtggcatgtgcctgtggtcctagctactggggtggctgaggtgggaggatcacttggacctgagagattgaagctgcagtatgattgggacaagtagagatagactgtatctgagaaaaaaaaagattgtatcaaagttaaatttcttgggtatgataatgataatgtgatttaataggagactgtcctagtacttaggagatgcatgctgaatacttaggggtaacatgttatgatgtttgaaatttactttcaaatggttttgcaaagaaaaatgtatgatgagagagagcaatgaagcaaatgtggtgaaatgttagcaattgataaatctgagtgaaacattcatgggtgtacattctactctttctttttttagtatgtttgaaaattttctaacaaacattaggtttttaaccacatataaggtggaaagttaaggggcctagaaacagaagtctctcaagaattctctgctgtcagcttttgctctcttatgcattggatttaggagcagaaaaataatcaaggtaaaaaggaatattttaaaaacataagccatatgggatgtaagaaaacacagagagagaacatggactatcttaaagttagggctatttttttccgttcacagtaaattaatggataattaacttaataatgagaagaactgaatatgacttactaagagtaccaagattggtatgtaatgtaaggtggttaagatagcagaagaggcttcataatgcccaactgaagccactgtacagac

SEQ ID NO: 116756 - DNA, 1077 bp, Homo sapiens
gcccgaggcaaaaatatagaagaaagtatgcctgtatatgcacttatcagtatatcccctcatattttgtaccaaatgaaaaaagttaataaaagctctacaataaaaaaaattgactatatagaaagatccacaatgcccgacctgttggacaccattgtgtccttccaagtgggggactccaccagttaagtagaaatgaccattctcattgcataatagtggaggattatcaaacaacagcagcgttaatttaaaatgttgatattttgtccatcatattgcattaatgtttatcttaaaaaatattgtactaaattattatcttgacttttcagtgttttggtacccccttaaattttgtgcttctggttaaatcttttgagagagtgcatggagttgtttcattttagtatctacttaatgtttttatgtctaagtcacctatgtattcaggttcaccagcgattcaaaatcttgaggacccattgagttctttcttttataaatgaagaaactgaccacaatgggaaggttgagaccacaatttcttacttgctgtgatttctgctgaccatttaggctttcctgtggaagaaggaatcatttaactcaagcattcttgttgcctttgatatcaaagttcttaagaataaagaatgtcattggagcatattgtgttcattattagaaccattaatgcgtgtcgatcatccctagatcacttcctttgaatgtctgccaggtttttcgcagaggtaaaaatgtaaatggaaacataggtgtccttatgtaaattgcctttccattttgcgtaatagaaagattagttttgatttttatgggtaacatttgagcctaggtcagtactttctcaaaaagttccactattgtaagtatctgctttagtaaagtttcttttgggtgtctacagatggctgtgctctgccttgaattgccctcttgacttccgatttgggaattaagattttgatagaaaccttatctcacctttctgtgtagtttgcttcattagagctgataaagtaagatccacagcaaatacagaacactgga

SEQ ID NO: 116757 - DNA, 1083 bp, Homo sapiens
gtcagttagactcagagcaattacataaattaccctgaaagacttcttcaaatacctgtgaatagagcttgcagtgggagctaggagactgaagtcctttatgtttttgtttttgttccaaaattttatcactgggtcattcactaaccttgctaaacttattaagttctcttttatgcttgtggtaatgggaacccaccttagtgaaatgtttggaggcttaatcatgtttcaaaagcaccttgagcatgaatcattagttcattattagaatggtggcttgggtggtgccatcaatcatcgatgctttatcaccatcttagcctcatggttttctgcaaattgacagtgaaggtcttaaatcaaactttgtaaagacgctagcagattcttgaaggttacttattgcttatggtatggtagcactgaagtgtgcacaattatctgaagaaaataggacaattatagtgtactcattatactatctgttttcagattaaatggacaaagtgcattcaaattcataatagagatttaaaaaaaacacaatgatctctacttatattttatgctgccataaaataagatctcttagtatatagctattttatatttttgtgaaatgcttttcacttggatttttcatccaaacatattttaatagttacatttaaaaatatatattttaacattatctgcacctacacatctaatggattaataggagattcagtgaaattcaaattattccaggaagcataccttttaatttctaatttctagctcagttgagaaaatgatctagtgactgaaaattaactatttactttgagtgtttatatttaattttgaacttgatgtattccaagaatcaaaggatctgattggaagtagtgtcaaaggtcagctaatttagccttctgccagcaagctcttgactctttatctattgcgtatagcttgttgttttttgcttttcatctttttaccatgtttttttcatatatcatctgggtccactttgttaacatatcaaatcacactctatctgatgttcaaaatgcttcttacaactaacagatc

SEQ ID NO: 116758 - DNA, 1179 bp, Homo sapiens
aaactccatctcaaaaaacaataaacaaataaaataaagctgctcttgtaggtaaaaatatcaaattagatggaaatttattgattagaaaaaatagaaaagtgttgaaggctcttaaaacacagaaaaatcacccaaccaagcaacttaaatgatggtatcagacgttgagtctggatcttggtcttctgttgaaatctgtgactgaagcagcagagtaatattacttcatgttggggaaaatgcaagctagtacctacttttgtccttcagaacttctgtgattatttgtagttgaaaatataggtactataaaaatttctctattttgtagaagatagaagatgtcaaagtatagacacaatttctggctgtatttttatatacgcactcttttgtgcaatatgacgttgcctgtcctcccatcaaaaggtggagtcttttgctttatccttctatcctcttatatctgtgctggctttgtgacttggctgtgactgatagaatatggtggaaatttcgttgtgggccttctgagctttggcttcaagaagccttgcaacttctgttcttgcgtttttggaatactgccaccaacatgtgaataagctcagactggtctctctgagaataagaaatcacatgaagatggaagtctaaacaacagccagaaccaactgtcaaacatgtgagtaaggccatcttagaccatctatattagtctgttttcacgctgctgttggggacatacccgagactgggtaatttacaaaagaaagaggcttaattggactctcagttccatgtggctggggccctcaaaatcatggcggaaggcaaggaggagcaagtcacgtcttacacggatggcagcaggcaaaaagagagagagagcttctgcggggaactcctctttttaaaaccatcagatcttgtgagacttactcaccattgcaagaacagcatgggaaagacctgcccccatgattcaattacctcccaccaagtcctcccacaacacttgggaattcaagatgagatttgggtgaggacacagccaaaccatatcactatccaatcttagtcaagccttcagattcctgcagtcctttgtagtaaaactagcagaattgcttggcaaagcccagttcaaatagccagtccacagagttgtgagca

SEQ ID NO: 116759 - DNA, 1058 bp, Homo sapiens
ttgtaataaactacatttgtaagttttgagagtgaatgtagcatttacctttttcatctttcattttatttatctcattagctaagaaacctttccagcttggacctacgtcatatcactgaactggataatgaaaccgtgatggaaattgtcaagaggtgcaaaaatcttagctctctcaatctctgtctgaactggatcataaatgacaggtaaccattgtaacatgttaaaaatacttttctagaggaaaacatttaggaaatattaattattataacaaggcatgtctataactaaaattgaatacagctgtgccttttcaaattgttatgtttaagttttgaaaaccatctagatctatacttttaatgcatctgttgcttataagtgcagcaaagtttttaggtgctttaatacaaatatttgcctcaacaattgtaacaatagtaggctgttgaattttttctttgttatccatctaagacatacctgctttttgccatgcttgtaagtttgtaatgatatattatttgtcactttaacatttttgcaacatttgtggttgattttaatgatttggagaaaccatctgaaacattaacatttaaaccctttcttaaaggtgacatttttttttcagagatggagtctcacagtgtttcctaggtacaattcctgggctcaagcaatacttctgcctcagcctcccaagcagctgggactacaggcatacaccactgcgcctatattagcccattctagcattaccataaagaactaccttagactgggtaatttataaagacaagaggtttaattcacagttctgcaggctgtacaggaagtatggctggagaagcctcaggaaactgacaagcatggcaaaaagcagatacctcttacatggctagagaaggaaggaaaagagtgaagtgggaggtactacacatttttagacatccagttcttgtgcgaactcattatcaggagaacagcaaggggtaaatctgcccccatgatccaatcacctccaaacaggcccttcctccaacatt

SEQ ID NO: 116760 - DNA, 1058 bp, Homo sapiens
aatattgctgctttgtcataggttatcatttcatttgtttctgattaattataggtgcttgagtgatattctgagatgtaaaaaatatgttcttaaattcattcagctctgaaatattccctaatgaatatgacctagtgagtactgtattatgaaagggtttttttggatgaccatgcttttgctactttttagctttttagcagttaagagttgagccaaaaatcaagtgttgagaatataagctttgattatctaggcctgatgtgatccattaattgatatttttttcttagaagtttgccaaggccagcaacgcatttattgcagtcaacaaagctaattgtatgattactgattgtatgacctaggacaaatcacctaatctctctgcctcagtttcctcatctgtaaaagaaggatagtaataccatctacctgcctctagggatgcatgaggaagagttcttggcacataactaaagaagtggttgaacaatgaaaaaaaaaagctaattaaaaaatattcatcatgatgtacgaaagttcctcataacttgttagtcctgacatacttatgttctttcattaacataagatacaataattttatgaaaataaaacttacttaaaaactttatgaccttttttctacctgagtgtcagtgctgaatgttaagattaataactatgtttgtttactctttgttgtataatttttttcttttcctgctgacccattaaaggttgcttaattatttaagttaaacgcactgtgtaactaaaatagtattttttaaaaagcatttaaaaaactcgtactatagcaatacactgaataaggggatccagtagatcccaccatctgctgtttcattttcccaggtgtcagttacctgcagtcaaccacaggccgaaactgttagatgataaatttcagacataaacacttagtaagtgttaaattgcagctgttctaagtagtgttgaaatcttgcactgtcccactccctcctgccagggctatgaatcgtctttgtccagcatatccatcctat

SEQ ID NO: 116761 - DNA, 1098 bp, Homo sapiens
tctggggagatgcaggttgatgcaaacataatttttctgctacctttaacaaagcatacacaacgtcataggattactcttagttcctcggtccaggtaccaacaggtctttctttcaaaaaaattataatacaatatgtatgtgaacaatttaagatcattttgcccatttaaatccttatggaagacattatcaggtcgtgactgagtccacctgggcacatattttggcatgagaattcctggtttcttggttctgccactttagtatctgtgaacctggaaaggatttagtcactgcctctgtttctcatctgtaaagtggacaagattacatcacagctgctgacaatgaggattacatgagatagcacctgataaatagaaattattcagttaataataatgataattattatcttcctttgctactcttcctgaactttggagctcaaatgactctcgctcatttgttctcagtatttaccctaaagatcctccctttgtcatttacggccttggtaagatttaatcaattctgtgtttcatcatggtggatgtatgcttatggaatattttatccaagtcctttgttatcattaaattattcaatgagtaatcagaaatcaacttatgatattcccagtaatccctgttttatagataaggaaactgagggtcaaagaaattaataactgttcagctagggtgaagccagaattctctattggatctgtctgtctttgtttgttgtgctgttttcattacgtcacattaaaataatttaatacttttaagtgatagctaatcagtgttaagttctgtaacatccgaaatatctgtaaccaatataaagcccaggtagtttgtgatccaagcctaatggactcctattcagccagaggctggtaactgaaacacagttaaaaacaatttaaatatttatgttgctcctgaaaatgctaaagtgacaccactgtcataatgcacaacacaactttaaaaatatcctttagtgaagaattttgtgttgaattcttgttacacgcttaaaaaactaagtaaggaaaacacagaacagaaacaaaaaaaaataca

SEQ ID NO: 116762 - DNA, 1026 bp, Homo sapiens
gcgagactgtgtgataccgatattggtgaaatgactatagcaaacttgtgcaaaagtcctgggagttgggcacagagcggaatctttcttggtcctggctgtagtttggtgccatctagtggccattgcctcctctgctcctctggcttaaagttccacaggcacaatacagtttccttttgtgagctccaagacagtggcagcaattccaagaatctcttgattagttgtctctcattttgtgggcctgattggaatgatcggtctgggagaaatgtaggggtataggaacccgttctcttcttccctccttgtaatacgatgttgcctggcatggttttgccgtttcctccctttcctatgcctactgaaaggggaagcccattatgttacatgtttagatagttgtatttctttaataggtagatgtttttattagttgatttttagatcaattcttatttcctggatatagctaccctgtgtggtaatgtgaattgggaagggcggatgaccagcctctggtcattgttatttggcagagaactataggaaccacccaatctcccaatcactctgatcaccccttgcctcttcactacctatggttttcaccttcacttcacaagagtccttaagctgccccatattactaattgttaatgctgacattaacaactagtcctctcctgtccaatgcccatgccgtggtgaagatgtatgctttacctatctttataagagaggcaagagtagcatggaaaagttttccaacaaccggtttcctcccaaattaggctgcagcatcctgacttcaacgtacataggttttttttttgttttttttttttaagtttcttataactatttctctcactaagctagtttctccagtattgatttttgtagaggaagccagtagtggacagagtttaccatcctgataggaacaataaaatatattaccttatagataactgcacatttcaacttagcctaggttttaaaaaccgttagtgccaagta

SEQ ID NO: 116763 - DNA, 1043 bp, Homo sapiens
agttatcctgttatagcttatcaatacatatatctcccattaagaatgagacatatctggatttcattgttatcagagttaaaaatcataataggcatttattggtatgataggcatctataaaatttatagaaattatcattcttgggattaatgtgctgaacttttttggattctaaatttttgatggttgtcctaaatggaaaaatcctgtctcttggtggatagttattaatacacatcatttataccaatgactgatatacattttccaggaatgttaaaattttatcactcacattccatccaagaataagtgttatttgtccagtgtttgtcttttttcttgagattagacctatggtactgcaatttaaaacaaacaactgccctagaagttaaccacagttcatttttgttgcattcaactatatggcagttagcataatatttactttttttccccattagaaatgtagctgcaagtgctgtgtgagaaagatgtaagaatcttgcagtatagataagctgttgtaaatatatgtaaaaataaatttagtaaaattactgacctaacatcgttttggaattcaaatgatgccaacagttctctatgaaaaaatgatctgcattgtttttaaaacttctttttattatgcatttttaaagctcttgaattcatcttaggtttttatcacttaattcatctatatacatatgtgtcccctctatcttaagacttggtaatagaaaactgagcaccaaagtccactgaattaataagtggcaggaataataaattcagagatctctgagtgtttttgtacattttcatatgctcagaggcataaaaaatgcagtaagaagctataattaaaatgctatagtaatcacatcatgaatcaatttgattttacaaaatgaaacttcagtaggtctgttactttttattgtgtacatgtatatgtatactatattttattctctgtgatctaattatagactgcattttaaactactattttagactttaaatatatata

SEQ ID NO: 116764 - DNA, 1060 bp, Homo sapiens
ggctgctgcgaatttatttaaaacaactatcaaagtgtttaatgcccatcatagattatttgttttgaatttaaaagtgtaataaaattaaaatgggtggagacacatgtctttgggctgtgaaaggtaaattagtaggaaggaacatggtataagataaccccactcccagtaaaaagctgtatttgatttccactagttcactgattctcaagctctggtctgtggacccattatactcttaaaagttatttgagatgccagagagattttgttacgttgttatatctattgaattttttttcacttgaaattcaaaatgagaaagtttgaatatacaagcatacattctattagtcatcagaatgatgatgttatcacaggtcatgtagtctctgaaaaattccactgttactaagagaatgagagtggaaaaggcaaataatgtgttagtattaaattattattaaaatatttttgacctttgcagatacttggacagaccacaggtaagaatacctggaccaaactccgaaaattttgctgtagttaaaatacttccactttaaaactttgttttaaatgggagaagcctctagttgaagtgaaaaataaagtcttcagaatacatatgttgtatgtggtagttcagcaaagtcatcccttttaaattcagaattatttccacagtgaaagagaatagtttgacttgtctttatttgcctgtagtcttaaattggaagaccaacatatgaaaaaggggaataagtagtgttgcttgtgtgtgggtatgtgtgtgtgtgtgtgtgtgtgtgtgtgtgtgtgtttatgcctgtgtgttttggaggaagttatctggtcaaggggaattgaactgagactagaaatttgttctggtagctcattaagttaacatttgtggtggtaatatatgcattttacagcctgtttttcgtcatacattgtggtttactatacagctgttacttgtgccctatactcactaattaagagttagtagaggcactatattttgaaacatttttatatatatacaagt

SEQ ID NO: 116765 - DNA, 1023 bp, Homo sapiens
cagtggcgcagtctcggctcattgcagcctccgcctcctgggttcaagcgacagtcctgcctcagcctcctgagtagctgggactacaggtgcccgccaccatgcccagctaattttttttgtatttttagtagagacgaggtttcatcaggatatagaatacatgtttgtaccagtctcaatctttaggagattgtcatctaagtggaaagctcatgtgggcatatgtatgtgtgtgcacgtgcaatgatgtgtgtgcatgtgtgatgatgtgtgtgcacgtgtgatgatgtgtgtgtacctgtgatgatgatgtgtatgtgtgtatgtataaaacaatataaggtgatagtgtgagtttattagaaggggagttttttttgttcccttggtactttatattgcgactatacttctttgctttacgaagtgttctaggaaatctatatttgttgatttgtgtgtgttctttaaaatatatcttggtgagattgcttatgaattattaataaaacagttggcctagaaggttttgggttgtagtttgagaagtttcacataattaattgcattgaagtttattcagtgttgttttaaacatatgaaggacctaaacagtaatcccttgcatactttttaaaacaatatcaaataattttttaaagataaaatggtatagctgattggcttttctcgatgtagatcagtcatttgaataatttaatggaaaaaagttatcacgtggttcatagcagtcatttctttatggtatttgggagaagaaacagatttgatagtggtgtgacattattttataccctagaaaactatattgaaagctagggcatacatgattctgttgttacaggtagtatgattctggatccataaagtagtctttggctacttcatggttattagctatatggttcagttatttttttgtaaccccatagcctattgttctctcatgcattaagtatttattgaatactaaccacatatgaagcagtatgattccag

SEQ ID NO: 116766 - DNA, 1103 bp, Homo sapiens
acagtgccactaggttgataggctaggtagtagggaagtattcatatttggtctggaaaagaaagaaaggaccaggttgttaaatttttttcagtgtcatgctgtgaaatttgaaagtctctaggtaataagaactatagcatgagattttagcaagtgtgaaatgtgatcagattttaattcttgttttatttatctattttgagaaattaagaaaaatatagaatacaaaaaggagtaataacagctgtatgcctgtcacccataaattgacagttgttaacattttattaaatttgctgctgctgcttgaattaataaagcaaataaacttcaagtctctgttgtcttacattcgtactgttgtcccattgttcccttccagagcaactgctatgatgatctaaaatgctttaaaaaatattttaatatgtatgtggatacccatgatgtggtattatttagtttgtggtcacatgtaatttatatctagtgacatatggttaaatatctggtctcacaaagtatatatgagtctacaatttgcatgtttacttttatttttgagatctagccataatgggtataattcattctttttcattgttagtattctattatatgtataaatctctgggttattcatttcctattgaaggacacttacattgcttctactgttttactatcagaggcagtattgcaataaaattattgtataaatctcttgtgctcatcttcaagagttctctacggcatatatgagaagtatatacaatatggtactaagatatgtacattttcaaatttttctatatcatgtcaaatcactctctactggtaattgaaatcatgttttagagatgtatcttgctgatggagtgtcaactcttttgagggccaggaatatgtgctcatctttttattcatccctcctagtgttggaatataatagacattcaataaatgttgggttagggacagatgggttactactgcattgtgcatgctttaaaaaatgtatcacttcaaatattttggtgacatattttattaaataaaagcttaaaatagcttaaagagtcaaatgttttttcactttt

SEQ ID NO: 116767 - DNA, 1290 bp, Homo sapiens
aagttgtctagtacgaagtctgacttacaggagatatgtaaaacatagtagtttttatggcatcacaactgtatttgttacctaacttttggttttcactttacatccaaggtaaattaaaggatggtgatctcaatttagaagttttctgtttctcaagcagtaggatatttgttgacttttatttttcttgttgagtaaacataaagaaatagttttattggcaatcaaacaatttttagccaatggtttcccaaagaaagcaactgtttatgtttttaaggtttttgttatgttcacattagtttttttctagtattttggtacattaaaaatatgttatatacgtaaatgctaagggcatcagttttgtatttttttttatttaacattttcatttcattggaaatttgaggtaattttgctaagtcttaaaggctaattcactacagttcttcccatttaagtttattacaaaaggaaatttagaataatttgaactctttattggataattgagatattgataactaacctcctataggaagtttgtatttttaaaatttatgaaataaagagaaatatttaaatacttgcgaagccatagctttaagtaattaggatgtttttactttgacacctattcttagtaatgtaacaacaaatattttaagttagcaactaatacaggtacgtacagagaacactgtcagaaagaatgccaaaagaatttcaactatgctttgacaaatactgataatcagtcaaattattttgctaattctcttaataaactgaatattctcaaaaagagtattatagcttaattgcagagtctaaaaataatcatagcatagttttcatataaactttgctgacttaaaatatcaagctattttggtagtatttgagtatacatacatcttttcatattatatcttggcctttagatggcagcattgtctttgtatatttctgtgacatagcttttatgtccttgatgtaactataaggatgtaatgcctctataagtttctgctgatggtttctgctgatgttgtggtttattttacatttttgttctttatgtgaccttaatgggaaaatttcttcttaagttatttaaaataattgtatctagaatgccacaggatgaacttaccattttacacaaagtagtaagatagtagaacatttttatttgtggcactagtttaagtaagataaactttagaaaaggggaaggattcctgtgtttatgagggagaagttttattcatgtggaaagtg

SEQ ID NO: 116768 - DNA, 1479 bp, Homo sapiens
ggtaacatagcgagaccctagctctacaacaaaatttaaaaagtagccaggtgtggtggcacacacctgtactcccagctactcaggaggctgaggtaagaggatctctttagcccaggaggttgaggctgcagtgagccatgattgagccactgcactctagcctgggcgacacagtgagaccctgtctttaaaaatatatatactggagtaatagatatgtaattttgaactgttaaggaatatacataccttggagggcttgtaatgtgagttggttgaaacgggggtaaattagaaggttaaaaatgtttatacagtactgttttaagttatggattgcttacattctatcttattttacaagtaacataaatatttaactctgacgtggttattttcaaaaaattatatgaaaatctcacttgaaatatgttgcctttgttattttttgagcattcagctaaatctgtttgtttacagctgggctcaaaatgcagagaactcaaagatattcatttcggccagtgttacaagatctcagatgaaggcatgatcgtcatagctaagggctgtctgaaattacaaaggatatacatgcaggaaaacaaattagtaagtacttgttatcatccttgtattgttcattttgttcctaaccttcgaattctttcaagtttatttataattttttctgcttattttcttgtgatggttcaaatactacttaatcaaaagcaaaaatccttttaaagtgatgattttataaattgatcttttaactgaatagatggtgtttgtgtgtggtacttgcatgttaaaaatccctcattagcatgtgccaatgcatcttttctaaatgtggacagtgaactaatactggtaaattggaaaaatcaaatttgtttgccaaacataagtctgtggttgtgtagttctttctgatatctctagggattataataattctagacagttagaattttttttattgtccagaaaaatgtactcttgtaaaatagagtcttttacttagtatcataaaaaatgggattcaataagttagagcatataatagggcaattacatagattttatattttaagcacatacatgggtaatgcagacacatttaatatattgtgcttaaaaatcttacaattttttttgagagataattcacataaaatacatttcacccttttaaagtgtacaactcatcggtttttagtatatttaccatgttgtgcagtcattaccaatgtctaatttttgaatattttcattacccctaaaaaaatcctgtgcccattagctatccctccccattttacccttcttctagtccctggcaactgctaatctactttctatctctatgggttttcctagtctagatattttgtataaatggaatcacgtgatacgtggtcttgtttctggtgtctcagcatgatgttttcaaggctcattcgtgtt

SEQ ID NO: 116769 - DNA, 1193 bp, Homo sapiens
gagcaagatgtcagctttagcactcagaaaatctaaggtggagaaggttgcttacaaacaatgctaaatgggattgttaacctgactctggagtttggctaactgactagtcattgactaggctgaccagcagagtggccccaaatagagaaataaagattgcttgctccctgtatgcagtttattcacaaggggaagaagtatacatatgagctgaaaatatccagtttattaaatacagaataatcagtggagagaccgggaatcagactagttgggcttcctacagaatgagaaaacattttcccctggcatgtttgtttgtattttttaaaaaacttacccacttttgactgtttattgctgattccttgtatcaaagataaggatttagctcacttatacttccttccctgtgtcttatcctctcatccttccaacataattctattataatttttgttaaataagtattcagtatttacattctataattatgtacctatcttttttctctaaagcattttgttttcattggaattaataaatgtctttttatttctttacctagtttttatactcttaacactaatgaagaccaaagctttcctccagttgcattagtatgtctatatgtgaatacttaattacatttactgccctacagcagatttgcctgggatagtctagtctggacttctcatatacaagtgtgatggcattagtggtcaccttagtatcttacgaccgttatccttaagattttctttctcttgctgttgggttagatcttctgttacccagatgtcatgttttctttcccttggtgtattctcgtgttttatagagcacagattccagtaccttcctgataaagtgtatatgggaggtaaatcttttgataacttgtatgtctgaaaacatctctaattctgctttcacacttaattcataatctgaatcccgagtacagaattctgggttagaaataatttatcttcagaatttgatggcattggactgttgctttcttttagttttgttaagaagtttgatgcattttcatcctaatcctttctatgaagtttatctaagtctgtagaatctctttaaactcctgtttctgaaactttttgatgatttgcattgccatgtgtctatttttgtcatttatgctggacaagtggataagc

SEQ ID NO: 116770 - DNA, 1008 bp, Homo sapiens
attctccgtgaagacctggtagagctcctgtagataaaactcacaaaagcatgagtgttgtcttataacctggtccccctggaatttttaattatcagacttatccacgctgtgcctccagtattttgtcaaatgcagagttcaggttttcctactctagccctggttcccgctgaggtttctggtagtagtttctcttctggtgagttgtgcttctctgcatctgtctgtctctgcagttttgtggcagtggtttggtctgtgtcttcatttctctgatggatctaaaaagaattgttaatttttcagtgtgatcagctttttattttttagaacagattggcaacttctaaactccttacatgccagactgaaaaccagaaatcttttcttttaaagcaagcattacagttactgaatgatcatccttgtcttgtttgtgttcagttttatgctttattatgtggaaagcccaaggtgtttcccaaatccctctaacttggatcatctagaataggccttattctagggcatagttcttgctcccaaggtaccatctttttggtgtctcagctggatgccagggcacttcacaggatttctcccttttgacagagtagagctccagtgtctctagcactgtcttcctggacagataattttttatttagaagaattatattcgtccaggcgcagtggctcacgcctgtaatcccagcactttgggaggctgaggcgggcggatcatgaggtcaggagttcgagaccagcctggccaacatagtgaaactccgtgtctactaaaaatacaaaaattagctgggagtcatggcgggtgcctgtagtcccagctactcgggaggctgaggcaggagaatcgcttgaaaccagaaggtggagtttgcagtgagccgagatcacaccactgcactccagcctgggcgaaagagcgaaactccgtctcaaaaaacaaaacaacaacaaaaaagaattgtattctatttctat

SEQ ID NO: 116771 - DNA, 4390 bp, Homo sapiens
atgaataactaaagaaattctattgcttaggaaattccaagagttttgggaaatatgtggcaagaattcaggacaaagaccaattacaatattattattataccaaattcttgttatgcttcaatgttaagacggtttctcttttgattatatcgttcatgctataatctaattagtatattgtttattgtggaacatttaattaaaaaatggaaaatacgtttttatttttagcaaaagtttaaatttattgctttttctcttacaggtcactgatgaattgttggaaaaaattgcatcaagaagtcagaatataattgaaatcaacatttctgattgtcgcagtatgtctgataatggcgtatgtgttttagcatttaaatgtcctggacttcttaggtatacagcctacaggtgtaaacagctttctgacacctctattattgcggttgcctctcactgtcctttacttcagaaagtgcatgtaggcaaccaggacaaactcactgatgaaggactcaagcaggtaaattttagcatttataaagtgattttacttgaattaattaaaaatgttttctagcaacaacattttaaatggttacgttaaaaatagttcccagagactcaagtgaatcatcttttttacctattaatgaatatttgtttagattagttaactagagtgccatggttataatcagtaaattaactgctttgttttatagtgagagcctgaacttctgtgaccagccattttataaatttatgcttttgttacttaaattttttaccacattttgctttgggcaactgcgtagttttggtcagcatgaggttttaaaaattaacattttaattccccttttattatactagatgacatacatgcttaaatatctgaatgtttaagggataaatggacgtccaaattgaagattataaaagttagaacaaaggcctaattacctctatttggtacaataactgggttaaaaatagtattatgcataccttctgtttattatacttcctttggaaatggcatttaaggtttcttggctcggagtggattatttattcaacagatgaatatccttaaatttaaaccttatgtatgaattaactgaaagcttggtatgaaaagaaatttgggaagactctatcctaaatagtgagtactgggtgtgtcagtacaacttatatattaagaatgttaccaacttataagggagcctattttgtttgcaaaggcatattgtgcaaaaagtcttatttgttttaatatttttcttgattcatttctgctatgtacaggattatttactagcaaagcatttcatgaagttcttaaacatattaaattaatcttttatgaagaaatatatattttgtgtatatagcatgattttatttactttgatggaaatttctcagcaatttatttttcacaatgaaacattttaaaaaggtgtatgtattaagaactggattaaatctatttcatatttaattctgatataacacaaataggtagtagtttagcagacttcttagggtatacctagtaatttttgtgaaaaagaataagatcgtagtcatggttgaagtagagaaggagcaacatttaatatgctaatcaagtattatgaatttatcttatatttacaactttgagagtaattatgtaaatcttctctagaatgtgaggtattttggagcctgttacttagatgtttccttcggatatttatggtttctgaattatgaattagttacacgtgaggtaatattctgataaaagtagcaaaacaaatttttttccccttaggtagttttcttcttaagtaattacataggatctcattgcagtgtagagaatatttttctgtacttaagaccgctatagctgggtatgtctgatttcataatagactctttcctctgatggaatagtgttatgggtatagtagaaagagaatggctttcatatatacataaaatagaaattaagttttatgaaacaatacacatccttatgtgcaatgcacatggatattatctattctgttctatactattatgttaaatgttggccttgacccactcactaaattaattttatgacctagtgatatttcataaatccgaatatggatttatattatggttttagtaaactgacagtgctatgttaaaatgtataatagagttacgaaagcctaagagggaactagccataattgatgatttgcctgggactgttattttttcttgaactcattaatttagcaattgactgaattgttgattctacagattaagttgttgcagggttctgttttttccctcttctgtcagtaaaaattgagaaatgttttagaatgatatatgtaaattttattgataatttctttagaatatattttctttataactgctataattttgattgactttagcggataccaaatatgtgtgccttttgaattctgtcagtttgtttacaaaaacagttgcttatagcatttcaatttggagctctaatagatgtagactctaatgttttaactattggattctgcttaacaatatttcttaagcatggtgaagcacctaaaaaaatcaggctggttttggttgaatactatcctctttgtgaaataccaccctgaaatatttatatttttattttcataatagtcactcaaaataattttaccagtggaatgtgttcctattgtatatatcttttaaaactacaatcatgtatctagaggaaaaatctatttaagaataaagggctgtttcaattttcctaatattttgttatcatctagcacttgccagtaaacaaacgataatagtagtcaaagtattaaaatatatctaagaaattgtatgcattgttactatattatgtgactcaattatatgcagttttagcagtttaacactccagctcatggagctcagtagaaatttctgtaaataagtcactgtaggcttttttcagataaaatggtacaaaaataataaatgttacattagtaaattttgatctggctatgctatcaatttttaggtctttaaaaataactacttagagtactatcagcaaaatgttggagcaggcagctccaaaagcctgcctctccaaaaaaacattgaaaaacaagcctaaactatcagatccaactttgtcagaactctggaaacgtcaaaggtttatagcaaccaaaggaatgctagacaagaaaaatgcaactgaaaggtggaaagaatgctttgtgggttttttacttgcctgtgcctcacccattccccagcttggcaacagtcttgaagatagcagtccgagttcccagtgtgggacccagatccctggttccagagggaacagagcagaccttatttgcaaattattcatttgtctgatcaacctacctgagagctatttgaagggctgatgcaggtgcttatatatctgttttacctaatttagaacccagtcagggaggaaaattagtgggcattgattgaacacagtataaggcaaatgaaagaaacttgcttttgagcaagcttctttgggcaatagattatggtgagacatacaattgacctaggagaaagagcctgggagagagtttgtttttatttttgtttttgttttgaaattaggacaatcagcctcagtgtatagaagggaattttgaaagccgcatgcatgcccagggcaggacacttgttcaggaacgacctaagaagactgtaaactttatcactgtgtgcttgctaggtccagtacaagcaggaagtaaaggccaaggcagagttgtgaatggtatggctaagtcttaaagaaatatcccagcacagagccagtctgcaaagacttgaataagtgcttttgttttttgttttagttttgtttttaagctttggcatccaaggaaatctctttcaaaacactggctgaacacaagctaagccttgattaatcaaaaatagtgaagcgtagggaagtggggagaatctaatttcccaagttaccacattataatctaatattttaatatttagttttcaacaataaattacaaggcatgcaaagaaaaaagtattacccattaaaacaaaaaagaataaatagaacccattcttgaggaagcctggacattggatttactaaagattttactaaagattttaaatccattatctgaaatatgctcaaagacataaaggaaaccatggccaaagaaatgaaggaaattaggaaaataatgtatgaacaaattgagaatgtcaatgaagagctagaaattatggaaagaaccaaatagaaattctggagctaagaagtacaataactgaaataaaacat

SEQ ID NO: 116772 - DNA, 1179 bp, Homo sapiens
ataagttgttccctttctgtttttctccttcattggtaagaggttaaaactattaagataatttgttatttacttgcttgggttcatgacctttatatccaaggagaatggtgagggagttagttgtgggcagtagaatggagagcagatatgtgtaaagcaatctatcagcttgttacatcattactcttgaatgtttgagttatttattatgaactcaggctaataatagcttcctcccccacccaaaccccctccccacccagcccgctactggtagtaaggtgtggagatgaaaaagtaaaaaataaaaggagaggtatgtcagagttataacttttccgagaactgtgtttatgctgtttccaacaagcataaacgaagatagttttatctttggctgttactccaagtgctgcttaacagtgtagttctttccttctattctaaatttcatttgcattttctgtctccattatttttactgaaaggacttgaataacattaactttgttttgtattttggaaatgtggtgattgggcacagaatatgtagaggctggttttaaaacaaaaattcagatggccatctgagtttttcaccagatgaattgagtcgtctgagaaaaactttttgatgtggacgttcctatatagtctttggtgttctgatatgcaaaatggtgtattttccaacctatgaattatatgcgaggtattgtttctcatagaaacagtaaaagattaaaaacttacacgctgtggtatcatctgatatcaagtgtaaaagtgaattttcatataacattattactgatgtatactatttcatgggttacaaatggaaagtgaaacattgaaaatctcagtatagttttatttgtggtgagtttttgctgaatttgaattttcccactaaggatagatttttaggcttttaatgagacgaacacatatcctttgttggtgttttctgataccacttctgacatcaaatatgtggagtttttccacactaacaattttctaacactaactggatgtacaacaattcagttcaactaactcccagaggtatcactgagtttaagggctcagtcccacaagactacccacacttcagatatcagttgcaagtcccagaagccacctgaacttctcactgaccaattataaact

SEQ ID NO: 116773 - DNA, 1001 bp, Homo sapiens
agtctgactcagtgaacctgcatttttacataaacaatatggcagaggaagcaatcagatatgcatttgtcttaggtgagcagagggatgatggagttctgtctgtcatttgtcccatatctgtgaagagaagctatcaatttacatggtcagggtgaaattcagcagaactgctttagggtcaagatcttgaggtccacagagaatttccttttggtcaaattgtgagggaagtatgtagcttttttttttttttttaaatccttgtagctatcttatttaggaataaaatgggaggcaggcttgcctgatacagttcccgccttgacttttgtctttggcttagtgattttggggtcctgagacttatttttctttcatacttgtttacttcccctgattttattttcttctgacactgtggtacatttgccaaaactatgaaatcagcattgtacattactattagttaaactccagtctttatgtggtttcaccagtttttccattaatgtctttttctgtcccaggatctaactggataacattagttgtcattctttcttagtctcctctgaattgtgataattgctttctttttttgttgtttttcatgaccttgaattttttgaggagttttgatccagtattttgtagaatgtcccacatttagtatatatattttattattagattggtgttatgaatattttggaaaagataccataaaggtaaagtacctttcttatgatttacttttgtttttctttttttcttaaatcacatatgaaaagttcacgtggctccaaggtcaaactgtaaaacttcagaataatctcaagtttatcactctttcttccctagtcttttttcccttcccagaaaggtaaacagttttttttttattagtttttggttaatgctttcaattcttttttttttaaatataagcaaacacaaagatatgcatgaacacgtgtcagtacatgcctgttctcttc

SEQ ID NO: 116774 - DNA, 1003 bp, Homo sapiens
caagctgtttgagcatatctttggcatgtacatagctgaaaactaagatattcagacacagaatgacttctctagaaagccaggctaaaacatatatatgtgaattaaaatctgaacagatgtagtcacactgcccaggacacagattccacagtttagggccagacatgttaaaaggctcagaaatataaaattctacactggtggccaggtgcggtggctcacgcctgtaatcccagcttgaacccgtgggtggaggttgcagtgagccgagatcacaccgctgcactccagcctggcaacagagtgagactctgtctcaaaaaaaaaaaaaaaaaaagaatatacactggctatgttatccaaaatgtccagtttttaacaacaaattttaagacacgtaaagagacagaaaaatgtgacccatgctgagggaaaaagaaagcagttaatagaaactgactgtgagtgagcctagatattagacttagcaaagacttcaaactgctattataaacatggtaaaagaaaggaaacattatttaaataattacaggagaatatgatgacattgacccaacaaattggaaatctcaataaagaaatgagagctgtaaaaaaagttttattctttttgatgctattataaatggaagtgctttcttaatttcatcttcagatgattcattgctagtatataaaaatatttgcttattagctctaaaattaatttttgtgtttattctctgggattttctctatataagaccatgacatctgtgaatagaggatgttttaattccagctccccaatctggatgccttttgtttatattccatgtctaattgccctagccagaatctccagtacaatgttgcatagaagtcatgatgcagaaatccttgttttgtttctgattttggggaaaaacttttagacttttaccattaagtataatgataactaggggttattggtagatgctctttctcaggttgagga

SEQ ID NO: 116775 - DNA, 1305 bp, Homo sapiens
gtgaaagagttcctttctgttggtttctgttttgcttcagatagagcttggttacctgctgaagggtggaagagaagtggcaggtgtttaaaaaaaaatctgctaaggataacttgagagagctgactgaggaagaagtattgcaatattcaaggcccagtggcttggagaagaccactgttggaacctacattgctattcccactatagtggccagccccacccagcctgctctcaaacatgctgtcaaacaattgttaattctggcctttttgtcagaaatgaccaatcttaagtctgtcacattcagggatcctttcagagcctaatgacagttatgtggaattctagaagcaaatatttgtcaaaagatttcacagacatacacgctattcactatcaaatgcattgcctgaacgacatttacgtacacatataatccacataactttcatccatttgcctgtaggagaatcttccagggccccagagcagtgcttgaggacttattacagatcctttgacatctctactaggctgcactttcacaaaaggcaagagtattataaagtgttttgtaactttatgtcaaaaatatgaacctgtcagagccagatgtggtggtacctatcattcaaactacaacagggctggtgaggcgtgaggatcgcttaagcccagcttgttatgattatgcatgtgaatagccaccgtagtccatcttgagcagcgtagcgaaacacagtctcttaaaaaaaattgcgacctatacatttcatataagttaaatacacatcttccctatgagccagcaatcccacatctaggtatttatccagagaaataaaagcatatatcgataaaaagacatgtacaaaaatgtccgtaacaactttattcatggtcaccaaaaactataaactgcccagatgtccatcagtgggagaacggattaataaactgatatattcatctaattaaatactactcagcaacacaagagaaaaagcatggatgaatctcaaaaagttaggatgttttatgctttctggatacggggccctcgaatcgctacctggtaacaggctccctatgtgattcctgtacagacagcctggcaccatgcaaatgtatcagaactacacataccatccaacttcaacttcttgtttttagagatgaagcaactgactctgagagttctgaagtcgttgctaaaatttacaatatttgtttccttactcccagttcctaaaccattcaaccacaagcaaattgtctttggtctacctattggactctgtg

SEQ ID NO: 116776 - DNA, 1037 bp, Homo sapiens
tcaaacctttatgaatttgggcaaaagaaggaagttaggtatgggagatgcaggccacagagtaccttcagggattattttcttcatggtgatagggtgaaatctgtccttatcttcctaaagagactcataaaactctggatgtaatgagttctatattgagaaataaaccaaaaattgaaatttagaatttttagtgctgtactccagtgatctaaagaaaataatgagttgcatatttgcaattactgtaatgtgacttagctacactattgtaatctgcacacagatttaagacataaaatccctgtgctccctggtggcctcaggggtgacatcacttgttatgaaattgagagggagtagttcaaataatgtaatggaaaaatcccaaatgcaaatgcagttggttatgaatccaggaagatcactgtgtttatacccagaagactgactacatctcgtaggaatcaggagagtcttttgctgttaccacaaaactgtctgttcacaatcctgttcctcctactcatggagccagattttagaggttaggaaccagaccttagtgtaagggcccacagccactgcttttttggcagaatgggaagtagggagtctaggaacaaggggtaaaactctactccttttctctaataatctctccttactctcagaatgagagaatttgtgcaagtgtccaagaagtgttcacagtaggcctgtgaaataggcacatgtactggggtcacacagcacagtaaaacaagctctgctctggcatcaaactccctggactgggtttgaacccctgaccattactagattcatgaccctgggaaagttctttaatctccctgagtctgtttcctcatatgctacagtgggaatcaaaatatctaccttgcaaaaattattgtgaaaattgaagataaataattattttaatgttttccacagggtagaaattcataaccgataatagttaacttataattattactagtattatcttctccttaccctctcctatcact

SEQ ID NO: 116777 - DNA, 1001 bp, Homo sapiens
aaattagctattgttttaagccactaattttggggagagtttattacatagtagttggtaaccagaccatccaagcttattgctgtccttcctagtcacctctcttgtcactagcatccattttttccccttcttctctccaagacagcctcatagcatctccaataccaattttacccaaatgacatttattatgataatggtggttcaaggaaccatatagaaatttaattgtcagacaatttgcttaatagcctaaatgtgaactgtaatctttatgtttggatatcttcaagatctgggtctgtcctctacttagtgagacaatgtattccctcagaaataaatttttgtaaagccctaatcaacattatcattacttattctgatagaagtatcagtattagtaaaccctaaacagcctcagggcttaaacttcttttccatttagaaatgtcaggacttataaaacacaactttgattaaagcaaagaaataagtttgatattcaatgatgtaattagtgtccaaaagcttagggggaaaaacagcatttttaaaacaaagcagaatgaagatttgatttctatgcttctctgagagatttagagaggtgagaaaggaagagatgaagaggttgcaatatgtttgcatagtcatgccattttgatttttcctccaatattttagaaccattttcaatcaaagtgtttcccccactactggacttcacccatgtgaaatagtagacaaatctgaggtatcaggaccccctaccattggatatcaactgtagcagacccaagacccccttactttcctgaaatgaaattcacaggtgacatctatacaaataatatgagctaaatatatagtgccctaattttaatgtaaaaaggaaataaactaaaagtaatttataatcaaatatttcagtaagtaagaagttgggctcaataatactacaagagtaatgaacaactgggtgcctgcacatacac

SEQ ID NO: 116778 - DNA, 1021 bp, Homo sapiens
attgccatatggccttgtgacttgatgtgaccaatgaaatgggagtgaaaatgttgtgtctttaagagtcagggcatgaactcttatgtccatttttgtgtgtgtgtgtgccttggtgagtggtagacagactttcagatggcccccaataatccttgccacctggaattcacatccatgtgcaatcccctacccttgagtgtgggctgatttgatgacctgcaacaaatcactagaatatggcaaaggtgatgggaggccacttccattattgtattacataaaactataaactctatcttgctagcacattctcttcctgcaaggaactgaaatctatcaacaaccacataagcttggaagcaaatccttccccagaaaaaccttcaggtgagactcccaaccctgactaacaccttgatagcagccttgtgagagatcttgaagccaaggacccaattcaagccatgcctggattcctgacccataaaacctgtgagaaaataagcaggtggtttttttcttaaattgctaagttggtgataatatgatacagagcaatagaaaacaaattggcaattgtggcaacacagatatggagcctcctttaagctaggttccagctgacccaatggacatgtggtgtggttgcaaaatgaagctttagtatttaaagcaactatgattttggagttgttactaaagcatactttagcttatcttgactgaattataaggcagttttttgctctccctgccaggctaccacattattgaacaaagaaaaaacccagctatgatagtcaccttgagttatgcagacaacagaattttgcatggatccaaaacttagtttaaaaatcttacctcctcccaaattaatattcagctataataacctctgtgcctttctcagcactgattttaaaatatgacctcatcaaagttaagacctattcaaatctcatctttgaaatgcaaatgatgctaatattatgccaaatttcagagtaattgcctc

SEQ ID NO: 116779 - DNA, 1094 bp, Homo sapiens
aaaaatttagctgggtgtggtggcgggtgcctgtagtcccagctactcaggaggctgaggcaggagaatggtgtgaacctgggaggcggagcttgcagtgagccgagattgggccactgcattccagcctgggcgacaaagcgagactccgtctcaaaaaaaaaagattaccttcttttgttgatataatgcagttcccttaataaattatgctttagaaaaatgttttcagctctaatttttatgttatattattttaacaggtccttatattcagccactccctttgcctttattgccaatttacaaaggacatcacctccctctcaaccagaagtggggctttctcaaaactgacacctctggtttgtttgtatttttaagagatgggggtctcttttttttttttttacaactggtaatcaatttattgaaatagttgacttaagcatctgcaatggtgacttccacctcaactcctggctcaatactgatggaagtaatctgcttaacaatctcagaaggactgtgcaagtcaataagtcgcttgtgaattctcatttggaaacgatcccatgtcttagaaccttcaccacaaggagttttttttgtagtgattctcaaagtcttggtaggcattcgaactcgtcctttcactttgagattcttctcctttgcgcttctaatcaagtcagcacacaccttttctagggattttacactgcggctcttagggtgattcgaattcggtgaattgccacctccggctccacgggtgtttttccagtatccttaaaagccatggttactgcgtggcttcctgaccgacttgttcctcggcgagagcgaacggcggtgagtcaggagcaggagtgtgcggaccagagatccacagcacctacgaccacgtccttcctttttcaaaaagcgggggtctctgaaaggttcagcccaggctgaacttgaactcctgggtaagcaatccttctgcctccatctcctatgagctgagactacaggtgcaagcgactgcacccagctattctgatttaacacatttcccagccccttacttttgattaattagtagccag

SEQ ID NO: 116780 - DNA, 1022 bp, Homo sapiens
cttcttcattctctctttgcctgctgtcatccatgtaagataggacctgctcctccttgccttccaccatgattgtgaggcttccccagccacgtggaactgtaagtccaataaaatatttttcttttgtaaattatccagtcttgggtatgtctttatcaacagcatgaaaaaggactaatacagcatgataaggattatgatatctcactttaaattcttctctattgtgtgtgtgtgttttaatacagagaatatgttggcaatttagttataaaaattgataataaaaatatttaaagaagagcacttctctcaacaggctatatttcaaatttagttaagctctagatatagatacagaaaaaaatccacactactttgcaaattaattaatactcaagtgagtaaaattaagaaaggatgttattaatagtttctatgtcattactgggaagttaaataattgccaaggagttctcctggagtctgcatattcctattgtgaaaaaaatgctaaaaaatgagcaaggggcatcctgcaagacttcatgggctctgatagtcagagatgagaaaggaagaaaaggaaacacaaatatttgtgaatgatggagaaaatgaattgttcattgaactacagataagaggacatctatactttagtcatgctgtccaaatgcatttatttttcatattgatttgagaacctatcccttgggtgattgtgactccacttaagggagcttaacaccaattcccaaagccatgagtgtgacagcagttcagcagagtcacaagaaatgcgtatttgaaatggcaagcagcaggtggctgagtccttctctattactttttaaaatcagtatgcatgtggtcctgatcaaacaaatcttagactcaaaatcagcccctatttatttattgaggaccagctatgtgctgggccctgggctggatgctttcacatattacatacctcattaattccacaatgttaaaaataaatgtgctttctgcta

SEQ ID NO: 116781 - DNA, 1034 bp, Homo sapiens
gagaaagagaaaggataaattcactttttatttcatataatttcctcttttaagtgttgtttgccatgtccataaagttcataatacagtatttatataatattattaaagcttgtgcttatctcattctatttttttttttttttttacacagagtcttcctctgtcacccaggctggagtgcagtggcaggatcgagtctcaccgcaacctctgcctcccgggttcaagcaattctcctgcctcagcctcctgaagtagctgggattacaagcgtgtgccaccacgcccagctaatttttgtatttttagtagaaacggggtcatgtcggtcaggctgctctcaaactcctgacctcgtgatccaccaacctcagcctcccaaagtgctgcgattacaggtgtgagccaccgcgcctgacccattctacttcttttagaatatctgaaatcaggccatttcccaaatgttgatgatactttcctgcagactggcaactaatattgactcaattcattctgacctctttattcccatgttagtcattgatctgtacactcttcaccctcacctagatgtctgcaacttcctacttgaatctaccaccttcattctttctctttttctacttctccctgtttgggccattgtacctccttcacgaaactccttaacaacttctgatggttctatagatcaagttcaaagtctcaattttatggtgtatgactgtagccagaatacctactgtgtggagtcagacctgagttttgatacctacctctgtgtcttgaataatattacagcacagcagaaaagtagcatcacaaagtaacaagaatcacagactctgaagctagatccactagttaaatcccagctctatcacctattgcttgtgtgacttaacctatccacatgcttcagttttcccacctctaaaatgagggtgataacattaccttgactcatagagttgttgtaaggagtatctgaagtaaagtgtgtaaaacttttggagtggagcctggca

SEQ ID NO: 116782 - DNA, 1044 bp, Homo sapiens
cgtattcaccaaccacatctttctacattttgattccctttgtataaatggagaaattctaaggttcttgggaaaggtattcagtcatgaagcagtctccaaagttgtattttggccttacctaaccaaattttcattcatttcattcttattgacattacatatactataacatttgatgttcacagaaaattaacttctattttaagaagtttactcacagaaccacagtttgtgcatttaacaatcactatgaaatacatatgaaacattaaccatcattttagagaacaatttaaaaactccgaagtaactactttccttaactttgtcatcccaacattctgggtataggcattgttggaaaaatataattaaaaaccaaaatctcccaacccagaaatcctctccacaaacgttagtagacaaaacacttttattactgaataagcattaaacgagactgtgatacacatcacaggcaatttgctaagagattgcaaagacagaaatcttgcccttttgtatagccaagtatatacgacccattacatacacgttttcaagttgaacaataactagtcctcaagtaagaggacctgacatttgtgacattaactttacttaataattggggtgaccatctgtgttagttaattggttttatccagaggaaaaacaaacttctcctgtctttatgacggaaggtagttttgcaacacggagcaagttgctcaccgaagttacgctcctactctctcacagaaactgggagatagggaaggatgctactccgttgatatgtgcagcatttcaaaaaaaaaaaaaaaaaaaaggtccagagacattcctgactgagcatacagttgacaagacctatctagtcctcaagtggatttatacacatttcaaagagttgagaaagtacttaacaattaagaaagtacttaagttttctaagacaaatgctcggagagaaagggacgggaaatctcatcctccattttcaatagggagaattaagcctcttatttaaaattttta

SEQ ID NO: 116783 - DNA, 1017 bp, Homo sapiens
aagttgcgtatattaatggttgtctcactatcactttgacataaactgctgtaaaggtgtactccattttccttttctccagatatgttaagataataaatttctcagatgaggttaccatatataaaagtgtagtggaacatcaataagagaatagatcaaaactattttagtgattaaagattagaaaatacttttcaattcatatgtggaatgagaataggataaaaaaaaaaaactattgcaaaatctttagtgcagtatttgtagtcctggtatatatacctgtgttgcccttaagaagacatttgtgagtagctccaggtttgtcagtcgggaaagcagagtgtatctttttgtagtccaggaaagcttttctgctagtacttttgagccaagagaattatgcttccaaagatgctgggaatatattaagagagtacataggcatacttctgttttcatctttgaaagacctttagtgaagatctgtttctcttctgcattgattgttgacagcattaaatatacataatctaaaactatgtagtgtcaagttgttgcagcttctgcactgcttcaaaggttgatgtctttagttcagaagaaataattcaagctttggtagacaaatcatttacatttcatcttcgatgtagatgttactgtaactctggaccgtgaacatttcaaatttgccagttttttctcaactattttactatgaaaaatttcaaacaatgcagaagagtcgagttgaacccaccacctatatatttagcaataacgatttcaagaccactgttacacagtaaacattaaggaatagaggaactgaaatgatcaagcttaaaaaaccagcgtatgtggccgggcgcggtggctcatgcctgtaatcccagcactttgggaggccgaggcgggcggatcacctgaggtcgggagttcgagaccagcctgaccaaaatggagaaacatggtctctaataaaaatacaaaattagccgggcatggtgg

SEQ ID NO: 116784 - DNA, 1076 bp, Homo sapiens
gtaagtataaatattttagtttaccatataaaactgctgtatggctgacaaaatatgaggccatattttttctttggaattcaaagtatctaggtaaaacaaagttttcttggttcttttcaagaaatagttcagatttcttcatttttggaggatattacataattcagctttaaaaatttaatgtcatgcatgtttggaattattttaaaaatattcatatcagacaattactaatttttattcatcatcaccattcattataaacttgatattgtcactttttttagtaggtattaaaagactggacattttatgtaggttttccttgctaggtttcaaagtgtagtgaaaagaggagccatttattttagagtcagataatcgggttttagttccagtttctgttctgtgggatcttggacaagttattttatctctttaagtcataattttctcatctattcaatagggatagtaaaattgcttcactagcttgttacatagaagaaatgagacaatgtaggtaagatttaggaagtattaaactgactttaggaagtattcagcttctgtattcagttctttatgtgataacattgattttatctctccttgtattaatgtgtttattataccatccacaaagtccttgtttcagacataagaaattaaaatataattaaatttacttaaatttaaatttacaataaatttacttaagttgaatgacatttgcatttatacaaataaatagttagaaatatctcagattagctgttctttttataaatcttagcttattgtatctcagcagggataattataaatttactttaaatgatttttaactccaaaatatctccagtttgtctggattcctgatttatttttctttttgcctagatgatcatgtgtttttggatggttgccctaaattcctttcatttaaaccacaggtattagctacacgttactgtcttaaatctctaactagtgcccccgcaaacacattttctcaatctgtttaaaatttaaacttcatttttaaatttaataatacccttatttgtata

SEQ ID NO: 116785 - DNA, 1040 bp, Homo sapiens
caaagtgctgacattactggcatgagccacctcatctggccatcattaaaattttatatttaaaaataattttgtcatgaattttatcgttttatataacaactcttgttgatgccttactttacaccaaagtgtacaaatcagaggaaaccataattcattttggaatttcattcatttggtagtcacttgtttgatggctactgtgttccaggtactatgcaagtggctgactgtgttaagatagaaattcttgtctcatttatgtcacagttttatggaagaagagaaatgtattaacactttaattacatatagattagatttccaaccaattctagctttaggagctttgctatatctagaagggaataaaatgttttcctaagggcgaaggcaccctttggaaatggttaaaagattagaaaagtagacttggagaatatgcctgacatactgtgtttgatctgtttgctgaccagaaggagaggaataatcttgttggtaacatttatggaatgtcatctgattgatgtgaaagtcaaggcagtagaggaaatgatgggagacagagtaggcaaacaaaaaagaagaacttggaagaaggggagagtttatgataaaccaggaagttgggattaaaaatagtatggcacaggcaaaaagtgagacgttgtaacagggctgtaaactacatatattgacctcagtgataaaggagagagtgaccaagaaaacctctcagaagagttcacagttttcaaggactgaagggagaacagccaattcaaggatcatactttggcatactgaagcctatgaggcagaggccaggcgcagtgacccatgcctgtaatcccagcattttgggaggccgagatgggtggtggatcacctgaggtcaggaattcgagaccagcctgaccaacatggtgaaaccctgtctgtactaaaaatgcaagaatcagctgggcgtggtggtgcatgcctgtaatcccagatactcaggagcctgaggcatgagaatcacttgaacccag

SEQ ID NO: 116786 - DNA, 1061 bp, Homo sapiens
gtgttgggattacaggtgtgagccactgtgcctggtgtgtttcaaacttgaagttagttttatgatgtaaacgtggagaaaaacatgaattacctcttgaaaactgagggaataggttggaggagaaggtaacaatacattactgtttcggaaagttagagaaagataggggagggagtaagcaatggatagataagttaggtaagtgtagcattcttatttttaacgtagcaattgtcataagctgtcacagttaatttccaggaatagccaagtatactgaaagtgtacatttttatctctttctctgtagtgaacagttctgactccttgaatttcttcttgcagctcatgttttttggctagacctatgaccattttcgctagacttcactgcacgttttctcaagtatcttctttgtccctaatgtgtgacacctcatcatggacacgctactttagctaaggcatgaccagcaatgaacagtagtaaggtaggattactttattcttcttagtaagttactaaaccgttttttattttgggtctctgaaattgtgacttgtcttgattttgtagtattctttatgttagattattctactgtctatgtaggctgttactgttttatatttgtgtttatttattttttgcttgtcatctatcccaatgattttacctcatttgtgacataattatttttctcaactaacacttataattagcagaatcccaatctgtatctcttcctcaatctgtgtgcccaccagtcctatattttcaaccatttggcaccaaactgaacatatcatatttttcttctcaaatacttgcactttgttctgatttctgtatttccattaatagcattattaatctcattgtctaatataatcatatattcattgattcattaattcatttgaggtacattgatattcttctaagtgtcatacagtgtgctgcctctgaggatgtaatgatgaatacactggatgttccatccttatttctatccttatattctgggggaggggataggttaaaaataaattgacaa

SEQ ID NO: 116787 - DNA, 1019 bp, Homo sapiens
cagcaaccctatcactgtctcctgtagctgggacaagctggtcaaggtatggaatctggctaactgcaagctgaagaccaaccacattggccacacaggttatctgaacactgtgactatgtctccaaatggatccctctgtgcatctggaggcaaggatggccaggccatgctgtgggatctcaacgaaggcaaacacctttatatgccagatggtgggggcattatcaacaccctgtgcttcagccccaactgctactggctctgtgctgccatgggccccagcatcaagatctgggacttaggggtaaatatcatcgtagatgaactgaagcaagaagttattagtactggcagcaaggcagaaccaccccagtgtacctccctggcctggtctgttggtggtcatttgtttgctggctacacagacaacctggtgtgagtgtggcaggtgacatgggcacctgctagaagtttatggcagagctttagaaattaagaaacgaacaaactggaaaaaaaaaagtggggagtctcaggccttatggtgaaggagagtgtttcccctggctgtttgtttttgttgaggttcctagttaatctctcttgctggtggtgtctggcttccttgatatttgtcagagggacatctattctattctgggaggaattagcctgcatgggctgccttctgcccctaggctgtggctgggaaaaaccaggtctgtgtggccttcttcacttgggtgaggtaggcgtaagtcatcctgcctctgtgctgttcttcttgttgtagggttacaaaggagtttgccttcttctttccaccttccagagttcttcgtttgtctcttgcagtatttgtttatatttgtgcttagtggggattaactggaaaaaatggtctgtgccatcttgtctggaccacaagctgggttttccttctaatttcagtttctgtggcatgtgagtgtgcaggtaaacaagtggagagatactcagcaacaccctgagtttgg

SEQ ID NO: 116788 - DNA, 1090 bp, Homo sapiens
gtacagtgataaatactatcttcaaatgatgcaaggtacttaaaaggaagtattgccttaccttttaaacatgaagtgaattgaaatattggtgatgttacatataccacataggaataaaaagtaatgaaaaatgctttttgatgaatcagtctgattatttagtagtcacataatacatatataatgtaacttgagcctgtacaactagggtttcaactatatatatttttaaagcagtaatttttaagcctggctatagagccacttctgctataccaccggatttgaaaacattgaaatcttggttgaaatcatttcaacatttaaaaacttggttaatgagaggatcacctgaggccacaaattgaagacgagtctgggtaacatagcaagaccctgtcttaactaagtaactaactaactacaccaccgcccccccaaacacacacacaccacacatatatacacacatgctttaatctatcaaaaaaaaaaccatgagtttgttcccacacaattgacatattaggaacgatttgagcttaacgttaattttgcatttgtttatgtctgaaacctgaagaagcactaggtgaatgcagaaaactataactagcttaaccatgctgcgtaggaatacatagtagacacacacttcagtcctttactggctaccttcatttacctttttgttgtgagccacactcatccacatgtggcatttcaactttctgtcaaattttgaataactctcccctttacagaattcgcaagttgcaacctttctgaagtcgactttgacaagcaagcttcaggtcttttcaaaatgaagtgccatgttaatatagtagtcatgtgcttcttaacgtttaatatgtgtaaaactatgcaaagttttttctgttaggtttctgtttttaaaaaaatgtgtccctgattagtttcttgagtattatgcctttaaccccatttgtccataagccctgtggtttttattctgtaatttttgtacaatctcatggttattaggcacaaaaatattttgttacagtagagcttatacattagaattagttgtggagcttta

SEQ ID NO: 116789 - DNA, 1107 bp, Homo sapiens
gcaggatcagatgccacagagagatgcaggttaagatgtggatgggacaatgtctgttgcatttgaccattaggaactgaagaccatagtgggacattagaatcatgtggcagagcagtatttcagtgtgctggaaaacaaatgagaagtgaacaaatgaagactgcaagtgtggactcttaaagagtcccgtaatctttttcttagttttctgtgttgtctgtgattatagaattttgaagcatgtgtagttgaagttgaagacgttaaatatgaaccattcatagatctttgaacagttgccagaaacctattttttatattaatgtaataatttacataaaactaaatatttaaagttttgaactcttaaagcacagctaaatggaaacctttaatgcaaatgtttgtttcttttttttttttttttaagtcttggctacttatgattcagcagacagaacaacttagtaggataatgaagacacatgcagaggacttgaactctggacctttacacaggctcaccatgatgattaaggacaagcagcaggtgaagaaaagttacataggtgttcatcagcagatagaggcagagatgatcaaggttcgtttttccatattgaagttctttcttgaaattgttttccaaattcacagaaatattttaccttatttggctttaaaaattgtttattcatcatttcccaacaagaaataggtttatggtctctaataagtaatatcttattgaacataaaacattgattataggatatactgtgactgtatatactcctatgaaagaaaaaagaggctcccaattaaactatgacacaaagctttcttatcacttaggatttttagtttttatttactgaaatagttctttgagacttttaaaaataaatttgtcttatctaatactttgcataaataaaaaagaaaatacaggcagaattacttttggtattcttaaatttacgtatccctcattttccctacattcggagtctgtctcttctgaatgacttttttcaaattatttttattatagaaatttgtaaatgtataaaacaagagaggatagtaaaatcaacttccacc

SEQ ID NO: 116790 - DNA, 1087 bp, Homo sapiens
tgagtcaagtttcagccaggctggagtgcagtggtgtgatcttggctcattgcaacctctgcctcccaggttcaagcgattcttgtgcctcatcctcccgagtagctgggattataggcatgcgccaccatagcctggctccttttttggtatttttggtagagacagggttttgctgtgttggccaggctggtcatgaattactgaccccaagtgatctgcttgttttagcctcccaaagtgctggttacaggcgtgagccaccgtgcctggcctgatttgctattctcttaaaaaagtttatttgttttcacatgctattgaatttagtactgatttttaaaacatacttgtagtttattttctatagttgtatattaaaggacaactctgacctgtaagtagtgaaatacacatcagttaatactttggaatttaagttcttgagcaatttaaatttaaacaatttaatacatttatgcattttgtttctttgacaggttaccaaaacagaattggagaagttaaaatgcagctatagacaattaataaaagaaatgaattctgccaaagagaaatataaagaagctttagctaaaggtaaggcaaaattttaaaaattgtttacttaggtgatttttattcttactgtttgaaagttatctttgtaagtagtggaatgattccatttagagcatttcacatataaaaaactcaaaataaacccacattggctaattgtcaaacagtgtagtaagtcttactaattttccattgctttaaatgactcaaagtattttcgaatagttcatactaaatggaattatgtagcatgtgtaatagaattgaagggatgtttaaaattttctctcttgcatcatatttacttatttaattacagagtgcttaagtaagaaaaataggagtatatttatttagaaacttttaaaatcttcttttttacctgtattatttaagtcattaaaaccacatcattttatagcattatgttctctttatagcttaattttatgtgtctatattgccctaaaattttcataagaagtcttaaaaataaatggaaaga

SEQ ID NO: 116791 - DNA, 1964 bp, Homo sapiens
aaaattcagggaattaattaggaataatagttaatataacaaaataaaatttttaaataagaggcaaaatatggaattcagtgaattgattataccttttgaactgacagtaaaaagtaacatcttagaacacagtactcaaatacacttgcatggtaactgcctgttttgttttcttattatgaacatgtggactgtggaaagtgtctttattacttggaattaacttatctggttaattgtacctgaccttttgaactgttgtcagaattaatttgttcaatttcaagtagttaacagaaacttaaactagcttaaaaatggtgagtaaaaaaaaaaaccagactaaaaaccaaaaaccttgaaatgggcctcagaaaaggcagcttctgtagcaggagttagtgaacttttactcttattcaggaattaatatgacttagcttctagccaaaatattggttcctatattgtcaggtatgtaccttagatcttggatgtcagctccatgtaggagcctcctcctaacttgtgtgggtggggacaaaaaggggtgatcacttttagatggaaggctgtgggctggccatagatatgtcagttgcactgacctttttttttgtttgtttgacagagtctagctctgttgcccaggctggagtgaagaggcttgatcttggttcactgcaacctccgcctcctgggttaaagtgattctcctgcctcagcctcccgattggctgggaccacaggcatgcaccaccacacctggctacttgttttgtattttagtagagatggggtttcactgtgttggccaggctggcctcgaactcctgacctcaagtaatccgcccgcctcggcctctgaaagtgttgggattacacgtgagctgctgcacccaggcaattgcattgacttttggggacttttaatgaaatatattctgtaagaagaatgctaagtagtaatattcatggataaaaatgctattgtattattctatgaaaaattattagtaactgatcatgtgggaggatatgttccttagaacattaaaaatcattcatggttagtattactgaagttattttattaattgctaagttaaaaaattgtgccaagtgtcatgcagagtgagataaatcttctctagggatttattttaactgaggcaaaaaatttactgatttctgataaacattaaaaaaattcaaatagattagaatttttgaaaaaatcactgggcatacctcatagtaaggagaataatcattttatattacatttatataaacacatatttgattatttactggttcatgacataaaatatattatcttgtgggtggtagtcaaaaagtttgaaaagtattactttagtgattcaagtttttttctttctttctgattttcttcaggtgagaactaaattaatgtacttgcttccctcctgccactctagttttagaacatgtttctcttcagcagtgacaggggttagagatactcaggtgaaaagattattttcttattaagaagttctttatgttataaagtgaaatagattatctgggtaacattttgttaaaaacttggacagttattaatatcctcatgtgcaagagccagtgaatggacaatgggtacagaattaaactctttaaaaaaattatgtgttgctccatagaagtcagtggtgattctagtatttgtgaactctagaatttattgatagtagagacatacaagtctgccagaaggtttgtttctgtttatacgatgtggatgtagttcctgagcatcagaattggagggatgatgagaaagcaagggaattctatttctcattctgttgttcttcctaggaatggtctgaggtctgaaattgtccctctttgcaaaaaccctcaccttttctctgctctttgctctggggtactgagattcttaaatgaggaat

SEQ ID NO: 116792 - DNA, 1064 bp, Homo sapiens
ggatatctcaattgaagaatggtaattctttatgtggaaaagtgattgtcttggatcttgtagggcatgagtcagcaaactatagcccatgaggcaaatccagctagttgcccatttttatgcagcccacgaggctaagaatgctgtttgcattttaaatggttggaaaaaaatcaaaggaagaattatattttgtgacacacaaaaattatgtgatgtttaaatatcagagtacgtaaataaagttttattggaacacagccatgctcattcacttacctgctatctgtgggtgatttcacactacagtggcagagccaagcagttgtgacagagaccatatgtggcacactcattacttcacacatctgcttggcactatacaaatcacagtgacacagttataactcaacagcattttgagtgccacacatatcagtatactgtggcatcttatttttattatcagttcatgcctatagtgtcaaaagaagaagagaaaatagatttcaaatgtggcacttttaaggcatagcagaatgtggattattttgttattgaattagatgaagaaacattgtgtttattatgcaattgcaccatgcctgctaagcactgaatatacttaattaaaatcttatggtcatggattgctattggtatttggcagtactagtctatgtactgtacaaatgtgaaagacttaaaattttattaaatatctgcattaataggtgaacatttatagttgattttgattataaacactaactttgaactgcagtgataggaagtattatggccatcaaaaaattttcattcttctcattaagagacttgcattacgataacatgtgcccagttattactgtattttgaatttgccaacaaaatatttgtgaatctttgttttctcttttgttatataaatacctatgtaccatgcttgattttgcttcttggtggcaaagtctaaaatatttgctttctgtgcttttatcagaaaatggttgctgactcctgttacagaggatgataccaatttaacccatccaactatctga

SEQ ID NO: 116793 - DNA, 1037 bp, Homo sapiens
ggaaagtaacatttcttgagtttttactttgtgtcacatattatgctgggtatttatatatatatattataacatataaacatatatattatatataacatacataaacatatatgtaacatacataaatgtacatatatatatatgttaactcattgaatgttatctttctgtgccttttgtatagtagcctgtgttttaccttcaggtctttgagactttacataacttacttacaatcacatacatagtaaatggtagaaaagacatgagttgttgactccatagcttctgtctttttgatcatattatttgcttgatcttatgattttaacagcattctttagagaataagttagcaggggtaagtatgccaagcttttcaggggatgagacctgtttaacccaactcttgttaacctttgttaccatggagttattattgttagagtcaaggtataatcttgaaaatgttaagtatatttatatgactaaagagttactgctaaatttcattaaatgcagacattggtagggttaagtttgcctttgaattatatgttaacatattttgctaaacacatagtctgaaagggattccagggcaaatgtttgcattttaatttcttaatatttcttgaatatttccttttattgtgtacatgtgtatataactacacatgtatgtttaaatatgcatatataattaaaatcaatttttatctggttttaataataaacttacattatctttacttctcaacactttgttagtttcatgtactgtgttacttgtgagactacatttcttcctaaatgtcaaaaatagtctatgttagatatttgcattcttaaattatttttaaattaatggaattatattgaatgtttacttaatagaaataacagtatttgttgtatcaaaatatgagactaaaaccacatttttataatttgaatttaatatatccatgtctctaaaatatctaatgacagtgaaaaaataaattatatgataaatcatttgatggctttga

SEQ ID NO: 116794 - DNA, 1065 bp, Homo sapiens
acaagacaaaaggcaactgtgtggggcaagcaaaaggaaaggaaaaaaaggccttatggtcataagagcttgatcttggatggttctaagagcataaaaatcaatgaatagtcgtcttttaaagaaagtgttcctacttacagtggaggactccatgaacagatatttaaataacacataaaactggtagggggctgtattagtctgttttcacactgctaataaagacatacccaagactgggtaaattataaaggaaagaggtttttttttttttttttcccctgcatcataaattttattcctgatgtgggacagattccttccatctccaaatgaatcacatgctgcccctgaaagacctaggaaactcttccaccatctccagggaagtagcaacaaaggcaggtgctggggactggaaggctttgaagttttccatcctactttttctcaccttctcaacagaggatagctgttctctattattcctctcatccactcatcccttaaaaaaccccacaaaacgatcattagtaaacaaacaaacaaaacctcttcaagtattgggcattaggggttcaggttgggacttgggggtcaccaatgaaagaggaaggggaagaggaggaggagccatcactgtttctgctgcaagggttccttccttgctgcatcctgtagcaactgtttgtggacctcgtctgctggcaactgcatgtatcggaccactgagccctgaatgaagcagttcttcactgataacatgtgaggatatttctcagagtctatgacactgatattagttagtttgatgttgagataccgatccacagaatggagggttccacagatgctcaggtcattcttgagttccacgaccacatgcttgccctcaagggacttgaaaaaataatagaagagcgtggtgctggtcctgcgggctggaccagaaagaggacaggggaaaggaaagaggtttaattgactcacagttccacatgcctggggaggcctcacaatcatggtggaaggtgcaggggaagcaagacacgtcttacatgg

SEQ ID NO: 116795 - DNA, 1053 bp, Homo sapiens
ggtagggtcttattcttaagagagaagtaagcaataagaagaaagctatttattgatttttttcttcttaagtagaatcttatttatctgagattgctggtgtatttattgcttttaaaatacaaaatattgatttagtttaagaattttttttctgctcataaatgtgacccttagactacaataaatacattcaaattcaccaacttgaaattcaactttatttcatagttttattaactgtttaagaatgcctagtataaagtctttcttcttctctcctttcctttccactcctctcctttcttctcttctttgctcccctctctcctcttcctttctgtcctctcctttcctttccttcctctttctctctcctttctccttcttccttcctttccctcccttcccctccccttcctcccttcccttcccttccctcccttcccctcccctcccctcccttcccctcccctttccttccttccttccttcctttctttttctttttctttcctttctctcttcctctttcttttctctctcttcctctttctttctttatctttcctttttctattatctacctattgatctatctatctatgtatgttggtggttctcaccccctgccacacacatacctgggacatttggtagtatcaccagacactgtgattgtcataaccagatctagtgggtagagattggtgatgctggtaaacctcttagaatgcacagaacagcccctcccttcacactcccagcacaaaattatccaggctaaaatgtcaaaagtgccaaggttaaaaaagtctgagctacatccttggcatttcctgtgggtaacttacagaactattatagttatgctatagctgatattttagtactttttactttatgttgttctaaatagtatgatttgattaagtgggttcatatgtctccatagcaaaaaaaaaaaaaaaagaccgtatctgagaatacggtaaatgtagtaatgaatatgaagtatttaaacaattgtggttattactattactattaaat

SEQ ID NO: 116796 - DNA, 1049 bp, Homo sapiens
gaccaacacacaacatagatttttcttctctgcacatgttacttagttttgcttaattgagcagcagtatcagtaaaatcctattttgttacattttcaaccaacaacacatttaatttgttggctaaaaattgtcaggccaggcctggtggtttgcgcctgtaatcctagcactttgggaggctgaggcccgtggatcacttgaggtcaggagttcgagaccagcctgaccaacatggcaaaaccctgtctctactaaaaatacaaagattagccagacatggttaagatcccttaacctttctgagttttcttttccgtagagggaggaaatgaatatatacctcttttgccttacaggatttctgtgacactgaaatgagataatgtgtataaacatattttgtatattataaaatcctgtagaaaaatatcagcttctatttcagtttttctaaaaaatgtaccttagtttacaggtaaattaattgatattcactgagttcttaagtatgaattgtagattttctgtaagattattttacatatttcttattcataaaggaaaaaccttaatttctttggataggtagtacatgcacatttacatgggtctaagtgtcctttcttagtgtcccagttctcttccttagaggtaatcttccagaagtgttgtatgcaaataaaaacacaagtgtaaatgatatgcctgctgttctttttacacaagtgttacagcatacaacagtagtgttctgtatcttgcttttttacttaatgcatcttaggtatcattttataatagtgaatgtacagttacttcagttttttttcatttatccattcaaaaagcaaatatttattgaatgtcaggtgtcaggtatcattttaggttttggggatacagtagtgaacaaaatagaatttgttttcactgttatgggccttttactctaattggaggggacagtgaataaacaaacaaataaatacatagtatgtcacatggtggtaaattcttttgaaaaaaagcaagattgggggcaata

SEQ ID NO: 116797 - DNA, 1027 bp, Homo sapiens
ccacaaaggacttttttttttttggcaaggggataaattactctgtcctaattaaaatttaattttgatgggaactcttttctctcccccagttttttgttgctaaggccattaaggaagaattaagaaagagggaaaaggagatatgtgtcaggagaaaggtagcaaaagaaacaggtgagggaaggaagaagatcagtaaagaaaggtgaggaagatgaaaggtaaagaacagaagagaaagaaaatacaggaatgagaggcagataaaaggacaaacaaaaagggagtaggaaaaaggagatgaagaagagggtctgaggtaagaaaagcttttcattccctcttctttcacttttcccatactcccctgcttgacacagggtactatgatatgacccacttccctcttctctcctgctttactctccaggtttccatttttattgactactgacttgtgaacttttcctctgtttcttttttaaactggagctgtacaaggtaagaattcatagacaaaaggcattgattatatttgcattctcaaattaaaaatatttggaatttaaaataaaaatatttattgaaccaatcttacctaaaggtgtcaaaactcttcctttatagtttaataaaatctaacatatggatccaatttgtggttcagatacttaggaaaattcattattatacttgattcaagttttacatcaacagcctagtataaaatttttagaaaatttgtttatctgtacttacttgattcattccaaattgttgattcccaaagtttttattgggaggtatttaataagataaaatgaaatgggaaatttagatgtttaccttaataatttgggtacccccccgaccccctgccaaacagaaatctgaaatgtaattaattgtagcattggatcgggaggggcctggatgagtatagacttgcgttatatatatagttacttcaattatctattaattatgttgtgggtatttagatatagcttatgttcacagtatt

SEQ ID NO: 116798 - DNA, 2130 bp, Homo sapiens
ctggttaaaagtggcaagtcatagaaacctcatagaattgtcttaaaagttacgtgaaataatgcttgcaaaaatgtttagtacagtgcctggtatatagctaagttcaataaatggtagctataaagaagtagagtttttagtattttcatttcagagactacagtccccttattatagatattttagttctttttagttatgtaatacctgaaggtaagaaattaccagcaggtggagctcagtatcagaaaaaacaaatttctgaaattgaggtattttatcaccttatgttttaaaaataaaattaaatgcatatagttttaaaatttacatgtgaaggccttcttttttaatcctacctaccaaaagttatcaccctgcaacttggtttttgaatatgtagaaggaatgcttttgttataattattttaaattgtttgctatatctggtgtcatacataaggtatgacagttcatttgcatgaataagacatttttaatgtgaacttaatttataaagattgtcttcaaatttggtcacttcatacaataaagtaattacactgataatcttaaatttaacttgtcaaaaccctcaaatctgccattcccacagtcttcttagggtattttcagtcaattgcttaagtccaaatcttgggaatcacccttgtgttcactttcttccaaatcctgttagcaagttgtcttgatattacctccaaaatatattccaaatctgacctcttgataacatttccattgtgatcatcctggtaaattcaccataaattaaggtctgaactacttcagccagtttacctgtttgttcccttgccctttgtaaattttattttctgtataataacttgagttatcgtaatgtataaatgagattttatatttctcctgcttatgaccctccattggtattcctatataaccagaatgaaattctaatcctcaccatgaactcaattacataatctcatccctgcctacttcccctcattatttcctaccagtcctcatccatcacactccagccattgaggtcttactgtcctttgggtacactaagtgtcttcttatctctgggactttatgtttcatctctttttaatacttattccccagatcttcgtatgaccaactgccttcttttgataatttcaggtcaaatgatacttctttgagagatctctgactacttcagctgtaataggccctatcagacccctgtcatcattatttatcctattgcctttttccttttcttgcaaagcacttactttagtatctttactatttctactattactacaattattactattttgttggttagaatttactctgtggtaggttagttctaaatatttccatgcattaaatactaatatatgtactttggtatgtatgaactcatttgattatggtatgtatgtatgtatgtgtgtatgtttttattatctgtcttctataatccctgcttgttccttaaactgtagctctcagaaggtaggcactttcattatgtttactactatttcctctgccttgtacagtgcttgctatgtaggggaggctaagtaaatattttttgaatattgaacaagctcttagaactcgtatcaacaagtagagttatcaaatatttatgtaaaataatctcctaggggatagggaacatatcagtggaagaaatcatacctgaccgattattcttagagtctttttttatgaaggtaatagggtatataaaataagctacttcgattttagaaaagacgttgacaatgttttttaccaaaggttactaaatgttaagtcactgctgaaatgggaaataggcttttagaatggcccaacaacaggtttaaaatcagaaatcaaacagtaggaatagatgtttatttgactagaaaagtataaagagagtgccccagcaattgatgatcacatctgttatggtttgaattatgtgcccccaaaagatatctttaagttgtaatactaaatacctgtgtatgtgacctactttggaaatagggtctgtagttgtaaactagttaatatgaagttgttagggtgagctctaatccagtgtgactggtgcccttataa

SEQ ID NO: 116799 - DNA, 1850 bp, Homo sapiens
ccaaaacctaaaataagaagacttctatatgtttcttaggaataaaatcaggtattttatttatctaatttaaaaaatcaaaggccaggtgcagtaagctcacacctgtaatcccagcactttgggaggccgaggcgggcggatcacctgaggtcaggagttcgagactagcctggccaacatggtaaaaccccgtctctactaaaaatacaaaaaaatttagccaggcacggtggtgggcacctgtaatcccagctactcaggagactcaggcaggataatcacttgaacccgggaagcagaggttgcagagagtcaagagcatgccattgcactccagcctgggcgacaagagcgaaactctgtctcaaaaaaaaaaaaaaaaaaaaaatcaagtagaacagagatttatttcttagatagtgtttctttacttaatgtacaaggattttccgtttgttgctcgaaaacgcaacatttgttggctgtatctgttcctttaatccagaactgactagtatacttccatgccaacagggggagatagtatgaaataggagatccagatttgcacctctcttctatcttgcttttgcctcacacaggaaggtttgttggtaaattgacttccttgggcccactgtcactatctcttagctaaattttgagatggagcagaaaatgaaatgtcctcattgtaaggatcagctggagtctggtttcggctcccaatcctgtaaaacatgtgctttaatgttcagctctgagccttccacatcagaagtccacagagatcaggtaaggagaagttctgccacaggcctactttacccagggccccagacattatctaagagtccagcaggtcatctattttatgcggctgcttcaaatgggaaggataatttctcttgacttctgaatctggtggtaaacaaaattcttttgaacaatgctatcacttagatgctaaaccaaagccactgaaaaaaatgaaagtggcttcttttcacatttgtattttatttcatttgtttccttaattcacctctcagttttgagaaaaatatgtcctttccagtatttcaatacatggaaggtaaaagagagtgcagttttattgaatatttgaggagaaacatggctcagattttaaactgagccatgtttctcctcaaatattcaacaaagatgatattaagatttctatttttcaaatttcagtttctattctggctggtgagctcaatttagccttgttattttcaatgtctgtcaccaaaggaaactaataatgtttttcttgaacataggtatttaatagttggtgaccataactggtaaagcttttcattatgatatgtagctatatagttcaatgctaattttgtaatcaatgtttatggtttaatttaggaacttggaatacactaattccttactcttttaatgtataaaatataatttctgttactaataggaatatagccctattttaaatctgttgtgttggtgaagaattatatttatatgtcattttgcgacttaattgcctgcattctcttgagtcccttatttaatgcctctcttttttaggctttcttttttcagattcactatattaggaaaacctaattctggtcttcaaataagaattgtcaatgccaaaaaagtttatgtattttctttattttgaagatagttgaaatacatacacgattcttgctttaatattactacatccagtgtttgggttatggtgttccaaatatgtgtcttatattattggataagtactgtttgtaaatataatgaccattacttgtgtgcataagttttgcttatctggt

SEQ ID NO: 116800 - DNA, 1643 bp, Homo sapiens
agatattttaggtttattgtataacttttaattggtcaattaaagggaggaacatttgtaagaagcctttatagttgctatgaattttattagaaaataatcagtattttctctaatttagttttttttttttaatatttgtttaagctttctgatatgatctccatcagtgagaagcctttggcagaacaggactggtaccatggtgcaattcccagaatagaagctcaagaactgttaaaaaaacaaggagactttttggtgcgagagagtcatgggaaacctggtgaatatgtcctttctgtatattctgatggacagaggagacattttatcatacaatatgttgatgtacgtttccagtttagttcatatgtatattttgatgtagttcattgcggtacaattatattaaaataacgaatggtttgtgataaatgcctgcaacacttgaaatttagcacttaatttttttctgaatttcttaaatacagtgcttcaaaatgtactaacatttaaatatgtttaaggaaacatgtatttagtaatattttaaattaaaaataatgtttataaaatcaaagtatatagctatttaaaatatgttgttaaatttgaacattaaagatattttgaattaaaactaaaaacaatgtgattattataaatttttttctagagaaacttaagtttatgaaacttatacttttgaaattggagcttggaattgttttcagaatggtgccatgaaagatttttaagaaatattttattcaatagtaataataaaatttcttaatgaatgggatgatggttgaattggtttttatagataagctcttgtttattggcattaataatgaatagaaattaatgaagaattaaaaatctatttacattgattattctaatgctaatttattttttgaaatttatttaagtattgctaaactactttctatgtttgttacatttctttattgagccttaaacagatgaagagtaatttcaaaatttagctttacccactaaggaattttaatgtttttggcatatgaaagaattgatgcctctgtttgttttccattcccatcatttcaaatggcctgcattttcaagattgctatccacaggatttcattttatgttgagagactagggtgatactaattgccttacagaaattgaaccatgatcattagatgaacttgagggcttagataacttagtaacaggtgtatgtacacagacatgcacatgtgcacatacatctcttaataagtttatatatatataaaacgtatctttgagctgacattcacataccatacaattaatcattttaaaatgtaggattcagtggcatttagtacatttacatctcgtagttatagctaaatgaaagtagataccattcaaataggttaaaaggaatatatccattaaagtatttccactatcataatgttcacactattcgttaatttttcgtagtattcagacctcaacttgataatcatatttgcccacattcatacatctaacctactgttttggaaactatgttgtttctaataatgtgtcattttttatttccttggcaaactcttttgtaatttgtatatgcctttaagttatgaatt

SEQ ID NO: 116801 - DNA, 1042 bp, Homo sapiens
ttttatttctttatccaagatgtgtgaatgagtgtttttggtaattaataataaatgaatactccactacagaaagcaaactaatactgtatcagcagatagaaaataaatgatcagatgtattaaaatatttaccatcagattggatatctttccttatatttttgacatttttgatattgaaagttttatcaaatggaacacatatgtagacatatgtaaacatgtatcttgtccagtaactcaggtgtatcccatgctttgtttcctttggttagcattttagcaaaatgcatttcaggtctgtttgttagattttttatttttcaacaatttgaattagatttaaacattgtgaaaattgatttatctgtcacaaggtagaattttaaaacatgtcagagttttatttatctatttatatttttatcatcttaaccatttttaagggtatagttcagtagtgttaagtatattcacattgttgtgcaattatagtttttttaagaaaggaatctaatttatcaatgaatgtagattttctaaagcaatgtcttcacatttattctaccttattgttctctctccagaacatgtatcgattcgagggcactgggttttcaaacattcctcaacttatagatcatcactatacaacaaaacaggtcatcactaagaaatcaggtgtagttctgctgaatcctattcctaaggtaggtgcttatatacttttttgtctgtttgttttaaaagaatttttggtgagttaacatttccaacagtaaataaaattcttaggttatatgctagtagttcagaaaaaaagttttgtttttgtttttctagcttttattactaatgcaattgaaacatgaaacttccttgattttattaagatgagctgctttcttattcagtatttgctagtatacagatggcttggttttttttcccctttcctagtttttcttcagacttgaggcttttcttcactttataaggttcatactttgaaaggttcaggttataacagattctaagt

SEQ ID NO: 116802 - DNA, 1060 bp, Homo sapiens
tttcagagatactgatgtcccatttcacaagtcaaccaaatgtttgcattgtctacaggcttagccaggtctaaattgggagaccaaatctataaaagaaagaaataacaacgcaggtatgagtttgactaggaatacaaaatttcaaataaagctataccccttataatataaaatttgctataaaactttgataatagattagattctctggactattacatggttaattattgtttttccaacccccaacactttggaattgattatctcaccatctgatagaactagctatgaaaataaatatatactggatgctgtagaaattaaatcgttatatgtgattttttatatgaggtagaaatttaaagtttatctgggtattaacctaatctaaagtactggtatttgaaatatgcaaatcattatctcagtttgttgcaaatattatacactgatttaaaggttcatgttgctcttttaaaagaaaatcacaaagcagaagctttgagttagataattttcaactatgagtacataacaaattgatatggatttgttatggtggtagtatctgttacttatcttcctttgaattatttgtactcttataactgaatctatttcttgatttaatttgtgtgaaaagtaaatgtctttgattatataatgtgctgtaaaatatttaatttctgtcttgctagacttcatttttagcctaaagaattccactttagttcattgtaatttctatttcccatttatttctcttcccatttatctctgctcctacccataaaaatatgtttatcatcataatgcctaacttgaggacagaatggccaaagtaatctcttccttaccttcacatttttatgcacattcactcagaggtaccgaaaactagacaggattaaattgtttaactttctcactttatgaaaactagtgggtgcctgagccacccatccctctccctgatttttcctgcactgccttcagagcttgtgtaaacatatggaagatggaagaaatttttgtaaagaggggttattaatca

SEQ ID NO: 116803 - DNA, 1586 bp, Homo sapiens
actagaaatggataaggacaaccaaataaaaatattggcaatggatatggggctactttagaaaatagaaatacaaatgattttaaatatattaaagttgatttgccccattctcagtaaaataaaggaaaaataaaaatatatttattcacctattagattagcataaatttaaaatttaataacagtgtcttgacaaagatgtggataaaaatgctctttgatactttgctgttgaaagtataaattctcaacaacaacatgaaaaaccactatagaaggcattttggcagaatctgtcaaaactgtaaaatgtatatatctttgattcagcaataacacttttacaacttatcctttagttctatgcatgtatgaagttgtgtcattccaaggttagtcactgcagcattgtttgtaatattaggaaactggaaatcattgaaattttcaccattaggggctagttaaataaattatagtaccctatccagtggagtactgtgaatgaggaagttctatatgtactgactggggagagctccaagagacattgttaatacaaagaactaagctgcaaacagtttaggttatgttgttaccttttatataaaaagggtaggagtatgattataagtctgattttgcttttatgtgataaagaaacttaaaaataatacaataaacaataacagattacatgtttggggaggtggttgaaattgaaagcagaggtttaggggaaactttttacttgttatattttacattttaatttttttgaacactgtgaatgtattacctattcaaaaggtaagattaagaaatattgaaaacatggcacctgtcctcaagcaaatataaatttttaggatgatgctttattgagaaattattgataagaagacaaaatattcatgctatatattgttaaagtaggaaaagcagtttataaaatagcattatggtatttatctgatttttattaaataaagtatagatatccaaatacatggaaaaagttggaaggctatattccaggatattaattatgattaccttagagtggagtagtaatgggtgatttggggcagtttaaaaacgtttttcattgaacatgttactatgtttgtaatatgaacattttctaaaattatattacatgctaatgttttgtagaacactatagagcaatgttttaaaaactatttttcccataatttatatgaagaaatcgcattgtagtttaagactcaggacacacaaacttgagagtattgatatttatgtgtgtgcgtaactaaaacaagttttccaaacactgttttatgcttcctaaatgagctgcattatatttaatttatttgatttatttatttatttttatttatttatttttgagacggagtctcactctgttgcccaggctggagtgcagtggcgcaatcttggctcactgcaagctctgcctctcaggttcacgccattctcctgcctcagcctcccaagtggctgggactacaggcgtctgccaccatgcctggctaattttttttttgtattttttagtagagacggggttttgc

SEQ ID NO: 116804 - DNA, 1120 bp, Homo sapiens
gcagaatcaaggtcatagaggagcaagagacatatggtgatttaaacagctcctgatttcaagtccttctaggtcagctaaaatgcactacccagattcttcttccaaaaatgcatagaattatgagacatctcaaatagctactgaaagcaagctaacacaccggtatacttgtgctcacgctttcattctccctttgctctatcatcctctctctctttctctctgctttcttggtttctttcatgcagtcagcaaatatttattgagcacctgctttgcctctggtgctggcaatacagtaaaaaaacaaaacagacacggtgcctactcttcttgaaatgtatactctggggactcatttaatttttcaaaaatattattttaggtcaagttctactagcagttttctgtcctttcctttgcttgtcttaccttttattcttccaaaagtaaaagatccctaaaagttttcccagaatcctgtcttaccattcttatttcttaaaattctctttatggggagttaaagttactgtaggcaaagatctagaggaatatagaaaaaggaattgagaatgtgttcaccagatgtacagaaacaattctattagtcaagttaataatagctcagaagatataaatataaaaattgtataaaatgtcctacgaaatcccagttattatatatacaagtttaaatatccttagggaataaagctgaagagtataagatttgtttgaaggatcatcaaagcatatttgaaaatactatagaagaaaactaactgggaactgaaattattcttatcccaaacatgatgttggagaataagtaaatgccacgatagttttttttttttacattctgtattattcattgagttatatttcattgaatataatacagtacttaatatttattgagtattatgctcatgtctttttattacactgaaaaacacacaaatatgacaaattgtcatttatctaaaagtacgtggggaaactgtaacaaaggctatatcaaaaatcaattggaaagggaattttctctcaatccgtggtggtgagataaactggtagcaatttggtaaggcaacagtttagacattgcttt

SEQ ID NO: 116805 - DNA, 1953 bp, Homo sapiens
cctttggatctcatgctggaatctaactggaggtccatcaacaagacagtcctcaagtgaagtctgaggagtcagcctcctggggcatgtaatagatccaagcaggagagaggatagaaggtgttagagggtgaggcaggttggcaaatggaaaaaaactatcccgtgtgtgtgtgtgtgtgtgtatttctctgtatgtgtttattcaaacatacttatgtaacacatacatatgcggttaatggttggtattatatttacatgagttgtgatgtatatatgtataagcatgtgtcatctatttgtggaagattccaacgtttgtgcatactcccagacacatacaaacatatgcacatatacaagatatttaaattctagtaaatatagaaaacaatggaactagttggaaaagaattctggtttagacagaggagttccaaaaaatagctagggaacctttaggtaacacttgttttagatacacatgctcttgcacaccaatgaaagcatactgaacacacaagagtttaaatttcccttcagttgaagttccttagcagcaaggaccatgtgttctgccttcctgtgctttgtaaactcttgtacagtgcttcacacccaggaagtgtctcactgttgtaagaatgaatgaattaatcattccatttaaatattgttttcactcaaccagagtataacttaagacaaatttgtattcgcttggagaccacttttagaacaattaattgaatgaaaaggaattgtacatttttaaaatatttattgtttttaaccagtattgattaactcagatatactataggaacatatcatgattttgtttatggtactgcacaaagctacttatatgctttttgtaacaacctgatgatgtagagagaagcagcattaagactattttgtaaatgatgactttgaatcttggggaggttaaacaattttcctttttccttttacccttctgtaatgagatagtgaaatgaagaaagctgtgaggagttttcattgagcagttatattgagctacttgaattgtagctgccataattcccacctgttgtgggaggtatctggcggaggtaatgaatcatgggggcgagtctttcctgtgctgttcttgtgagagtaagtctcacgagagctggtcgttttataaacgggagttcctctgcaagtgttctcttgcctaccgccatgtgagacaagcctttgcttcttctttgccttccaccatgattgtgaggcctccccagctatgtggaactgtgagtgcattaagcctctttcctttataaattacccagtctttggtaagtctttattagcagtgtgagaatagagtaatacaagcagtaagcaaggttttgctttttgtgtttaacatatacctgtgatgaaattagctctcttagctttttggctttttgtttttaaaactataacaaaaataggaagggtggggggagaattgttatttacatgtgatttctaaagatgagtaaaaaattgtaatctaagtttttgaacaaacctgttttcattttaccacaaatgtcctctaaaattagcctaaagtgaatgtgatgctcatatggtggggggaaaaaaaatcttacctgcctcacctccacttaattaagattattaaagcaatatattgatactaagagcacaattctggaggaaaactttgatagaggttgtcttcagttctttgcttcaaaagtttacttaactttggtattgaataagattaacatgctatgggacctgtgctttttatattctgatgttgttcagaggtttttattagttgggttattcagaaaattgaggcattattttttagatgggttattcagaaaattgagaaattatttatgatttaaaaagttttaattacattgtctattgatattggccaaatgc

SEQ ID NO: 116806 - DNA, 1176 bp, Homo sapiens
tagttgtttaccaccacagtcaaattatagaacaattgcatcagctcccaaaattattctatgcccctttctagtcaacccagctacttaccctttggaaagtgagaatgtcatatacaaggaatcgtacagtatgtgctcttttcaatttgacttcttttatttggcaaagtacaattgggattcatctgtattgttgcacaaatcagtaatttcctccttttattgtgaataacatttccttgtgatgtaccaccatttgtttattcattcctcagttgaaagagtttttgagtttttaacaattatgaataaaactataaacattcatttaaagcgttttatgtcaacattaacttttcatttatcgagtatatacttatgaatgagattggtggtttgtctagtaagtgttcctttaagtttataagaaactgccaaattattttctaaagtggctctgctattttgcattcctaccaactgcgtgagaattccagtgactccacatttttactagcttttagttttttcagtttaaaataaataaattagataattacttttagctactctcataggtatatataatggtatctcactgtagttttaatttgtatttccctaatgactaaagatgttgagcatcatttcatgtggttatttgtgatctgtatgtcttctttgtgggcacttttgacaaccacagaaagacaaactagtggattaaaattataatcttgtactcacggaggaaataaagtgtatctctctttaaccttatattattgagtttattagtacataaaattgacaaaaatcattttattgtctatttaaatgacataatggtaattattcttcctgactacaactatcattaaagatgtttaccatgttcctaatagttctcatgtctaattgattcctctccccatttcccacagctatttccaacctttaccattttttctcaagttcttaaactgtctgtagtttcttcagtattagtcagggacttgcttccttcttttactaagaacctgaagaagaaacacttgcacactccaccagcagttattttcacctgtcctaattttctctgtgttatcgcagctcctctcacctcacccaggtctttgattcttcatttttctctagttaactcatctatct

SEQ ID NO: 116807 - DNA, 1125 bp, Homo sapiens
ctctatattgattgtgaagactgcagattttttcattttcctcaaagcttttcttatattgccacaaggcacattacacattaactagaacacaatgctatatcttctcaatattgtgatgctcactgaaatagatgtgtgaaagtctttgaaagatttaaggatgattcttaacatttaagaatattatatgtgtgttttcccctggaaggactaaaaatcataatgattttacttcagtgtgcagtaaagtcaaaactagtgaactgagatttgaaaagaaacagtgagataataaaagtttaaataaatacctaatagtcttgttctttttgtttctggttacatgtgatagtttagaaaaaaatgaaatactgcctcttgggatttcaggattgtatatagaattacagtatgtaacaacactgggcatatttcaatctaaaaatgtggacaagacacttgtttcaatataaatattaattttataactagttctattaatcagaaaaagcaactatatataataaaagtcccttttcttccaatgtagttggaagtttctttgaactcataggccgtagtcaagtatatgttatttaacaataatggcagatacttgagaattaaccaaatggactatttgaaaatttattaataacttttatttataattgagttccaatgaataagtattcacttttttgtcagtgacttaattagtgattatttccattaatatataaaaatgtgaattcattttagcttatggtgtgatacaaaaaatagtttaaaatctatatatttaggaaaagctaacatacatatgagtgatcagtactgaacttaattaaggctcagcattttagatgaagaaatgattactcattacttttttgattcaaatgtaaacttgatgaattgactattttcccctatttttaaaaaatctctgagaaagtaaatctctgttgaaataacatagtttgcaggattcttatcatttatgattttaaaatacttttcccaaagcatcgaattgttattggaaagcagatttttattggcatatttagtaagtgaattctaaagaacctcaagctaaaagcagtgactcatatgtta

SEQ ID NO: 116808 - DNA, 1363 bp, Homo sapiens
atttctcctcgtaaagtctccaaggattttgtttaacatttccagataacaaaagagtctgtacctatagtcagtatttttataggctgtaacactttactattttctagaaaatgtcaactgcttttttaaaaggcagatttattattagaatatagttacacatggaattcagttatacatctttatgtgcaaaacactatttagaaaaaggcagtgtacttagactttctaacagtgatagtactatcttatatttagttcactgtatatcattttccaagtacatctccacacaacctctcttctaaatgtttaaattaatttttaatttttttttgtagaaatggagtctcactatattgctcaggctggtcttgaacttctgggctcatgtgattctcctgccttggcctcccaaagtgctgggattacagacatgagccgcagcaccctgcaaaacctcttttttgatggttatatataataatctcacaatgctttgaatcactttcgaattatgaacttctttcatatgtggacaaacaaaaaggtgatcagtctatgaatatgtcttggtatttatttctggtgactttcaacacctttatgttaacaacttttgacaacaaagaaaactttgaagtgctgtattaatagtatgttttaaagtttttttcgttgtccaacttcctgttgtagaagatacattcagaagtaaaatttgatctcataagctttacaaatagagtatttaataagtgaaagggatttgctttacttttaacaattatttactcattttaggagaaatttaaagaaatatgtaaaacgtttctaattttaattaaaatatattaagtaaacataatattgtagactgctcattaatttctgtttacagaaattaatttttcatgatttataattattggtcctgttttgttatactgctttgcttgctattgaaatatttctcaatattaccatgtaactgcagaatacctagatcattatcatctttatcctcattaagatggcattgtctgtgttaagtacattgtatgttttaatggtttaaatgtgtaaatattataaaaatacatattaacatttacatgggtacaaatgaagcccctgaataataaggaacgccactgaaaaactcagatttgggaggtgggatgaacttgaggaaaggtgattctggtcttactgtaattgttaaaggaccacagatgcaaataccagatgacaagtcctagttaaataaaacaaaagaagatagctttgtagaggagccaagcaagtgtttatctagactctgactagtaacctgtttatattttttaaatgaataaga

SEQ ID NO: 116809 - DNA, 1048 bp, Homo sapiens
ccatcactttttcatcattcctcagctactactcacattcatttaatggtttctgtaaacatttttaagacagttgggatgtcacttaacattttttttcttttgagctagagtcagggaatcaagccatgcttaatatttaacagtcacttgtatgtgtgtggaagtttgttttgtttgtcatgtattggtacaagcagatacagtacaaactcacaaacacagatttgaaaataatgcacatacagtgttcaaatttgaacctttctcatggatttttgtggtgtgggccaatacggtgtttacattatataattcctgctgtggcaagtaaaacacacttttttttttctcctaaaatgtttttccccgtgtatcctattacggatactagttttgttaattatgattctttattttctctcttttttttaggatatagcagtaatgctattactgaaatgaatttcctttctctgaaatgtaatcactgatgcttgaatgacagaattttagtactgtaaacaggctttagtcattaatgtgagagacttagaaaaaatgcttagagtggagtggactattaaacgtgcctaaatgaattttgcagtaactggtattcttgggtttgccctacttaatacacagtaattcagaacttgtattctgagtttaacagtcttttggagtgaccagcaactttgatgtttgcactaagatttcatttggaatgcaagagaggttgaaagaggattcagtagtacacatataactaatttatttgaactatatgctgaagacatctaccagtttctccaaatgccttttttaaaactcatcacagacgactggtgaaaatgctgagtatgacacttttctacttgcatgtcagctacataaacagttttgtacaatgaaaattactaatttgtttgacattccatgttaaactatggtcatgttcagcttcactgcatgtaatgtagaccttgtccatcagatcatgtgttctggagagtgttctttattcaatagttttaatttagca

SEQ ID NO: 116810 - DNA, 1036 bp, Homo sapiens
ttataaaagacataatagggaaataaccagctagtttttttattataaaactagtacaataatatatagtatcttacatttacataatattttacagttgtcaaagcactttaacattatgtcagttattctactagaagttattatttccatttacaaagaaactattaaataagtgaggtacagagagcttgaagtgacctgtcaacatcagttaaatagaaagtaggctaatagtactctatttctactattgtgtaattagatttttatgtgggtcaaaatatataatccttttatgaaatgaaaattcaagcaaaatgtctgtgcaagatactctgtggatgaaaacatgaatccctatttcataatttctcaaccttgtgcatagataaataaatagctcgtttcagtaaacaggaaaatttctgtttgagtttcttttttctctactgggaataaagctgtggagggaagatttagaaaactgttaggttaaaagcaagaatttaataacttcctagtgtctaatatgcaaatcatttctaaaatgtattatgcagagatttaatatgctcctgttcttgtcagataactgagcccttttggaatcataaatccaaaatatgttttaaccagagtaatgtttgagaagattataagcatttgagaattcaagtttagagtgagtagtccaagatgattctgtctttgtttgaatcatctcttgaattatgaatactttgcttgcttgcttgcttgcttgcttgcttatgagttgctggataagtaaaatcaaacaaaagtcagctctaaatggcaatgggtaatatgaaaaaaaaaccctaatatgctaaaagatgaccccttactttatagacaagttattacttagaaattcaaattaagagaggacttttaaaagtgacaagctatgagttaaaagaatatttctagtcctggctgggcgtagtggctcacgcctgtaatcccagcactttgggcagccaaggtggggtcgatcactcgaggccgg

SEQ ID NO: 116811 - DNA, 1066 bp, Homo sapiens
ttcaccaggcttaagacattgtcagaatttatctcacctctgtaacatgacattttatttatggtttaaaaaaagtaattgagttcatttggtttattttaggcttagaaattttaggcttagaaatctagacatgattatttatattgttctcataaatgtctttaagatttccatataaatctttcaattgtcaaaattcgttttcttttaatttttcatttgcatttgtaatttctatagtacatttcactaatttttgccaaaaagttaaattcttttaaaaaataaacatttcatccttcccatttattgtgaaattttatatttttacaggattttaacagtcagtttcagttatgtgacttcacagctctggaaggttactatggtagttaactggcaatgacagtttcagctgctttggtaacaaatcccagcatttggagtctagatacttgcctggcatttgtgtctttcacttgtgataaatgtagaaaggataaattgagccaacaaaggattaaggaatgtgactcctgcctcatactcactaaaagagaatcctcaaagtctgaactggtgcctttcctaacatagtttaacccattgccaattatattacaattttacttcacagtaatcagttttgaggccgattaaaagaacaacatagtaattctcgaattaatatttcattcaaaaaattttaagatatagcaactcagtggctgaattttttaacgttgcaaacggattactaaagaaaacccaatactgtggagtttattattttgtgttgtttgaagatgatggtagaatattcctttaaaacaactttgatatgagcctaaatgcatgcaattatagattagtgcacagtaagtttcaatttgggagaatgagtactttttttcttttttatgttaactgatgttatatctaaacctagacattcccatttttattgtataattcaagaacattacattactgaaagtcaaaatattatgctcttggttgtcattttacatcatgcgtaatatgtttgatataatgtattttc

SEQ ID NO: 116812 - DNA, 1010 bp, Homo sapiens
tttagatatactctcttagtaggccactgttttttttagtaggcatctattctagtagtgtatattctttcccagaggttgagctaaatgataaagacattaacccagaagaagaatataagaaataaaaatataactatttcagttaataggatcactcctgtaaagaaaatatatctataactattactctgtcacctctttgagtggttttaaagagtgccaagggatttttttctattaatgaggaaatgttggtatgttgtaagaaacattaagttttcatggtacatttgagccatagatgcattatgtatgtctgagtagtattactcgtaggctttttatgttctgagcttcgatggcatttatacctatgagtaagtacctccagcaaagaggcaggtggcatggtgagcaggacaaagcatgttctgaaccactcttgctcttagattctgttttttaaatgactttctgttatttgaagttccttcacaattgaaagtgtaggagttatgaatacatatgtatccttccacatgaatgaacatttctttaaaggtactgtgagtttcactgttggctttgtaggtgataatttttatatttttgttactatacatggaaaagtcttaaaattccaaaagatgaacaaagtttaatgtaatattttaaataataagaaaatttattattggcagtctacttatatttgatgcaaatgttagaggtgtgagcaggactagtgtaactggtgaattcaattgaaataaaaaacaaattttacgtaaaatggcttgtttttacaaataggttttcaccaataacctatccaatatatatgaaactaacagtgagtatcagtatgaaattttcattttatcagaattgtaaggaaaactataatttcattaaaacagtttggagcccatactgtttttccaagattaaaagacaactgaaaatcctttgaatcaaaattttaaaaaaacatttattgaatccaa

SEQ ID NO: 116813 - DNA, 1052 bp, Homo sapiens
atggatacgaatgaatagaagaacactttctgaaatgtgctgagacacataggaaaccagagtatgtaagacagggttaaatgataaaataagttggctgcattgtctctaccccctgagtatattgaagatagatttatgaagagtttaattttaataattgaggtgggaaatgactgtggtatgaagagtaggttttgagtccaagtgaggataggttctggtagtattccagagcaaatgacaaggttgttgccaaaagaagaaaagatgttgatgtcaaagattgttcaaaatgtcctatttccaatccatcattgacgtccctgtgttatttacttcagaaggatgagccatagaattttttttctgtttgaactctaagtggctaaggaaataaaaaccttaaatgtaatggatgatgagtaaaatatttggtctgttttacttcatttgttattggtttgtaattcttagtgttgaatggacaataaagttgttttatataatctgcagccacacataagcttagactattgaacaattctaagattgtacttttataactttttacagtagcaatcttaaacgttgagatttgcctattctcctcattaagtgtaaatcaaactcattggcagtccatttatgtggttttttggagtaattattacatgataacctttttaataataaaggttgatttttttttttcatctccgcaaccatatgtccctgcaagtccagaaatagcttttaaataaagctgggaaaagattattgaaaacatggagagaaaaggagataaaaacatgtttcacttggtcatataaatgaaagagcataagacatgccacatgtttttagacttaaggtctatccagttcagtataatatgttggggaatgatactcttacagactgatttgaggaaacagtatattttgaaaaggagtattttaaacatcaccatgtttggtgatgagtatacctacctttccttagaagataatcgactttggaaatactaatgaaagaaaaaactgtgaaat

SEQ ID NO: 116814 - DNA, 1034 bp, Homo sapiens
tccatatacttggagttccactctgcagtactattaatacagtaatgaattttacagctatctcttggagcacagctcaaagtaaattaaagagggcggtcaggaaacctgatttcataaaagcatcaaagtaccatttagaatcttcatggaaattgaagagttgtacaggtatgttttggaaccagggctttgctcgcttttgcgaaagcagagtttgggtcatataccttggcatgaatcatttttcagatacagtgtgttttgcagtaagtgacgtgaaaacctaagtaaatgttagtttgctgtgctaagtattcataatactaacatacaacgtgattaaagaacaaatgattctttggaaatataaacagaaacaatactaatgaattggtgacatgttcatagtattctgtgtatcagtatggaatatatcaaatttaagttatatctaaaccaggtattgctaatttaataaaatcagtttttaagcatcaaaattctgtgtgtatatatcttagctttctaacttttcctgtgtcccttctgtacacttccccttgcaaatccttcaacccttctctcatctcttgtttacgctgctgtctcttttcttgttcttttttaaagagtaattccaaagattctgactagttaagacttagaaaaaaattaatgtaaaaaaatgtagttattccattaataccattgcttgccacttttctgttgttatctaagcatggtatgttaattacatctagttgtaaaactgatctgtaaatcaatagcaaatatatgaaagcatataactttgaatattattttctagattgtttcttggctaaaaatatctttggaatggcttttgcttagcatttttttttttttttttttgaggcagagtctcgctctgtcacccgggctggagggcgcaatctcgactcactgcaagctccgcctcccaggttcacaccattctcctgcctcagcctcctgagtagctgggactacaggtgcctgccaccacaccc

SEQ ID NO: 116815 - DNA, 1156 bp, Homo sapiens
cctgtttttattttctcttagtggtcattttgaatgacttccttgcccactggataattagcagattcatgtacttttttatagcattctgctgtaatttcttttgttttttgtgttttgagacacggtcttgctctgtcgccaggcttggagtgcagtggtgtaatcatggcacactgcaacctctccctccctggctcaagtgatcctccattcttcccacctcagcctctcaagtagttgtgactacaggggcatgccaccacacctgcctaatttttgtattttttatagagatgggatttcgctttgttgcccaagctggtctcgaactcctgggctcatgtgattcacctgccttgacctcccaaagtgttgggattacagatgtgagacactgtacctggcctgtaaggttgtttcaaactggaagtctgggttaggttccctgtaatagcaataacaacatatagtaacaacagcaacagtaaaagcaactatatcttgagtttttagctttctgtatttcagacactggtaatcacttttgaatcttcacttcagccctgtgatgtggttattttcatgccgtcattatggatgatgataagcctgaggccctatggccagagccaatacacagagctaacttatttatcacagagagcctctgaatcaggccagtcttcttcacatctcttacacttgtctgccttttatataccatcataaatgtcagctaccttgactgccttttatacactgtctttaatatcagctatattattaaaagcaataatgaaactgcgtagtgtcgaattttaacaatattgctaaaatgaaaaatgttgaggcactgtggggcaaaaatgtgaatcactctttcagacagtgaggagtcatcaagagctattccaagagaaatcctatttagagtacatgagcaaccgtaatgaaactttcttagatttttacatcaatcttgatttttaccttattatatgaattaactgctaaatcaagtcttgtctggacaattaaccaaaaagcctttaaaaaataccttaaggtaacataattgttaataaatatcaataatttctacattcagaatcatcttttaaaataatatacatatcttattaatgaaaattac

SEQ ID NO: 116816 - DNA, 1032 bp, Homo sapiens
agcagaaatggaattatctacattagatgttcaagaaatgatacattgttgatacctgtggaacacaaagtcaagacaggtggggaaatggttggagataaagctggagggatgataataatggtaggtaacatttattcagcatttactgtaccacacagttttaggcaccttatgtatattcgttcacttaatcctcacaaaatccttgaaggatgtacaattattattcttccatttttacagatgaggaaactgaagtacagagaggttaagtgattttctccagatcatataagtgacttagggcagaaccagcttttgaacccaggcagtctggctccaagtttacgctcttaatagtgtggggctttttgtatttaattagacatatgtaactgacatttttgcaagtcgcaatggttacatattggtaatttcaaatggttcaacctaatgtcatgcagaagaatttgggtattataaatacagatggaaccctggaaagggtttgaacaagggaaacaagacttttgggggcaatagactatagcctccccaactcaccaaaactctctaaaaacaaggaccactattatccagtaatccaggactcccactctaagcctgtcttattcccatttctttgtaaattggcctgattccttaccctttgaccttattcctttgactttaccagtccagttgcctttggctgacacttctctgtttctggtgatttctgctactataaggtgaagttctaataaccagcgctcaaaaacagaaaagaaagcaaaagcaactctttgtaaagcttttctgtatgaccttacttccttctgcttggcccgggccatcccaggtctacccataaagcatatactgctataagattgagccaggcacagtggctcatgcctgtaatcccagcactttgggaggccaaggcagttggttaacttgaggtctggagtttgagaccagcctgggcaacatggcgaaaccctgtttttactaaaaatacaaaaa

SEQ ID NO: 116817 - DNA, 1028 bp, Homo sapiens
ttttgtagtgggaattatcaaagacagtaaaaagatgttagaagagaaattcaggggtaggggaaatgggaatatgttagtcaaaggacacaaactttgagttataagatgaacagtttctgggaatccaaggtacagcatgggtggtgatatgtgtgttaatttgtgataatcattatgtagtatatacatatatccaatcatcgtgttatacaccttggatatattcacccttgtcaattaaatagtttaaaatataaaagaaaaattcaagaccttaatgtcagctaaaggccttagacttagttactctccccaaccccttctgggttatttttgtttgtttgaagaaatgttattgcctcaaaaattcttgatttctctagttcctctcactctattttaatatcagtcagctatccttgtgtttccatctgatgtttcacagattgagggctgtgaagtcacttaccctctcgaagcagttaggagactattacagctattccagaaagagatgataagggtttgaactatgtcacgtgcagtatgagtgccaaggaaggggttgaatagttgaattcaaaaacattttcagaaatagaataaatacaaattcttgatatgacagggtaaaggagaggggagaatccaagaagatattgagagtacatttctaacagaagtagagggcccatggcaatctatgaattaagacatagggcacagggttaagagcaggtttcagagggaacaaagatttgacatttgcttttggacttgttgaatttgaggtacctgtaggacatctaggaagagaaagccagaacagtctagttgaaatatggggtggagggtataacattgagagaggctcaaaaggaacacagcggagctaagtgattcaaggatggtatataggagtctcaggtcttttctttaatattgtctatcaaaatcacttccttgtcttccacagactccttcctgagtctgtcttgctgtcaaccctgcagaagattcccacc

SEQ ID NO: 116818 - DNA, 1813 bp, Homo sapiens
ggcctatgtctttacttctccttctttctttcttttttttttttttttttgaggcagagtctcgctctgttgcccaggctggagtgcagtggtgcgatctcggctcactgcaagctccacttcccggttccaagccattctcctgctacttctccttctttataacctagggacattgctaaaagatagcagtttttaagaaaaaatgctaaaagagagcatttttaagaaaatatagtttgactatgacttcattttcagatgtcaggactggtttttgtttcacttttttgcccattaagatttagaggttttctgcaagtcagcagaaaattgtagttactatatcccctgttatgaaagcaaacccccagttttcttctggatatgatgtgttaatatgggaacacacattttgctgacatgccctaatgcttaatattttgatgaatcaatctgggaataagaattgattgaaaacatctcaattttacattggctgaagtaagtattggttaggaagatgggcagccagttagctgacaggatctacaccgtgctagatggattgcaataaaaaaaaatagaattaaacacagtatactgctatcaattactgactggcaagtatgttattgaaccatatcagaaataaaagccaaagcattttcctgtgattcccaaaaaagctcaaattgcgaatatctttagtgcctagtaaacaaacaattctaccttgtataatgtgaaatattacagtgaacaaagtatttagttttttctactagcaaattaagcctttttaaaattctgtgcacacaaaaaacatatgcttattatattaaaaattgattatttgagtggctcttaattcaaataaagctttaaatggaaaagaatacattccagtataacagaattttacctgtactaaactaaaatcatatctaaaatacaaataaagaaacagtacaaaacatatcctttctgaagcaccattaacagcatcttgaattggcatctaaccacagcattgcttataaggtagtacatcttgtgctcttattggccaagtttttcatctgcattccatggaaaaaaagtttggctatcatttgtaagagtatgatcagtggtgtgttgctatgagcccgtgaaatagaaaaacaaaattaggaaagacctatgtagctagaaaatgtggctttttaaaattgtcatcagaaagctattaatgacttttaaggaagcaagaaagaaaaaaaattactaaatacaaaagcctgttaaaatgatttcagtgttttatgctacccttatgaaagtcttggacttcaaatgctttttcctttggtaatgctgctaatgatagcaaaatttttagccttacgccttgtaactggagacattattaatacacaaaaatgcctttcatagtctgagccatctgataatagggtggagtatatttaaatcataatgaattgggagggaagagattgttatgtgacagacataaaaatcctttatcatttaagtgaagttgcaagaacagtcccctcataagtcattattgcccccaatatacaaagtaccagagtccattgagaagtcttccaaggtaaaattctggacccatattccacagtagctcctattcttccatatctcgagcataccatgttcagagacttagaaaacttgtaggaacatgtgagcagctctgaggtctttattcaagtataagacttaatggaggcctaaccaggtcagcaccttcagagggcgtacaggtggcccctcttaccttgta

SEQ ID NO: 116819 - DNA, 1010 bp, Homo sapiens
gatggagagtcagttacttccacaatcatagaggcagagaacttgccaagctgtgcgcaggctctgaaagctacttcctagaagtaacagtcatcacttctgctcaaatttcactgactaagtcaagttacacagccatgcctgcattcagtgtggtggagatatgtaatcctcctgcagagagagatactgtatatttgtaaccaataatataactaccaaacttccaattctatttgctatgccaatggagtgtaggtttcagaacagtttgcctggtttattgtggttttcaaaccaccagcataaaagcctacagacacatcaagtgggagaggccttggacttcatggcctgttcttcccagtgtggccaccagagtgtggattccaaggtccgtttttcctggtttgttagtaccactgaattttccgtgagcattatcaactcccttcacatagtaactttgggctcaggaagaaaaggcattcataatctcatttaagagggtgaagatagagtgggaaggaggatacagagactgccataaaaacctgttcatgttctattatttacacaatgggagttttctgagaattgcttttaatgtgagttacaaagagatttaaaaataataattaagttgtcgatattagaacatttgaaaactcagttccacttcctttgcttaattctaataatctgaccctaattcccttctctaatgtttttattatataaatgacaatgatggatgtattgtttgatggtgagccactgaacaggtgtaggaaatatacaaacaggcaggctccatctggaaaattttcatcaaagaggtaggattctagggactataaaacttatttttataattaagataacaagagccatgcttgagggaagtgaaaagaaaggcatacttttgaggaacatttattaagcaaccactgtacgacagactctgtgctaggtaccacggatccaaagtaaatatttatagagagagc

SEQ ID NO: 116820 - DNA, 1093 bp, Homo sapiens
tctgatagctccaatgttgcacatgcataaagtcactgacttcacccagtatgtcctgaagaacaagggactctcacttggacttgcacagccaaagcagagaaagtgactctattcccaaagaaaatgctctctttgaaatctccagacttcaaaatagcacagtcatcttctttgctaagctttacaacaacatgaggaaggaaaaggatgattacagaaactttctcatatcattttatgaagttaaatttacctacatattatgtgcttcagtgttttatattttctttacaatttttttcttgcctgagttgtaaataatttgctcccccaacccccgcaacttttctcccctctgtttaaattactctgtgctttgcattgcttggcatcaagcagtatctttggatggaggcagactaggaggcatcttgattgccagcaagatctaacattcaaaaataaagaaatgttttttaaaaagaagatctttattcaagtgtggtaaaacattttctgagatcattcaggaagcttcagatttgtggaagggaggctgtatgcatatagaatgttattattggaactttattattgtcacattgatgttacatttctcaggaaatatatgctaatgtgtttctacttgctttttttaaggccttgagtagatgtgctgaatattgaagctatttggctgcctagaaaatatatcttacaatttataagctgtatgttattatttaaaaaaaaaatcaataatctcccagaattttgcatgaataatatagagatagaaacttaggtgatttacatcttatggtattcagtttttaagatacgtacagatgacataccaggcaaccaataaaaaactatataatgtagagatttctcaatgaaattaagataatttataaaatatagttttccattttaattgtctgaatttaaacaacagagagggggactgatagaattacagaattttgcagcaaaaaaatacatatatatataatctatctattttatatatatatattatctatctaatatatatataatctatctaatatatatatatatatat

SEQ ID NO: 116821 - DNA, 1019 bp, Homo sapiens
tttaaatctcagctctgttcatcatacctctcttgagaaatctttagtggctcaacattgccttcggatgatagctagcattcgagactctccagaatctagcttgagtgtcttcattaatttagggcctactgatcctctcaaaaattgaagtactcgttgttccctgaactcacttctcactttcttatctccacctctgctcaggttataccttctacttagaatgctcttcctttctgtctgccttttctgccatatcttagaatcatacctattcttagaacctaaaatatctgaaataattattagtatgttcatgaataccaataatgaaagtcatttaaaataattattaaaataattttaaattcagtcattaaaaagaattttatgggattattatgaaaagatatattgctagataaaacaaaagggatataatatagtatgtttaatcacattttttaaaaataaactgctgagcaaactttaggcatattcaacctggtattaacagtcattatctctggccagttgggtaaaagctactcttctccctacccctgttttggcttttctatattttatcagtaaacttcttgtgcttttacagtaagaaaacaaaataatagatgttattttcaacttttaaaatagttctaaaaaccctactcttctttcaagcggctcaacttagtctttccttcacagattttcctgccattcaccaatcagaaataatctttaccttttctatcacatatttttgtgtttatagcagcatctctcattctatgattatattttaattacatgctagaactcccacagtaaccagttggtaccatgaacagggatcactctgttgaatgaatgaattcatgctgatggcaatttgaagtagttattttctttaaagggcttaaaaccttattagagagacaatacatgtcaagaaaaatataaaatagatgttaatttataagacaataattgtcaagtagtatataaatgtg

SEQ ID NO: 116822 - DNA, 1050 bp, Homo sapiens
gacctggaatgtaaaaccagtaaagagaataggaagactgcatgtcgaactcatttggtaagtttaaatacagtcatgtatcgcttaatgacagggatacactctgagaaatgcgtcgttacgcagtttcatcattccatgatcatagggtatacttacagaaaccaagtacacatctaggctacaaacctatatagcatgttactgtattgaatactacaggtcattttaacacaatggtaagtttttgtgtatctagacatagaaaaggtaatgtgttatactatgacattaccatggctaccacatcactaggcaataggaattttttagctccattatactgggaccactgtcatatatgtgctccatcattgaccaaacatcattatgtggtgcatgactgacacagacatacataaccaggaagggtcacctacttgtctactgtgcctcatgtggttatggttgttgttcctcttccagggagatacagttcagagagtgacgtgtggagctttggcatccttctctgggagaccttcagcttaggggtttgtccgtaccctggaatgacaaatcagcaagcaagagagcaagtagaaagaggtgagccaagtacattcattgttagtgttcatgtccagccccaggggtaggcagtgcttatagtgtgtctgcttgaggaggggtgtgttaaatactgtttggttgtgttatgagaccatctctggggttcagaagcagatttatctaacatctctgctctttatccaaacactttgaaggatttcaatgcgagagagaggtatataggcttttcttccaccctttccctgtctggcatgacagctgcaggattgtgctgttcactgtcgttaagagaaatagggtggtgtttctcaaactcttgtattctatgccagataaacctccttttaaataatattcccaattgaaatgcagttagtcttcaggaagtctttgagaatatgacaacattgtagcacttctgaagaaaccctttggggttcctagaccatagatggg

SEQ ID NO: 116823 - DNA, 1005 bp, Homo sapiens
actcatattcatttttatttccctattgaattcacatttataaaatcctcatattgaattcacatttataaaatcctcatcttctcttcatcttgaaaaacacagatgattttttaaaactgttcacaggatctaattctgaaagtgaatacttagagcaactaaaatatgcatttgtattgtatcttacatcagactttctgagaaatgaacaaataaaaaatgttctttgaattagaactctaagactctgtaatattgaattctgcatcacctgtagaaaataaaaactcagcctccccagaaatggatgttttgtttccatataactacaacataaggtaccaaaagttaataactgcataatgccctgtgtgaacattttgtgtcttacctccattctaaattctgttctccttctcttgggtcttcaggataccggatgtcagctccccagcactgtccagaggatatttccaaaatcatgatgaagtgttgggattataaacctgaaaatcgccctaagttcagtgaacttcagaaagagctcactatcatcaagagaaaactcacatagtgacaggatggcgccaaactcagccttcaggactctgtcctccagcagagtaacattattgttctcattaacaatgaatttataccacattaccttcgacagtcttctaccattattttttattaactgggtgttttaaaagtacgttccacttgtaaaaagtcaaaggcaaatttgttaaagaaataggcagtcctaccaagggctttcttagctaaccatagcaatcctaccatttcaggccattgcaaatagaaaagcacaggcttctaagtgtgtgaaggataaaagatctatcctatccttttcacaccttgtttctacttcaggcacagtttgtaggctgccatcctatgccacagaccctactccgttggtgctataaacagcattggtaatgccatgtttgcaggacatgttccaaccac

SEQ ID NO: 116824 - DNA, 2121 bp, Homo sapiens
cacagtgcccagccccctccctcctttgggaggctgaggcaggcggatcacctgaggtcaggagttcgagaccagcctggcttgcatggtgaaaccctgtctctaccaaaaaaaaaaaaagaaacacacacacaacgcatgaaacgtcgtcaaagttagagttgaggcagttgcttttcaaggatgtacagagagctgtgaagcaagaaacagatttgaacaggagggtgggctggagaacagagcagctaaagaatgattaacagagtaaagaagaaagtgaaaatataaaaccaccttatcagagttatgcctttctaaacatctaaacaaacaaacattcacatattctattctaaaaacacataataatacatattctattttatggtctgaatttaccagaaaggtcctaagaaaagtttcaggagttcgtagagtcctcgtaatggcaacaaaaattttgagagaaactgcaaagcacaaatccacagaaataacagcatactttcagttaagcattttcaccttagagggggcattccaaaatgtaatttcctttatttgtaccagtttttagagctgtcagaatttcatgattctagttcaccaacacattcacgtgtgtacatgcgcgtgcacacacaccaccaaggtgcaagacagatgtgaatgaagtagacagtctagaagtcaggtgaatattaatgagaaatatgacatagggacagccctcccatttctacttccaccttcattgaccattatactgccccctggacattcttaccattagctgacaggtatgcaagcagagtgctgaagatgtctcatgtgaataaaatgtaactcactcactcagttaaaactaggattctgtatcttaactcttatctagggaacttacttacttaccccatgatctgtatatagttgcctctcaggataaatgcatatatagaagatggtcatgctcagggctaaatatgttctggaagccttttataagttctcaggcctgtgtcctggtaaacattaccttagtgattatttggtctgcattcattggaagagcttagggatagaaaatgcctcctgccctctccagctgtttgctgcctgtaccatcgcacagaactcacaccagtactttagagtatgaaagataatactgaagagaaaagtgacttgtatctaacatttcaatctccttgcagatttcatacatacttaatgattagtacattcagactaaagggaaatttcttttgatggcacgtactatggtaaatcaaagcgcaaactcagaagtgctatggtattgaggcacttaccaaccttcaaaagtaagagtaaaatgggatattcctacccttttttttagtatttctaagtgaatctctgtaatattctttgtctgtttaaagaaaacagcctcccatctcatagtggcttcatgctaagctctcagcaaggagagagaatgatggttttggctttagttttatgaacaagacctaaagcttaatcctgacattctggtgttaagaatgaacacagcattgatatttcacttatccaggctgttagaatttgcagttcacatcattactctgtgcttaaatttaaaaagcttttcaaaacatcgtgacatgtgtagcatttaaattccattttattctttgtcctaaagcaggcagtggtatagttcaggattaataacttattgggagtctctcagtcatatagaatattaaatttaatatagtcacatgcattaagaaaaacttacgcaaacagtttttcactgttaattttgttgtgcttgaagcataatttattcatcccttctgtcactgataattaattattggaattatatactttaggaggctaatccatgcccaggaagcacgaacatactgttcagaatgtgcaagttgatgtagggaaaggaagattcagaaatgtacaaaatcctgtgatttgtttagtaagaaaagagttgtaaccaaaatttcttctggtccggatgtaattagtccagtcacaaatctttgtgttgttaatggattattcaagatatatatatatattcttactactgcatagttcctctca

SEQ ID NO: 116825 - DNA, 2127 bp, Homo sapiens
ctgccactaagtgattataattaagctgtcctgtttgcatcaaatgtaaagactgtgttcacaaccgtagtaaaatttggtttcattggaaatgaaacaaattctaaagtatgctttttcactagtccctttgattttgctatatcataacctcttggttcatatgctgagaaatttttcagaaagtccatttttgtttaaaattagaacttttcagaatgccaaatgaaggctaaaattttggccagaacattacaaaagttttaaatcgtagacgtaactccccctgaaataaagttaggtagtaaaatccttaatgaaaccagtggatgtgcttaacgtaaggttagtaaagcatacaaagaatctagtgtgctcagggcttggtacaatgagctgaattagatggccttatgaaactctttctaacctcttacccaacctgtttctccttggttaaaattatacttgaaggcccagaacactcatggcacatttgtttaatattgcttatagttagtttaaggtaattttgcttctacagtattttggaaggtctgaaaacttgcacagggtcatctttgtaattatataaccccaaactaagatgcacaatgtctccttcaggtgatcacacacagtggacgagtatgtgcaaacatggacataatagttcacttacaaatgtgatttgatgttaacactagagaatgatgactgtagaacatttgagcaagtaaaatagtaaagcacatagtgagtgtatgtccgtctaactggtacattgataatttagtttgggcacataaaaggaatatttatatggcttcccaaatgcagagttacatcttattcgtgtatttctctgagtatttatatcccgtctccttttttcattcttaaaaataaatgaattttcactgttggcacatatgaggcttaaatataaggaacataacacttgcattctaatttttgcatatattgtaaatgtgtctggtatttacagcaaaatactgtgtatccttttatgggtaaaacaaaagtgaacattgcatgcatgtaatgtgatgaatttgtaatttaggagttctttggggcttctgtgacttgggaaatgcttacattcaggccttaatgttgcattagctagcatgttttccctctgatgtatatagtcactgttgtataaactaatctttgcttgttttctactctgtgatctttccatatcatatttcattaatgatcagttagtgtcaaggagtcaaaacagattaaaattaatttcatgtgtatatggtggaaatttgtggctagtgtgatttttgtttgtttccttttaagtactgttgatcagttgtgacacttactggttaaacttacgttgctaaagatttctctataataagccacacattatatttagactatattaagggaccttggttttcttctagatagcagctgtcccaaagaaaatatttcttctttgtctgttaagatttagctattatctgccagttgttaagaggttttggttccaaactcaaccagcaatgttgagagctgaacttaagatagctgttgtactttttgctttccatctgttactgtccttcattcttggctccctactatctataaacagctgctgtgaagaagaaaagttgaataagagttggcttaaattttaaaaaagaaaaagaaaattgaggttttaggattttcatggtaacaagctctggtataagctaaggctggcaagttcagatactaaaatattatttgatcatatcttggatccttttgaaaaagttaagactatatgaaggtaaattagaaataagtatgaatattaataaaatagcatttatcttatttctctattttatgttgtgacttaacctaattttatttttttaacattttcttatttcttataatatgaatgctgatatttaaaggtagatctatgtggtattctttgtgtttcttaattgtttaactcttaagattatttgtgatctggatttatgtatttgttagatacatacgaattgttaaaatggaatgcaagtttttcaaaagcccaggtctaaatgtaatggttggtttattgttcta

SEQ ID NO: 116826 - DNA, 1050 bp, Homo sapiens
aaactgtgaagggaaagtactcaagagcattgtttcaaaattcaagtagtcagggttggatttttcttacgtttctcctacagaaggagaaaacagcatagataatttgtaaatcaaataaatatgttcctatgtaattaggaactatttctgtatacatatgaccctataactgatttctttcctttttttacataattctgcagttaaggaagacagttttttagaattataaaagtaccaagagcttagaactcaacagaatccacttgcatggaatagaattaaagacagtgttatggtatgttttaaaataatatttttttcttcctttaaaatgtttgtactagggaacagacatccttggaagagggagaaattccttggttacagtacaatgaagtcaatgaaagcagcagtgatgagggaaatgaacctgccaatgaatttgcacagccagctttcatgttggatggtaacaataacctggaggatgactccagtgtgagtgaagacttagatgtggattggaggtatgtagcacgattttattaggatgcttaattaggctctgagttcatgattctaatttatgaaaattaaatctctgctagctgagaaatattataattttcccatctgttagtcctcctcttcttcaaagctcatttcaaatgttccttcctacttggaccctttcctacttcctccagtcagtgacctcttcctttgacctttagctctcttgaagctcaccttacatcctagttacttacatacttttttttagttttggatttctgacgtttaaaattttgctttatatgccctctatcacttagcataattctttcaaaaatagcttcttaatgaataccacttcaattttaaaacctatggttgaatcagaaaacaataagaatagttctccttccctattcttccttttccttctctatgtaaaatatggaagataaaattttactttccaggagatgttgaaagcatttaatttactttatgcttgacaaagaatagtcagcttcaaat

SEQ ID NO: 116827 - DNA, 1060 bp, Homo sapiens
ggtctgcttctttgcctcatcgattttctggtacagaaaaagatcaatcctcaagtgatgaaagctgggagactctgccaggaaaagatgagaatgaacctgagctacaaagtgatagcagtggccctgaagaagaaaaccaagaattatctcttcaggaagggtatgttcaacagtgagatttatttttctgtatattgtacaagagtggtatattttacattcaaatgttggatatgccattaattgtatttataagccttatgtagaaccagtaggcccccctgattttttcattatgcttttggtattttaaaaagaacaattaagttgaaaatactgataatttcagtatcgtttatggagatacaatatatgtctccacttggctttaataagaaaagttgggcacctaaaatgtcattttggttaagttaggaatgggtgaattagcactgtcattgctcaagggagaaaggacagcctcaagagggaaatcagtgattcattcacagaaatggagacagttagttgcaaaagctagtgttcatattcttgtctaattgcattggatgagatctccaaaatatcagtgattgatgataaacatttttgttctttcctcattttaatgggaaagctctagtactgtaagggttgtcaaacataccatgaagggctagataataaatatttatggctttgtgtccagtctttgttgcagctactcacctctactgttgcagtataaaagtagccatagacaagatgtaaatgaatgggtatagctgtcttccaaccttttactattttatgggtttctagcaagaatgtttgttgaattttatgaaagtcttttcagcatcaatggaagtgatcatgatggttttttacttttgccctgatcatgaagaattgttctataattagatttgctaatattcaacttcccttgctccttgaaataaaccaaatctgatcacagtcatggtttattgttattttaatgggctgctggattctaatattttacatgggatttttataatgagattcctag

SEQ ID NO: 116828 - DNA, 1018 bp, Homo sapiens
ggttactatttttaaaaaaagacaaaacttacagtctttgataatttatttttttgaaagtgtaaggtgcttgtattttttttcccccagttacactttttcttctttaaggagaatcatttaatttggctatacctttgtcattttgggcaaaataaatacttctcttctgcttgctttttatagtcagttataatgtcttatgatgaagttgatgaaattgttacattgtttgccaacccctagagaaaggtagtcttcctggctccttgattttaaattgattttctttgttttgggggtggtcagtggtggaagtgtattctttgccttgaaggaccctggacttttcatagttataaggtattttcttagttatttgtaattcttattcttatttttaatttttttcttaagtgatgtcaatattctgaacaatgatagttttttttttttttttttacaaacaatatatagatgggaaaaaacatttacagttaatagaaactgtccttttaaattgctagtaatgtattgactacagagcctgtggttagggtatgccaaaatgatggaactactttaggatcattgtttaagacacattgaaatgcttaaaagtttcttgtttcgttttgttttaaagaatcatagaataaattctaaaggataatggttctgcctaggactgtacttatatttttatccatagccttaagatatgttttacgatctcaaagtgtctgtacagttttctgtacagattattctatttctgaacagaaactctgtttctatgctgctgtgtcctgttcctctaccctaattccctgcaaaggattatagttgccagggtgcctttttaatatggtgccagctaaaggttggaatttaatagctgtacactcctatttagtttcattttgcccttgttcatctccctgatgtttcattgtcatcctccctagttcttgtatttgtagattggagagatggtgatgctagtcttctcaggttt

SEQ ID NO: 116829 - DNA, 1083 bp, Homo sapiens
ttgttgcagtacatcacagtgaggaaggcagggataccttaggaagcagtacaaatcttcataatcactctgagggagagtatattccaggagcttgtagtgcttcaagtgtccaaaatggaattgcattggttcatacagactcttatgatccagatggcaaacatggagaagataatgaccatcttcaactttctgcagaagtcgtggaaggtagtagataccaggaatcattaggcaatacagtatttgagttggaaaacagagaggcagaggcatacactggtctttcaccaccagttccctcatttaactgtgaagtaagagatgagtttgaagagttagattctgtaccattagtgaaaagttctgctggtgatactgagtttgtccatcagaatagccaggaaattcagaggtcttctcaagatgaaatggttagtacgaaacaacaaaataatactagccaggaaagacagacagaacattcacctgaagatgcagcctgtggtccagggcatatttgtagtgaacaaaataccaatgatagggaaaagaaccatggaagttctcctgaacaggtagtgaggccaaaagttagaaaactgataagttcaagccaggtggaccaagaaacaggttttaataggcatgaggcgaaacaaagaagtgttcaaagatggagagaggctttggaagttgaggaaagtggctcagatgacctcttaataaaatgtgaagaatatgatggagagcatgactgtatgttcttggatccaccatactcaagagttattacacaaagggaaacagaaaataaccaaatgacatcagaaagtggagccacagcaggaaggcaagaggtggataacaccttttggaatggctgtggagattattaccaactctatgacaaagatgaagataggtaaggtcacatccagtactttttccgattgtgtagtaaatgaagtggtttctttctagaaccatgtttgatggctgggctatttgatatgatcagggaattagacattttgacttaccaaatatttttatttactgaatgctaaccatacatgc

SEQ ID NO: 116830 - DNA, 1017 bp, Homo sapiens
gcactgtggctcatgcctgtaatcccagcactttgggtggccaaggcaggtggatcacgtggtcaggagtttgagaccagcctgaccaatatggtgaaaccctgtctctactaaaaatacaaaaattagccgggcatggtggcacacgcctacagtcccagctactgggaggctgaggcaggagaatcacttgaacccgtgaggtggaagttgcagtgagccgagatcaagcccctgcactccagcctgggcgacagagcaagactcgccctcaaaaaaaaaaaagttaaaacactgttaattagcacctatgtttttgccagtatgttaagattattattatttttatattccttttctctttagctgttgctaacagcctcttttgattcagatactttaaaggatcataacttgttactgaatttataaattatatgggtgaatgtgggtttgtactcttacgtatgttaatatatatctgtctgtgattagacaggtaacatataaattaaactcatttgcagagctattgcattaatgatgagcaattagcagtagctcaagtgtttaaataaataaggtgtttaaataaaaacttaaccaaactttcaaaaaaaccacaggttgcaacttctcaaatagtacttttcaaatagtaaataaatgcattaatttcaaaacagaagttctttttgtatttgttccatgataaattgtagtttttcctgattgaaaataggttcttatttgggattaaattatctgatcaactgactattgcaaagaataaatacatcattatttacacacattaattattgttataagccattacacatttttaaaaaatgaagtttgtattcttacagttaccttttagcaattccagggctaaaggaactttactgcttgacagagaagcaatgatagcacagtgtagtagactcccaaatagtttggttacatacctgagtcagtacttctgatatttttgtttgtttacttacaaattat

SEQ ID NO: 116831 - DNA, 1042 bp, Homo sapiens
taacacaagaactactattaaataataatcacagaataagaaagtatgagaaattaaaaagattgttacagagagtaatgacaggctaagagaataaggaaaggctaagggaaagaagtaaaaatgagtgaaatctcccagtctgtagagtgaaaatatgaaagaaaagtttagagacaaatgattaacccatttgggccaaataaagaaaaagtagtgaggaaaaagatgtatttgagacgtgtacaagagtctctaaattaaaatagctcttccagtgctgtgtaggaaaaatttaaacatggcctgccccaaacaagtctttgtgaaattatagaataccagctatttagatagaccctaaatattccagacagaaaaatttggtgtttctacaaaatgaggataaataggtagacaggtaggacacagtgcctttcagagtttagaaaaaatgattttgtcttgaactgtactaaagtatgagggagatagtattttcagatgtccaaggactcagtgtttgcctccaacatatacttgttgaaaccattatttgaggatcttccagtaaagggaaaaaaaaaatgataaaaacatggaattcaaagtagggtacttaacctgagcgggtagtacaatcaaaagatttccacagaagtagctgattaatagcccttgaaaacacgtagactaaatttagatcaggatgttagacggctccgaagagtatctttaagaagaaaagtggaatcacattaaagaaaagtttaagaaacagggtgatttccatgatttctgtactgtttccaattcctttcctctctttagtagcattcctatcaggcatttgcaccaaccatgctaccaaaggtgccgccattcgccattatcctccatgttgctaagtggtcagtgataggccttcatcatactttaacttttggcacgatcagttctgcctaaaacactttcttcacttggtgttcacacttcagtatttttcttttctctcactgccctctgttgttttttctgctat

SEQ ID NO: 116832 - DNA, 1041 bp, Homo sapiens
ctaatagcactgatagctaacaacaaacatggcattgtttctgactttaagggggaatgcttctaatgttttagcattaattatgatgtttggtgaagctttctggtaaagccgctgatattaaaatatttccttctagtcttggctttccaagatgcttatgttgttgtttttgacatttttaaaaaccataaatgagttttcttatatatatttttttgacatcttttgaggtgggtatatgtgggcatcaccagtattccctggtttatattttcctgagagagcaccctcttagaaaatcaaccttattgaggataacttagatacagtaaaatgtacttatttgaaatgtacagtgtattttgttttgacaaatatgtgctctgtgaccaccaccacagtcaagagtggaatattttcataccacaattaagatatagaatattttcatctcccccaaagttcccttttgcagtcaatcacaatttcaccctcaggactaggaaagcacttatcatctttttcttgctataaattggtatcattttgtctagaatttcatgtaagtggaatgatgtaatacatactcttttgtatctggctttttctcttggcatgtttttcaggattatccatgtttttctgtatttaacgggttctcattttattgctgaatagaagtccttggtattgatttactagtttgttgaccattccacctatttacagatacttggattgtttccagtttggggctgttattaataaatagccttcatttgttgaacattcctttattcaatgaacattcatttattttgaatttttgtgaacatcttttttttcttggtaaatacctagacatggaacttgttgggttgtatgatacatggatgtttataagaaactgccaaactgttttccagagtggttgtcacattttacatatccatcagcagtgtatgacagttccaattgctccacatcatcctcagcacttggttatttcagtcttttaaattttagcccttttagtgg

SEQ ID NO: 116833 - DNA, 1021 bp, Homo sapiens
ctcccgggatcagcacctttccgccagggctgctctcagttagcgatgtcaggccagagctcctcttgcagatgcacctttaatttggcctccctcagatgactggtaatcattttgcgcacattcaaaatggtgaggttaaagacgctcagaccaagttgaagcaaaggggaggtggtaaatagtcgttttgcagggaggagagtaatctgagagttccttctccggacattaaaaaaaaaaaaatttacatccgcataggcgcttcttttgagtctgctggttctgtgaagtttaaaattttcattgcaggcttaatgtattctgttttatcatgaaatatttggtcacatttctttaaaatggcagtcacctttgctgaaggctacggatcatttgaagtgtatgtgaataaacctgaggataacagtaataaacgtttaaactgtatttttcagtgttgtaattgtcttttggggttcatgtcatttttatatgagatgaccacttaattttaaaaattcattgcagacatgcaagtttgatgtacacttcaacaatataaataacggactgttaggtaaaatttaaatatttcttttcatcccccagtcccactccagtgtaaagttgacagtttagtgttcatttttcaaaatcttgcaaatgcacttctagacacatacaagtacacgtaaagtttttttttttgagggaggctataccatataccaaacatgtttgcataccgcttgcttattgacttaattacatatgttggacatttttactttttacatataggtctccctaatactttttaaaaggctaactggtatctcgtgagtttgaatgggctataatttattctattccctttttgaaagacatttaattgcagtttctttttgctattacaaatgatgatttataatgaaaataactttctaatttattgatcgatgtttaattacaaattttaattcatccttgattttaaaaaattaaacagtatggaaga

SEQ ID NO: 116834 - DNA, 1451 bp, Homo sapiens
gctgcagctggagcgggcttctctccggggacggtcctttcctccctgctctccttttccttctttccgcgttgccgccgcccgccccctgcgcctccccgcggagcctgggtccgggagggggaaggtaggggcggcggggggcgggagagtctggcgagcggacgctagctctgaggaaactcatcaatccgtgagccccggagtccggggtgcacatcggcccagccgcagcgtcggcggcggcggcggcagcagcacgaaggggctcagtcggggtaggcgggggcggtgccggtgccgcgggggcgggcccgaccgtcccgcccagaagttgtagggcttggctcctcgcgatcttgttcctttcccctccgcttctctgacctagctgcgcggccccggcccgggagctgccgaacccgcgcctcccctgggtgaggaggacacgcctgccctcgtcgagaaaacttttcctgccgactcagttggggcggcggtggcaggaagtgcgggcagcgacctctcctccgcctgccccgcgcgccctgccggaggtcggcgctgagcttgcgatcaagtttgtgggggccccccttcccagttgccggcgagtctcgcctcgagaggggcgcccgaccccggggagggcggcaggccagggcgaaggccaagggcgtgtggtggcgccggagactaggtgcggagcaaggcggggactcgcacccgcatccgagagcgcggaggtcgcgcagcccgggagaagggagcctccggcggctgcttcctagagtccacagtgcgctgtctcctttggctgaggagagtgtcctggccccgagtctatcgaggaaaatgaagttaagccgccagttcaccgtgttcggcagtgcgatcttctgtgtggtgattttctcgctctacctgatgctggaccggggtcacttagactaccccaggaacccgcgccgcgagggctccttccctcaggtaagcacctgggaagggggcgcggggctccgaggggccaggcgtgcgggcccctggttagcggctgctacccaacctcttcctcccgccgcggccccacacccgtgctgggcgaggccaggggctctgtagctctcggacggcaatgatcacctcctgggagccacctcgcccgggcgcgccaagttaacaaagtgctgggcggcgtgcggcggcggcggcggcatcatcccgctcaggaaagtggccatgttccggcattcgcacccggcctgttggggtggcttcgggcacctgctggcgggggaacgggcgcggcgtgaggcaccccccgccagcccggggcccgcgtatcccggtggggtcgttctcggctctcacagggttaagccgcccgcaccagcccagagcccctgagcgcacggagtcgcggaaatggatcaaaccgaacccacctaggc

SEQ ID NO: 116835 - DNA, 1050 bp, Homo sapiens
ttgatatatatttttttctcttttgtgataacttaaatgaccaaagaatatccttgccattttttttgtgttatgctagagcaaatggcttgaatttaattgagattaaagtaaaaactttactggaattattgtgaaagtgaaaaaagacccttttatggatgctgtcatcaatacagagcactcaacatgttttgtcggtgagaggttttaaaaatcttgctgcagagagatgtatcaaaattttaaaagcctctgcttcccctaggtagtatgacagagaaaatagaaacaagcactgagggcatctttaaatcttgagctcagagcttgtccagtgcttcttgatgaggttgaagaaaacagttggaaaaaggtaaggagttttaagcttagcttgatatgttgtgtaattttggggttgaaattactgtaatttttttccctccagtaacctcattttcagattttcctccattacaggaaaatcataaaaagtgatatttttacttaaagtgttttctaaaataatgtcctttggctttggcttgatgatcacttgaaaatggtttatgcaaacatctggacctgggttttctggcaaccttgacattttctctgttcagaatctaaagacatgagtgactcattcagttactgagaaatcttaggcaaagctaattccagtattgtaatatctatccttagtcctcaatgagaggctgaagttctgctttaagcgtaaagcatttgatgaaaggtcaaagtggctgctggaggggaaggctgttggtactcaactgggaggtggaacattttgcatttaagattgcctttctcagattttctgtactggattttcactgcagaaagaaggtattctttaagtgcttggacggccactgaatcctcaagcagatagacattctaagacccctctgtaagcttaaccgttatgtgtgtgacattagccttcgtatcttacagggtaaaacttaagtggcgaggggactgaggcactgaggcacggagagattaattagcttgccc

SEQ ID NO: 116836 - DNA, 1023 bp, Homo sapiens
ttatagggccatgtgctaagaatggtttttacatttttaagtggtttaataatgtttcatgacatagccatggtcattcatctaccaattgtctctgaccactttcacacaacagtggcatagtttagtagttaagacagaaactggctcacaaaacctaaaatatttactctctggcccttttcagagtttgccaatccctagtttaaactatatttctctattgttaatattggaggcaaatagtattgttagatctgttaaagtagatgtgagttaattaaagacaaacaaaattctcgtaaattggttattagataagcattggtcaaactttgtgtttttagagagtggtttaaaacttgtgttatctacatgtttcatagatttccaggtatccttggggaactttgatgctagagcatcgacatgcttgatgagtttgtttctcttctttcacctgaaggttttgcactgtaggactgctctgggaaggaaggttctgggccatgaactaggcaaaattgatccatagcttcaagactgaaaaccatgactttatgactttttggatctgctgtaattcacagatgggcttaattctgagcccagtctgattgcttgggttagttagtcctgagaagggagagctcaggtataggtatcttcttcataagctgtaaatagaagatggaactcagccggtctctgggatcctgagcgttgctcagcttggaggcagggtactttcaggttgtcagcagaggtactggcctgctcttctgcttatcaaagagcagttcttgctaattttcatcattttcttcacttttaaagattatatgtcactttctttgctgtgttgctgtgacacaggctaacaccccatttgtgtcctcacagattttagtatcatctttaaattgcagtatactgagtccgaacaaaatgggggtaatgcgtctcatcgagtagtattaaggttagtgttaagtagagttttttaagtatttgtttttttgc

SEQ ID NO: 116837 - DNA, 1001 bp, Homo sapiens
ggagctaagactaaaacaagagtcaatgatattattttacattcctgatataaagacaaaggccttaaagagaactcaaaaacagaaacaagttttggtgatggcctggcttaagttgactaaaggagagggtaaagaagctaagctttccctatgggacgatactttgaagggagaaagaaaattgctagtgtaaagtacggtgcttatgaaggctttgaatcctggaggagattggcttgatttagaatctttggtgcctgtgaagagtagttgggaaaacactgtaggtagttcaggatcagattgcaaattgccctgagagtttgtctgaagagttatgagttagatggtagtgaatcactccaagttattgaatataccaggaagctgcttgagaaaagcagtgtgagagaattaattttgtagaaaatttcagacctggaaaggagctaagagaatattcaatctagattattctggtagctgtgtgtaggaagattcaagtaggaaggcagctgagaatctgtttgaggtaatatagacataaggcagtaaatccctgtaccagtattgaattggctagaatcgggaggatgaaaaatgtggagacattttgtaaagagaaagaccaaagctttttaacaggtttgatcaagggtaatgatgagtggcttgaatcagaaaatttctcctacctttttccattggggtgttggagactggttgtactatttgcagaaggagatagggacaagctgatctggaaagtcaagttcatttcatttatgatgacgtggatgttagtggaaataatcaagtgggctggaaagccagtgagagatcagggaagggagatgctgatctggtagtcatcagcatagccgagaatgaatgagctcacttggggactgtgcttagtgagggcagggccaagtacatttctgataaccaaaagctgcacatcttacattaagaatattttgtagcagatgttaatg

SEQ ID NO: 116838 - DNA, 1049 bp, Homo sapiens
caatgttttgattttgagggtgcctaactaggtagagattaaagccctttactggagatctgaggactgtaggtgtctttttgaggaggatgatttttggacttaagtttgaaagccaatttgaggcatcaggcaggtatttgaatatatgggtctgtttttcaggggtgaggtttcagcgggagatacaaatatgggagacatcatggaatttaaatcatggagtggatgagatcatgtaagagagtatagagaggtaagaggctcaagaagctaaccttgaggtgctctaacatttagagcttgggagagaaggagccagcaaaggagactgataaacagttggcaggaggaaaacctagggcatgttgtattgggaatgagtaaagaaaacatttccagagggaaggagtgctccattgtgcctaatactccctgagatgacggataaggtaagggcagagtgcttttcatcaggcttgaaacatgggagcctctgggaactttacaaggtcagttttggtggagtggtgagcagatgctgattgtaatgggcagatgaatgaatgggagtttgtaaggaagggggataatgagtagagagaaacttttgataatcccggtacatgaagtgggtggggccctggaggggaatgggaatgtaagatgttttattcagggttctccagaaagacagaactgataggacacacacacacacacacacacacacacacacacacatgagaagggagttattaggagaattggcttatttgattatggagactgagaagttccactattggccatctgcatctgcatgctggagaaccagagaagctggtagcaggacttagtctaagtctgaaggccttagaaccagagaagccaatagtggagctcagtccaaggtggaaggtgcaagagcccagggaccactggtgtgagtctggagtctaaaggctggagaacctggagttctgacatccaatggcaggagaggaaaagcggccaggctcttagagaggatgagaatttgccctttc

SEQ ID NO: 116839 - DNA, 1018 bp, Homo sapiens
cattacttatgaatctaatgaatgggacactgaaccccttcaagtctttgtggtgcctcattcccataacgacccaggtaaaatttgcacttcaaaaagacaggaggttattaagtttctttaggcctagagtcttttaatgagaatctggtagaggccacttctcaaatttttgagacattattctctgacttttaacattaatatattccttttatgtgtcattatgttttagtgttctcattttatcagtttatgtgccattcaaggatagtatctgtgcagtatgaaatggtaataaacaaaaaagaagggcttgcctttggggacaaaacagtatatagttttaagagactgcttgttcattttagtaactttttaaaaaatattgcataggaaaattatttcatgtctatgaggtctacttttagaaaaggcagaatactcatgggaaagtttgaatctttaaaataaagaagcagtattaaatgctttaagaaccttggtgttgattggtttcaggcacatacgaatgtgagtctcagctctctgtatttatcagtgttagatgactttaggcaagttacttaatccctctgagaccaagttttttccctggtagaatgaggatagtagtatctgtttcaatagggtgcaaagtgaaagaatcatgtatggcacaacagtagctgctatcattattgttactgcatatgatggcgtttatttattgggaccacagattcctcccttcccccacccctgaccccgccctgccaagatgaggggaagttgtttcaattataatgggacataggatttgatatacatatttgttggtttgagtacccagtcacagataatttagttgcagcatttttttttttgtggggattggagaggggggtgtatttccaaagacttattttgaaggagtgtgttacttttcttaatatctcgatttcatgattactgtcagaagcactggtaacctaataatttgaaggtttttttcttt

SEQ ID NO: 116840 - DNA, 1024 bp, Homo sapiens
ataaataagacctctttgacctttctcaaagcccctccaccacatactcatactgcacacacacgcctccacgcttgcaggtcttcgcagatgtaaacatttacagcacttttacttggtctcctcactagaatgttagctcattaagggctggaactttgttttattcactgctgtgttgggaatgcctagaatcataactggcacatggtactgagtcattagagtttggttaaataagttaatgagctaatgaatctgactcttcaaactaggatgaaacatttgacttattctttggcgtaggcttttcttttaagttccctccttcctgatggctacttatttctattcttaaaaaaaaaaaaacttatttaaagtactcttttgtaattttatgtactaaaaacaggcaataataagctctttgagggcagggattgccctcgatttttagattttttgtttgtttgtttgcattactattcctgcttagttagtaggtcatcttctgagtagacatccctagtaagtattcctgactataatctcttttggtatcctagtaactatagctgaatctttttgtcttagtaaaagatgttaatgaccctgactctcaaacccttctccacttggaaaaaataattgtcagaaacaaacattttaaaactacagtgatttttgctgtcaagcaaaatgctagagagaagaatccactgacttaataattttcactattccttaacttaacaaaagtaaaatattgacaaataaattattctgtgaaaaactgaattattcacatcatgaaaagccattcttttttaatagaggaaaaagagaaaagtgtgttcacatacactgcaagtcaaaatgtgacactataatgggaaatctttgtataatactcctaaatgaatgtgcaattaggcagtgttctttctaaatgagatttatagagatttgtttgcattttctgcagcaacaatttaaaacaagctttagcatagtagtttgtttc

SEQ ID NO: 116841 - DNA, 1243 bp, Homo sapiens
tcctaacaataatgcaaataggttcctctggtgtggggtaaaatttccagtgacagcatcttcatatggattcaaaaaatgatctctctcaaatatcttcattgaattaaagctgatatgcttagaaaactattaaatgacactgaatcaactgagaaaaacaggttagattattttggaaacctgggttcaaaagcatttagaggcatcagcaggtttctaggttttccaagtctcacagatctctggaagcctcagcttcatctgtgactgtcttcttaccctctcttggaaacttagtcgattactaagttctcttcattttgtctccttgacctcttatttccctctgtttatttcaactgcagtccataaccattttttacagaattttgcagtggtctcattttctgtttctctgcttctactttgcctttttagtcttcacactcttagtacagttatttttgaaagcacaggtcagaaaaccctcatgtcctccctccaaagttctctgtaagaaacaggaatggtttagaaggttttcaataatctgtctcccacttctatttttatatttatttctcaccatatttgcatcatgtaccctgcaatgcagccataaccaacttcctgtcttttccatatgctcttccctctatttggaactaccaccctttttctctctccagatgatgactaatctaagaatctttcttcttttcttttggtaagactttaccatttctttatttccatggcattttattcatattttcactgtagaatctgttttcatttagctttattgctttgcccttattagatgcaaggtacatgtttgaatgaataaatcagaacgttaattaaaactctttcacagtttatcagggaggaaaagcaagcttaacttataatagaagtgttggaattaaaattaatcagcagcgtatttgagtaatagtaataccatttaagattgtatgttaccccataagtatatgactagaagttgcagttgaatattgaaggattaaggagtgatggaagaaacctgttcgtcattttttcatagaaaataccttaattactagatgagaacaataaacactgaggattctgaaaggagggagagagggaagggggaaagggttgaaaaactacctgttgggcactgtgttcactatttgggtgatgggatcaatagaagcccaaacctcaacatcatgcaatatacccgtgg

SEQ ID NO: 116842 - DNA, 1050 bp, Homo sapiens
atttggatcccctattaggataacagtactgccaacttgtaaacagtgtttagatttttaaaattcaaaaaaaattccttagagataaaaaattgaattagatactataattattaaaatataaataactgctttttggccttaggtcatctatcttatttttctcatttctatctgaatttgtgcagttttcagagtgttttcattgttttaatattagtgggtttctgagtcccatgacaactaaaatggagtttcattaattgaaaacacctgttaaatttaaaaatatgtctatgaatgaaaattctaacgatgtccaaagtaatgcaatggaatgtgactgagttgaaatcagccatacgaattagacctttgtggtatatttgtgtcttgatttaggttggttgaagactttcaatgactactttagagacaagactcagtatatttttaataacatggtcctaaagctgaaagaagactcacggaggaagtttatttggtctgagatctcttacctttcaaagtggtgggatattatagatattcagaagaaggatgctgttaaaaggtttgttttaaaacttttttggaatttggtaatattaaagcttaattgtacaatgaactaagtattgaatttttagatggtgaaaattcttagctttatatttgaaacttaaaatatttcttcacataccgttttcgttgattttggttcatctctgaaaaagccatttgaaacttttccatttaaatcctgtgttccactggaagcagtggcttactgctgtaatcctagcactttgggaggccgaggtgggcggatcacctgagggcaggagttcaagaccactctggccaacatggtgaaaccttgtctctactaaaaatacaaaaaaattagccaggtggtgctcacgcctgtaattccaactactcaggaggctcaggcacgacaatgcttggacccagaaggcagagggttgtagtgagccaatatagtgccactgcactccagcctgggtaacagtgcaagactctgcc

SEQ ID NO: 116843 - DNA, 1041 bp, Homo sapiens
ggcctcatggaatgggtccagttcaacagaataattctgttgctacaagaaatgggaaaaaagatgctagactgatagaatcagatgtccactataaaaacttgggactaatagaaaactatgtgatatttaatatttgcattttgtaacatggtatgtaaatcctttcaaatattttatatctcagtataataatgtagttttttatgtaagtatatgtgttttttattgaagttatttttagatatttccttattttaaaaaattgtcccttagagataaaattcttaatccctattttttctttactttttattttgagataattgcaaatttgaagaaatgtataagaatactgcaaaatattctcataaacccttcacccagatttaccagttgttaacattttgacacatttacttaattttttctgtttccgtgttgttgtagtggtgctggtatttcttattatcagaaccatttggaagcatgttgcaggtatcatgcccgtgtagaaaatagttagcatagcaggtctgctatctttagaaaggccttgcttgcaagattggcccttggttagtgtctgggaacatggatatcctaacgataagagtggctcactgtttttaatctgtttgtacaaacaaaatagtttgtgctaaacaattgctttccttctgggagtctgaattcttagtatgtgctgaacagagggtgcctacatgaccagcccccaacattggacactgagtctgtaatgagtttcctggtcaacagcacttcacacatactgtcacagtttcgtgctggagcatttaaacacatcctgtatgactccatggggagaggacgcttagaagcttgcacctggtttcctctggacttactctgtatgctttttccttttgcagatttttttttctcatttcactgtaataaattataggtgtgagtacgacaatatgttgagacctgtgatttttcttaacaaatcaccaaacctgaaggtggtcttggggaccctctctacacaatgcc

SEQ ID NO: 116844 - DNA, 1048 bp, Homo sapiens
tccaggaagggccctggtcctgtttattctctacctctagttaatggcagtggctttataataggtaaaagatgttaatggctaaaagatggcagtatttatttgaactctaactgattaatttcagtgagcatcctctgcctatgtggataggcagtggcacaatcctcccttcatgatatcttgctgggaatacttggcagaggataatgctgggtagatccttggtctgatatctctaggagactatacaatgacaatgagtctgaatgtgttgtgacttctttttatttcatatatcaattaaaaaaattaacacttatcatctttatccacaggagtgaaacctcggtccggctgggctattgatccctttggacactcaccaacaatggcttatcttctaaaccgtgctggactttctcacatgcttatccagagagttcattatgcagttaaaaaacactttgcactgcataaaacattggagtttttttggagacagaattggggtatgtagggtttgatgaaagttgatcccatttggcctagatactatttcacaagggttatgaactcatgccactgtgggttttgttcactgtcagtcttgaaaaatcaggtggcctaaagatagtcactctcgtaattatttttcccatgtgcctgtgtcaagattcttttaagtaataatgcagatatttatagagcataggagaatctttttatgtttaaagaaagtagataaatataaggagttagtattttgccaataatgctttcacttgcttctgttttagaaagcacgttttatcacaaatttgaacatgcattagaactgatatccagtcatatatcttatattcagccagtgttccttccttctgtctctcgtctctacatcttgtaagaattgctttttaaagccttaatcctgtcctcctaaaacagccctaatgtcaaaataccacctgtcttcacagtgtgttctgtggccacgcaggcattctaaggatatacttgtgcagctctttattaggagagagga

SEQ ID NO: 116845 - DNA, 1948 bp, Homo sapiens
ctaaggagcatattaatttgaaaaacaaagaatttgaagaagccctacttaaacaattgcccataaatatcagttagtatgaaattattgagtacttttatgtatttcagtattgtgctaggaagaaatgttgaaaacatccttgcttatagggaaattccagtctaatttgataaaatacggatacagccaaatgtagcagataaaattaagtatgcaaattagctgcaaaagagtagcgcataaggagaattagtggggtatggagtatgtccttatccataggagagaagagttttaggacttgtgacaaccttttgtggcgactatatgctcatagcaagcattagtgaccagcatctacagtgtcaccgttgtgaatatgattcagtgaaacagctgacagcactgaagtacatagattttaatagttttaaatttggaaaataacagttaactaaattgataaaactggaatattttaggacttacctgataaatttgaacatgttgctttttaaaaaatgttttcgaattaagttgagcttgttcacgtgttcgagttcttaatgaagcagttattttcacttattaaaaatgtaaatttttttgtctttctgttacgtaagcagtacatactcattgctgaaaattggaaatccatacataaataaagggcgggggctatttaaaagctcaggatcatattcgcaaagatagcttttaactactaggtaggtcctccagtctcacttgttggtaggcttctcacctctccaggccaacatgtgataacattgtagttttaattaaaagtaattctgcatcaggaatcagtgctcattttccatatcttattcgttttgtttttatttttgtttcgctttttgaaaattactttttcttttcctgtgcttctttgttggtgaaaagtcccattgactgactcattcttggtaaacatggggtgagactgtagattctcctgggttgcacatcctctcctcaccataagaggaaattttctccaagagtgaatttctccagtgtttttataagtctatgctccacacttcctttgttcttccatcccttttttactccgttcttctcacccagcctctgcagctaatatcatggtatctctcagtgaattctgttacctgaattgggaacagttacggcaggaactggcagccagggatggacatagttttggatgagccagctgtaacttttacggctgctcagtttgtatccctcctggtcagctggcgctggttcatgctggggctttcctgtctctgctatgcttagatagaagaggtagatagagactgagatgtgtgagtatcttccttcagacaggtggccattaaataccgctggggtatatgtactggaagttaaaggggctgctgatttagcacagagctaaatcagcattactttgtgtaaagtaatgacattttgaatattttttgggaaaacagattttataaatgcaggtttgtgtgttggctctttattttagatctgggatctgtcacagatattttatgccacatgatgcccttctacagctatgacatccctcacacttgtggacctgatcctaaaatatgctgccagtttgattttaaacgtcttcctggaggcagatttggttgtccctggggagtccccccagaaacaatacatcctggaaatgtccaaagcaggtatgaaaatgcgtatttcataagacaacatcttgaataaagtagccacttagctgctagttgctgaagggttgaacaaatgggctttattagccaacattatccttgtttgaagtattcattcaaaccagatctaaagcaacttaaaaatgccagagccttgactatgccggttatgtgttacattttaatggaaagtgaacaatactagatcaatatacaatgga

SEQ ID NO: 116846 - DNA, 1044 bp, Homo sapiens
ttctcatttctcttaatgtgtatatgtgagagtaaatgatattctggtgatgttcatggtctatgtgtgtgttgctcttggagagaagaaaggacagagaaatttatccaatttttcagatttttttcactgtgctattcataaataagcctgtcttgctgccaacaggttctggcttctttttcaggatcatctagaacaaggactcctgataccagtgtagacatggtattctttgatgattgagaacgtaaatgtgttatacgggatacattggttgttttatatgaactattattaccaatatctttttcataaattgcttgtactgcaattatggattaaaaaatttgtaaagtatcaatgtcacaagttttagattataagctaaagtgtttgttttaaaataaaaatatgacttttatgcaattagggctgctgaaattctttactatttcgccctgagacaagctcacaaatacaagataaataaatttctctcatcatcactttacacggcactgacagaagccagaaggaatttgggactgtttcaacatcatgatgctatcacaggaactgcaaaagactgggtggttgtggattatggtaccaggtaatctaattatagaaaaatcatctttaaaaaaatcattaaaattatgggtaataagattatatcttttggtgaagttgttagtgtatatcaaaccacattaacaatgatatccctcataagtattactgtatcaaaacagcactgatattcaaatattaagaaatctgttgacagagtcccagctgcaccaactttttattgcaatgcatttctgcaaatagggtagtaaaatattattactactgtttaaagctgatcctattttcttctaaataacagtgtggagactggagttatcttcttgaccaaggacttggcatcaaataaaacatagttataatgtagagagataaagattcctacttcattgtatgtcagtttaatctcatcctatttcatatccaattgttcttgtatacttcttt

SEQ ID NO: 116847 - DNA, 1061 bp, Homo sapiens
aactgtgattcccaagtgatttttcccgaaccgtattccgtattaataggataagtgtatgtttggaaattagaggccctgaaaaaaatcctgtattaatgaaatgttgaaacgtttagaattttgttttacccaatgtttcccaaatgtactgtgtttcattttgttttgttttaagcaaagcagctctatacatcctgagaaaacatttggggagtgatatactgtagtctttagtactcatcttatgagaaggctgcatgtgtgcctttaggatgcagacattgatcctggctttcactcagtttaattaggactctttaatacatctggttttaggtggtggagaacatgactttcactctgcagattcaggctgcctaataaagatagccctgtagacaatagaaaggaacttagattgagggtcttgctgtcataactgaaccatattcgtatggtgttttagtatggtgaaaacacttaatgctgtctaggaaaacatttgaatatgttgggaagtttagttagattatggcatgaactcaaatccataagattttagcattaaaattatagatttgccatgtaaatgtatttaattaataacattgatcatgatcacttacatctctgaaggaaatattaatgctctgcaaaaaagaagttaacttcttttataggttttcttgttgttgttgcatgacaacaaaaatgtcttcaaggcatagatccaaagttgctttctgtattggaaaaaataatataattgaaaacgtgattagcgaggagtttctacgtacttctccaatatgaatttgcctatggatgcctggtctgtagagccttcaagaaacgtaactgaattaggaaaaaaaaaaaaaaatcttcaagcaagttctttttccatgagtaatgcttcagcagtagcggatgtatttcagaattggtctggaatcagtagacttttgattccttagacataaaaatacaatttgaatatagttagtaatttcagtgaccaaaaaatttaacagggataaagacaatttcattattca

SEQ ID NO: 116848 - DNA, 1646 bp, Homo sapiens
cttgatcacattgatgaaagggcttccactgtgtccatattttgcaatcaatttggagactaaatctgccagaaataaagtaggcaggaacaaggaaacttaacgatagatcattgagctaggaaagtccgctcaaggaaattgctgttggtggtggcatgggcaagaatactgtgatattctttgttgaagaaagaagccttccctttgttcagaatcagagctggtatagaagactgaataccaatcaggcacagccaccttggatattaaaccttttggaaacttgcgatcaggctggatccatgcatgtgagcctattattcacccactctttttctccatcactgaatcctctttacatccttcatgacattattaacaaactggccatgtcatttattccttattgtgtgtctcacttggtagactagcagctccatgagggtagagagcttgtttggttttgcatcccctggcaaatacctggcacacagtaggtgttcaacaaatatttgtcaaataaactaactacgttagagaaggacttcagctaatatcaaaataaaaaggaccaagggtagttttagcaaacacagagtctaggtaaatgtctacttctttgaggataagtgattgaaaggttgtcataggagagctgtgaaaaagctctacagactgattaaaaaatagggtgcagcatgaagactcagaagtgtagcttacttattaaaatgatttattacagagaccagatgaaaatttttttaaaaaaagaggacctggaactctcaaaaagttttgagttataatctctgagaaatatgaaacaaggtgaaacactgaaacaaaaagatgacaaaaaatgaaaatgaaaatatttggaagaggagaggagtgagataaggagagattgttggaggggcaataacagaccatcttcactagtgatgctgaagagtaaagctgacactgaaagagggtatggatgtgaaaaaaaagtccatgagatacttttttaagaatgtagacaaaaggaagacaaatgccaacaatgagaaggaagatgatgatcggtatggaggacaagattccaacaaaagaattaaaaaactttaggaaaaaatacagcagaggcaatgatcaaagatataattgatgaaaagttttctgagctgaaaaggcctccctttatagatgaagagggataagtgctgggtaataaaaatgaaaaaagagccaccccgagtacaccatggtaacttagttcaactaaaaggaaaaaggacatattaaaaaagtgcccaggcagaaagactatattgtataatatagaacaaacgctagactgacttagacaggaagactatgaagttttgaaatcattttatactcaaagttatctttcatatgtgaaggtagtagagagacattttcagatatgaaaacacttataccacaggcacacttcccatatttttaaaaagaaattttaaaaatttcttgatgaggtcagttcagctgactgatagatgaattaaaattagcaattaaaaatgaagaattaaaaaggcattggaaacaattagacgtagtgaaatctaaatcattattgtcaattttattgtcaaactaaaggtagaagt

SEQ ID NO: 116849 - DNA, 1114 bp, Homo sapiens
gaaggagcagcatctgcaaattagattcattaactagatcaaaaagcagctaccagattttctgtcagctactcttccttgcccacttcggctcagggactggagttgtgttctgaatactctaggagcaggtctatactgaataaatcagtaatggttgttagaaatgtctttaaaacatgttctcaagacttatcagttaggaaaatcataccaaacacaatgaaactgaaaaattttctacatattctaaaaccaaaacataattagatgctgcaaaattaaaaatttaaagagataaagaaaagctcataaaataagagcatatatatacaattgagatttgggttatttaaatattaagaaaatagaatatttattcttaaacatttcctgtttatttgtaggactatgtgggcctatgttaaaatatagttccttattctttgattcatacattcattcattcagtgacaaatttactttgtatttctgtcttgggcagcactgtactggtatgtgttcatattttcttgcctctttcatttcttcttgattctttcttgctcagaacctacacaggcaaggtctcttttctaagtgacctgtgatttatactgtactgtgtagactgcccataagacaaaccctcagtgccttacctgaaatcttcaggggtagatgtatgtgagggttcagaattctttttaattttaggaaagtactgtgcatatgtggcatattattgcacagtctcctttgaaatttctgaatgttccgatcaaaaaataaagattctataaagcttcatgtcagttctgtttagatttactaccaaatgagttataaaaaagcttttgattttttcagagctttttggatttcacagtttagagattgtagttctgtagagtattggtttgggcgaattatgaaattgcttaaaataattagcaagcttcctaaaaagatgcattatagcagaaaccattttgattcttctaaatggcattgattgttactatcatccatacttgggtgcctcagcttttctttgttctgattcccatcatttcaaaaatctgttcaaaaatgtctgtctcttaagaaatct

SEQ ID NO: 116850 - DNA, 1123 bp, Homo sapiens
agtgctttaacagcataggattttaaatcattcttttcttcaatttcacatgaactttaaaagaatcttccttaccaggcccttataatttagtctgctatgattttgttcttaggtacaaaattcttttagattttatttgtgaaagtaattaaacagatagattgcatttaaagttatattttttatttttatttcttgaaaaataaaggcagagtagcttaatgttctgagaccacctgctaaattgcctggttagtctgtgttttaattgattttgtttatattttaagtcaaactttcttaattaactaattgcatggttctagtttattgtcagattattatacagtgaattcagtttgcaaagtgtgttttaattgtgtgttttgtgtggtgagattaaacttattttgcttgtttcttataaataacatcttcatccatcaaggaccataatcagaaaatgcaaatgatggggaggaaaaacaggtgctcatatatatagaattatgatgaggtattttgatatattaaaatatgaaggcagaattgtcatggaaagtaccatgtataatggataaaggattataataatttctagttaagatatttggaaatacataactgtatgtaactgaagaaaaactttgaaaagaagacgaggtggtgtcaaagaatagctggtgttagttttggtgtgtttgctagataatataaattttgaatgattctgttttgctattgctgtagcaccaacacttgaagttgtataaagtactgtgaaaatgttaaagtaaactaaatatctggagtatgagtgatttttaaaaaatgatttctattggggtgggagtaactgatggttacgtgagattacttcagtagcttattgttttcagtttcttgcaaacttagttctctgtccactttccacttcttttcctcccagtgtccatcatgtcttctgaaatagtaacataaagctaattattaacccaaagcagttcagaacatagactaaagtgatgtggcatatttcaaagtcttccactcttctgaactagattttttttccttctaaatgcagattaataaagcgtgcacaacaagaggaacaagg

SEQ ID NO: 116851 - DNA, 1065 bp, Homo sapiens
ctgtgggctaatttaagtgttctgagtacatgaaaggtagactaggctaagctatgattttggataggttaggtgtattaaacacctttttgacttacgatattttcaaattctaattggacataacccaatcatgagttgaggagcatctgcatttgcatataacctgcacacatcctcttgtgtattttaaatcatctctaaattacttgtaacatctgatacaatgtaaatgctatgtaaatagttattatactatagtttttatttgtattttttgttttttgtttttttttcaaacattttttatctgtaattggttgaaactgtggacatggaacctgtggatatggagggccaactggattctctttttaaaaaatatgatagtttgttggttttaccaaaaatataaatggtttgcctctcagtagataacatttatctttaataaattcccttccctatcttttaaagatctcttttcgagcacatataccgccattgggactgaaagtgtataagattttggaatcagcaagttcaaattcacatttagctgattatgtcttgtataagaataaagtagaagatagcggaattttcaccataaagaatatgataaatactgaagaaggtataacactagagaactcctttgttttacttcggtttgatcaaactggacttatgaaggtatgttctgaatagttctaaaattcatagaatgcttatcatttttgctacaatgtgtgtagattaattaggcaaaaggggaaaaaagtcttaagtagagctgtatcaaatactcttgagtaaaaggaagcatgagctttttgcaccttcattgaccacttgctgctcacatgtatagtctgtgggtggcgctactccgtggtctgtgtgtcactggtccaccagataagtacagaaattatttttttaaattgtcatatacatagaaccagatgcaacatgcttaacatcttagtggtgagttgcttattattattttttttaatctttagcaaatgatgactaaagaagatggtaaacaccatgaag

SEQ ID NO: 116852 - DNA, 1700 bp, Homo sapiens
gaaacctgagaagggagataatatttgatgatgcacaacatataatctatgtacagcccaatccttgtactttgagagttttgtgataggttgagaattttcataaaaaggtatgccttgtcctgaaatgtttgtaggaaatgttttcagtatttttagtattaaatcaatggaagatatattttaaacatatgagttagatgtgtgctgtttattttcttttattgcttacaactaaacttggtagtttatggagtattttctaagactgttatttataaaatgtaatgaaaccaaattattcatatatttttatattaaaccctctcagataattctgttaatatgatgagaactggaaatatagacctcttaaacatttttgttttttcttgataggaagaagaaaagaagtcggtcagttatccttctctccttagccacataacttcttctctcatgaatcatccagtcattccaatggcaaataagttctcctcacctacccttgagctgcaaggtgaattctctccattacagtcatctttgccttgtgacattcatctggttaatttgagaacaatacagtcaaaggtatgtctcaaaatatatcttataaaaaattactgtttattatgtacttgttttaagggggtaaggaaaggagaaaaaaataatgtatgctttactatgctttgaggaattattaacagggcttcacctttagccaaaagcttcatgcctttcatttgactattgctgtatattttagagtatatcctgatactaatttactcttaagttctgtatggcgagcaggtcaggaaataccattagtaggtgggcaatctgggccttaagtttagcactagtgacttttcccattcatttctccttgttagacaatatctctcagaagctagagaaatagtacttagttatttctatatcagaggctttgtattttcgtacctttctcttgagaatcactgcaactcagtttcccattagaaaaccaactgtttagaagaaatattagaggaaaagcatggggaagttttattaggtatgaaatttaatttagttagactgcagttatatacatacctgtttttaacatcaaaaagattgcatttggaaagaataagaattagacatttgacattgttcttatgtgttgcaaagctgttttgatattgcaaattgacatagatttagctggaaatagtaagtggttatggattctgtggaaaatatctcatggtaaatggcctaagtatgaaaagaagaggatgctcatgtttaaagacaatataagaggtgagaaatgtttaatgtagaacaaagaactaaagcaataaagtaaggataaatgcctataatttggatattagagatttacaactttatgtctaagatataggagaaaaaatataatttttttttctttatagatttttagttgagacaattttgaaagcaaaggtcagataaacaggggaaaaatagcaatagtatattgtacatgctatacctgtcacttgggagaggcctaagttcaaaagtatttttttcccaaggcagtggttttggcaccttgcctaaataatgttttaacaaagagccataaatcctctagagacaagacaaagaagaaagcaccttcaggcttccaaaaggtaggaaaatgtgggaggata

SEQ ID NO: 116853 - DNA, 1071 bp, Homo sapiens
cttggacaagatgattgctatttcagttcgtttttacaaaagtgatgtaattttagttttgagagaaagtataactttttctatcagtgaaagttaatttttatgacttttatctctatttttgtattgtcggtttaaatctcttgtagaattcaaatgtagaattccaaaggtgtttccctccccacattttttgtccccttctgttgctataaaggccttacatattcattattccaagagcaaatgtgttgcaggaattttagccatgcatgctatcaagtgatatgtaaggatggacccatgagttaaaatggacaaatgctttaggttagtagtgatatgtgcttttaaaagagcttaatgaagagggtttctaatctgttaatctgaatccagactttgttatgactttgatgtacgactctagacatataatttaggagttccctgagtctttagctacaaagttgtaatgtcaaataaaggaaatttatgctaagggcttcctgtgtgccagacatttggccagatctttgttaagctatttcatttcatttcatcttcattttatggaaaaggaaaacctggttttgctgaaacccacagctagtaaattgcagagcaaggatccagatctccagctgtctgactccccactcaggctctgaaccactcttactacacagctcgtgcactagcgcattctgccctacaaggcagtgtgaagctacttacatagtattttcaacaggttaatccacacagtgactccatgaaggaaataatacaagcattacctccattttacaggcaagaaaatagatatttaggaagaagaaattactatcctaaggtttcacagttggcacatgatagagtcctgtttcttattcttttggagatctaatgataccataaatgaagggttttcctatgtgttatttttatagtacatgggcagggtgttttaaatgtattgaaatgaattagaaatttttatcatatgatttaaaattgctgtgtgtatcatgtggtcttgtgatgactcagaattccttaaatgactct

SEQ ID NO: 116854 - DNA, 1050 bp, Homo sapiens
tcctgttcccttccaagcgtagtctgtatgttcaagcatgtatatatgtatatttaattcacccttttttctgtaaaagagaacttatatatgtatatttaataacatatatgtatatttaatccacccttttttcctcaaaagagaacttcaacatactgttttattccttctcatactaattttcacagaatatgtagttgtgctgctaatcttcaaagttgatctaaatatgtaaattttatcatttacttttcagatattggtacagaaacttttaaacaagtttattgtcgaaagtctcacaccttcatcactatccttgatgcattcacctcccggcactcagaatataagtgagatcaacttgagtccaatggaaatcagcacattccgaatccagttgaggtgaacctgactttcacatttggattgagaatcattggcttttatacctttcttggtttgacgtgcaataaagaagcacattattttagcttctggctactgtgagaacatgaattctgtgattctgtgggttttttcttttttcttttaccagtacagtaagaaaaaaaaaaaaaaaaaaaaagccatgctatcaatcaagattctttttttttaaactttctcccatgaactaccaccatcagtatgaattgatgcaacaaatgaagaaatatttaaagacagcctctcaacagattgtatctcaggttaaatgctaactaattatgtctgtgttgggggttgcgaagagattcttaaaagtatctgtgtgttgatcatcagttttacaaaaacacctatttggctgaaatggaataaaatgtttgtgggtaaaagctaatggccaaaatggttgcaatcattcatactagttagaaaaattatgtgttgaaataagtggaaaagtgcaatccatccacccttatgattaacgtagatgatttttatacctttttctgatgtacctcttgaccttctccttcccttcctaccctttctaagtatttccagaaatacctgattttgaatcattcaacagta

SEQ ID NO: 116855 - DNA, 1036 bp, Homo sapiens
aaatagaagcaattccataggtaccataaacctattttaggtaccacaaggtgtctttttacacagctcatttgaatacaggtgttctgagaaggggtttctattttaaaattaccatatcaaaataaatgtgccttatttttttataagtcttgttaaatcagtgtccatattactgtttggggaagggggaatgttgtggggtctgggagagggtgggtactttctatgacacataaattgtgtaatttttgcctgacaatgctggccacattctgatctgtttcattaaatttgtggtgatgttactctaaacattttgactatttgaatgtactgagatgtcagaaaacaaaacaaggaaggaaaatattgttaattaaaatgtgctgctgccaaggaaactgcaacttgaagcaaggattttgtaaaatgcaaaatccagctactgtttccatttcacagtagttaactatattaaagagagaatgctttaaaattgatcttgttttgaaacccacttttatgtagctcatcatggtttatcttactaaggaatatgtttgttcattcagttctcaacttttgtatgtgctaaccttaaagtgaagttctgagcccgtgtgccattacagtgcttttaataaaatttatttgggattattgtttccttaacattaaaataatagcgacatttagactatgcaattttagcatagaaaggagtctttgagtatgtacagttttgaaaattctctttgagataattgatttcatattctgtggctttcaacctccatttacctcttgtcattccaacatctttatagagaaataaaaacccaatttctctttcaccatttagtttgattatcatctggattttcactcaagatgcagctcctaagattattgttatgttaaattcataaactccttcacctttaataattaaggaaacaataccagtgttgataaagatattacaaggggtaatttcatgcaataaacatgtaccgtaagttttcttccacat

SEQ ID NO: 116856 - DNA, 1271 bp, Homo sapiens
aaaaggacttcctttttgtggacatctacagatgttagggttgccagaagcaaatcccaggaatgagatcagtattttcattgcatcttaaatgtataaccttcctgtgggagttcagtttgtctgtggttaagtgggtgtgcttaatcattctcgaaattgtgatcagatgaaataaaaaaaaaatcttgatgcaataacagtggttttgccacttctggttgtttgcgatggatctgtcccatgtcagtctggggttttattcagcttgtgttgctaccagcagttcacaggtaaagcagaaattctctttaaccagcaagtttctgctttttaaggttacttttagaataaatcatcagggaaacagagaggatgctttgctttgggttgtagtcaaaaactgattaaataatttaatgtctctggcacacactaaaaaccatacacttcagttgtgatctcagtggcatatttatttggttaggtttcgttacatttattattacagatgttcagttgaccaagtagttcagtgttttctttcctttttttggaaattttagtttgagtttgtgactgcagtgttcaagaactcagcatccttgttttctacaaatactgattaaaataaaatgctgtaaaatgtgatgtaaaacattatcatgatcttcccatgcctttgttgtacttgtgccgaagtgttttgatattcctttgtctggaagaaaatgtttgctttcattttgatcattttgttcaccttggaatcaacaggttttgatattttctcttggaagattttatatctttttgggaatatgtaatataagatctctaataaaagataatcttatcatgtacatggtcctctagagtagttcttaatcctattttgtaaacatgtattaaaacataatgaaggggtagggggagtagtgagggtctgttctttgttccttcatgatggattgggtttttttttttttttttttggacacagagtctcgctctgtcacccaggctggagtgcagtggtgcaatctcagctcactgcaacctccgcctcctgggtccaagcgattctctgcctcagcctcccaagtggctgggattacaggcacccaccaccactcctggctaatttttgtatttttagtagagacagggtttcaccatcttggccaggctggtcttgaactcctgacctcgtgatccacccacctcagcctcccaaagtgctgggattacaggcgtgagccaccatgcct

SEQ ID NO: 116857 - DNA, 1043 bp, Homo sapiens
cataccatctgtagtagcatttaggtatccagtaacctactccaattaattaaacagctagcctcaaactatttaaaacttgaagagatgggggagagctgtatttacccattttggttatccctaagtaccctttcaagttaataatttagaggtgctttacttgtagttattggtttaataaagtgctctccgtcagtaacagtgaataactagttttacagcataagaggtaaagtcgcaggtggaatatcagctgcggccaaccatggaaaattttttatttgattggaatcagaagctgaaaactggtagcccttaggttctgtccggatatttgtttcattaggccaagacaatgtgttaacagtttttgaaatagttgtccaggactttaaaattggaagcttttatataaaatgagaatatctttttttgaaaaaattacaacttcaaaaccctgggcccacactctaatgtggcaacaatgaattggagtgaaagcgtaattgtgctttaaacactctacaccttgcaatttgccacagaccccagcagagtccttcattcatttaaattatttacctggcccctatcagaatttgactttgaggtttaaatgaacagcaggttaataaaataaattttttaaaattgttttgagactaaacctaaattgtcagtaattggttatcagtaatcttatttttttatttctatttttttttactttagaacagctgaatagatttgctggatttggtattggacttgcaaggtaatgttttatctaaagacgtttacagcttttatttattgaatttagagtttttctttaatttacaatattaaatgattattattgcttcctttaggttgtttctttgaagcagcagcttaaattttgaataatattttgcagaaaaaaaatgaccattatttaaaatatataatttgatagtttttccagtaaggatagactagtcatccaattttataaacacaaagtaattttgtaatgagtattgtaactgttttcatgg

SEQ ID NO: 116858 - DNA, 1044 bp, Homo sapiens
tcaaatgactctgctgataggaattctgttattaggacattttctgaaagaaataatttgcagcattaaatgccatttaattgatgtgccatttcccacattaaacattcagagatctagtttcatcttatactatagacattaatattatgtattatgtattgtttcccttatttactagtatgcagatctggttttcattcttttcatattgaatttcgttatgggtagaatcatttgcaaacatttctagacatttttaaagatctatttaatttgtttaagaatggaaaacataaaataatgcatgattcttcaggcaagaataatttcagaaagatacctgttgtaaatttaatttatctctatgtagacatacatatacataaattatttttatatagtctctttacagaaaatgtattggcacatccttgcattgttctacgccgccaatgtcaggtaaatgtaatttctgtgatcttttgaagcaatacttctgaccctaatatgaagggcagaactcacataaatgacatgaaaccaggtaattgttacttcatgtgaaatgttccaaactttttggtctcaaaacctctttaaagtcttaaaaaaatattgaggatcctaaataactttggtttatgttggtcatatctattgatagttaccatttcagaaattaaaattgggaaaatttcaatgcatctatataattcattaaaataataacacctgttagtaagataatatgtttttatgaaagtaactattttgcatttttgcaaatatctttaatatctgacataataggagagagccagtttctctcgtatgcttctgcagtcaatctgttgcatcacgtggtttttgaaagaagcaaggaagtttagtcttgtacacatgtatagttgaaagcaggagaggagtatattatattcttttgagataattgtgggtattctttgcaattgcaccaaaactcactgtgtcgcagtttcttaaaggttatttgcaatgtgaaatcagaaatcattttagtga

SEQ ID NO: 116859 - DNA, 1398 bp, Homo sapiens
aaaacagtataaatcattataaattaatctgttcatgcttagcactgaaaagtatgtatacagaaataccattaaagtagcattgactgtatgtgccacagaacagtgtatttcagatatatattttacattgtagtaatattaacatggagatccaatggatacattacatataagtaacaaatatattatttttaaatgttttatgaaataataccattagaatgtaatacattctaatattttattgtttcacataataaatattgttttgacactcccccagttgatttcatataccagtcagttgccaagtacagtttgaaaaatgcttgcctaaaatgaacatgagttgggagatgtaattcagttgtttaaggcaaaccaaatatcaaataagaccctctttattatatagtctacagtactgtgtgtattatgcattggtcttcagattgtatttatataaccatacatactgtacttttaataggttatttaaagcacttttaagagtaattttgcttatgtgtaatttatgttgactttggaattaacttttgtttatactgcaattccaccatatttctttcatggctctgttatttcttgacaaaacattaacagaaaaaaataatgaaatatcttttttacaggttaattaccatgctcagcattaccatctcactccatttacagtcatcaatattatgtacagtttcaacaaaactcaggtgagaattttgtctggattctattaaaggtttatataagtgtcatttgggtttagtaatcattaaagcaagaataattactttcagtttggtcaataaaacatcttaactgttgtagtaaaactaaagtagcacaacgatatgtttttgaatctttcaaaatgtaatttagcaaaagtacaatttaatttagcaaaaccacaaagagctgtgctaagatgatgtctctgctatcaagaggctcatatttattcatggagacaaaatctttgaagattgtgctgcagtaagataaaggcaatattagaagtacagaatgctgtcagaatacaaaagagaagtaccttatcaaaactgggcttgggcacagtgtatggctgggaaaaactttgggaaaagaaaggcccgaattgtgtgcttcttgttgagaagtctgactcttcatgatgaggatagagaaaaggtttttaaagtagacgtgtgaaggcagaagacaaagagagatcataatgtttgggaatggatttaatggagtacaatgggagcttgaagtgggggttgaagagtaagagaaagatgaaaaagtagccagagaagtaagcaggatccagattctaaagcaccttctaagaactgcacactactagatcttaaaagctacaag

SEQ ID NO: 116860 - DNA, 3047 bp, Homo sapiens
aatttaaaatgtacatgttctttcacttccaggaacttatcccacatagatgtgcacatatatatgcaaaaatatatatacaaggatgtcctatgacattgcatataatagactggaaatgattaaatgtccatcactagggtaccagtgaaataattatggtatattatggtgaaacaccttgtaacctttaaaaataagagggtagctctgtgtatactaatgtggaatgatctccaggatattttttatgtttcaagataatactacctgttaaaaataagcaaaacaaaaatatttctataacatacacacacagatatacttgtatatgcatggattatcccgataaattttaaaactgctgctgaggactgggatgaaaaggagacagacttttcagctgataccctattgcttctttttaattctatcatgtatatctattaataatatagataatatagataaataataggagtattactgatggtatcatgcaaaggggcaaaaccagagacagtgaaacttgtagtcaaattgatataaagtaatagtgttaagtatggagaagagcatggatttgtaagatactaagggagtagaatttgtagaacctggggactgattagataggaagagtgagataaaaatgttttctagatatattgtttggacactaggatgatgaagctgctatctagggaaataggaaatacagcagagaaggaaagaattggtgtggtatgagtgagtatgattgggttaagttgtggatatgtaagtttcaagttaccttgtgtcatccacaggacaggactagtagggagttgaatatatagatattagggatatttaataaattagttaatcattaggggttttaattaataggaatgttcttcttggcctaagtataactttaaaatgatataaaattaattgtagttctctactaatatttctattagaataatgttttattggaaaatgtctacacaatatcaagttttattaagatcttttgtgtttcagatgtaggtattaacagaaataacatgaattttgttcaatttagggacctagagccctgtggaaaggaatgggaagtacatttattgtccagggagtcacacttggagcagaaggcataattagtgaatttacacctttgccaaggtaccatttttagcatttcttcagtattagtttcatgtggtgatgtgtttttagatgcaggcggtacatgtgcaggcttgttacatgggtatattgtgtgatgctaaagtttggacttctaatgatcctctcatccaacaattctcaattgtgtaaacatcatacccaataggtagctttcaacccttgtccccatccctcccctattatattgttttaataataaataaaaaataccttgaatctgaaaacttgtctgaagtaactaaaagaaaaaacaaagaataaaattaattatatattattaaattagtatgtgataaagaaaatgtgtcttggcttagtatctattgagatgtatctttcagcttctactgctatgtgccagcaactgccagctgaggaacaaatgtgggtatgtgagcaattcccgctctttaagtattcatttaatgaaggagacacatgtaagcaagaagaggtaacatgtccaatgtcacggggttggacagtctaggtaataaaagaagtgtcttatgtttggaatattgggtatgtatgaaattgaatatcaggaaaagaagctgaggtgctacattaaaatacgattgtgcctttttaagtttattctctatgggtttggaatgtgtttctttttttaatatatagatgttctgatcaagatatattcaaatggcagtataaaataaatggagttgtatagacagatttatggagatctattgtaataatctaggcgaggctgagaaggttctgaactgtggaacagaacagaaagggatgagctggctagacatttctgaagtatagtcgatggtcattatgttagcttggtaattggagataggagagaatgagttgtcagtagtgactgagatttctagattggaaaatgttaaccaagatggagaattcaagaagaagaaaaagttggagtagggaagaagataaagaatttatctttcaataaatgaagtttgagattcttgcaagacattgagggagagggacatgtctcatatttggttggaaccatggatcagagtaaaaaaaaaaaaatagaaaattgaagcacagggagagctttgggtattgtggcataaaagtagcagctgaagcttaggatagatgaaatcacctaaggagaaagcatagattaaatgaataaaatggaccaaggacagaatcctaggcatacatgtgtgccgtgtgtgtgtgggagcggtgggaaggggggtagttgggggagataatgagagaaattagagagggcctcagacaaattggaaatagcataagatgtaggacaatcatgttctagaaaccaaaaatgggagaattagaagtgtagatacatttgagagagagggtagagaaattagggaaatttgctttgggtctctcttttctctgtgaagcaggatacagggttatttggtgaaaaaatgataagcattggggttgtagtagaaaagcatgagaggaatgatacacatttgggacagtcacaatgatgggtaacaaaggaatcttacaaagagtatatgaaaggaatgttaataggtaatattggaaattagaaatttttaaggtgctatttggcattactctgattttctatatcagcactatatttttgtatatcatcctatcgataatgttaaaggctttggaatggtttgttaatccaaatttattctctggcaaggtgaattttttgcattgttaaagaagtgagatagttgaaggcatagctactagtgtaacgcatatgcccaatgttgggatttagtccttacagggaaggaaatgaaagcaagagaaactgatagtaagcttttttccaa

SEQ ID NO: 116861 - DNA, 2094 bp, Homo sapiens
ggacattccagcacattattacttagtgatgttccattcaccttgaaaaccactacttgccaggacctggcccataagggttaggtaagtcccaccttgatattattttgaataactatattttgcaggcttgcaaagttgtaatattactatgtctaaatattggtgataggaaacaactttgcaaagctgtataatgtttttttttttttttaataataaaagggacttcactcaccattgaagactggcctaactctgctggatgggaaatctgggaattgatataagaggatagtaacagaaaagttacttgctcaaatatcactaaaaaggcaaactatggaatggatccctcatcctcaattttaagttttagatttataggctgcattagctatgtgtaggtagatgtccaatctattttctttgcaggctgtccttgttttatcatttgattttttcatctctgttgaataaagcatcctacgttacagatttctgaagttaatatttttaggctgtaggtattaatagttgaaaaccttaaaaagattattctagcttgactataaattatgttgacatattaaagcagatattaaaaaatttagtataagcatcttgtttcagtatactgataaatttgttttaatttctatagcctaacttacgtggtggcaatgcctttttattcagcaagtctgattgaaacagtgcaggtgagcttttttttactgtcattttttttttatttaagaatagttttttgactattcagtatattgtagatatctaacatttcagcagaaaattttaagactatgtcttaaaatatttattttataaatatcacagttatatcgcacgttgcttgtctgtatatttccattggtatcttaagtcacacttctagttttaattatttttgtcctttccataggcaactatactcttcatttagacatctcagaacacagcctataacttgctctgaaaacaaagaatctataaactttttaaggcccttacatacaactcagatggttatggcttatcattggacagtaaattaataattacctgagaataaacatgatggataatcatccgaacaggaagcaggttgtccccacaggtagtttactgacaggattcttttaaaacatgcctttaagtgacatttgatactattgggtgtggtaaatactacaaagctgaagcaattttctgctagcacttgaaattctgtttgcttgtgttactattcctaaccacatggtggcgcttcaagtacatttaattaaatgtcttaccctccttcctacacttaaaactgtaagatgaaggtagtttttacttcacctgtatacaaaatccaactatttgtacacctgtcttctatttccacatcagatcctctagcatattcttttctctagtatatgtgagtgccctctctgtaaaaactcgcactggatcagcctttgctcttctaattactcttttctaccttgtttcttttctggctgtatcattcatctttgatttatgattattattattattatttctgttagaactaacttcagttaactgaagttagtgtcttgcgacccaaatcatactttcccttccccttgcatttggcattgtgttaaataaatgatgaatttttgtatggtgctatagaatttacagagttgtcacttgtatgagatagcctcattttaaaggtaagggaaaaatgtcaggaaggtaattatttaaggaaaaacaactaagcagaatgatttattggggaaaacaatttttagcttgagacagacccattatcacatttctctgcttaaattagacctgggactttagacagatttcttaacctttataattttcttatccataaattgtgaatagtattttaataactgacgtgtaacattgaatgagttatttatataagtgcccggctcactatgtgatagggttttttctgtgtatgtgttttttttaacccagtatttactccttgtttcctgcttcaagttccacttgctaactccttttgatctcttttgtctgcttttctag

SEQ ID NO: 116862 - DNA, 1038 bp, Homo sapiens
catgaggtcaggagttcgagaccagcctggccaacagtgaaatcccatctctactaaaaatacaaaaattagccgggtgtggtagtgggcgcctgttgtcccagctattcaggaggctgagatggaagaatcgcttgaacccgggaggcagaggttgcagtgagctgagatcacgccactgtactccagcctcggtgacagagtaagactctgtcttaaaaaaaataaaaaagaaagaaagaaagaaatccttgtactagtctccacattttaaaagtcaatactcatacaagattgttttcaagttgcaatacttatatatatccttttactgattaaggattcatattgactcatattccctaaaatcaacttcagacttcttattatagttttaaaccaaggttttaattacatcactttacctttcagatttgcagattatcttaactgctaaacttttaaaaaaaatgtatcaattgtttattgagtacttgcctatatcaggtactgttatagaccctggggatacaacagcaaacaaaaccaaaatgctctgttctcatagcacttatattcttatggggaaagtagacataaacaactaaataaaaggtatatttcatggcgattaactgctaaagaaagcaaaaataaagcaaggaaggcaaataggatgtgtaatgggtagggaggggcggttaatatttttttaagaagataagtaaaggtctcactgagaaggtgacatttgtgtaaagatcaacatgcatatttgggagaatattctaagtagagggaaggcaagtgcaaatgcccttacatgggactgtgtcatgtgtgttgtatcatacatgcttgagaagtaggaaggatgccgatgtggctggtgctaactaagcacaaaataagcaaatgttgaattgtatttagagggaaagcaggtgcaaaaactctcaagtgggactgtgtcatgtgtgttgtatcacacatgcttaagaagtagaaaggaagctgttatggttggtgctaagtaag

SEQ ID NO: 116863 - DNA, 1026 bp, Homo sapiens
gtagacagtgctcatttccatttttgtagaatgcgaaactgtgcttaggagaagttaagtaacttgacaatggttacatagccagtaagtaatggagccaggatttaaacatgtttaagaactataagcactatattgtctccttaagcgttacatagttattgcctttccatgtgagttctaagaagtttcttgagatgtatccacctacacatctccccagtctccctaccccaataagattagctcccaacttcactgctagcaattttatgagatttcatttgaaaaaaaatctgatgcctagataacagttaaagtctgcaaatcatggatgtttccctcttcagtcactatgttaggatttaaaaggaacctaaaaagagtcctttttctgtggcaaaataagcaaatgttaagttttacttatttcatcatttttatttcagagtgagataattcgagataatactggcattttggagtgtgttaaagaaggaattggaagagtgataggcatgggagtgcctcatagcaaacgacttcttccgcttctttccttgatcttccctacggtgcttcatggagttcttcattacatcatcagctcagttattcagaagtttgtcctactaattctaaagagaaagacttacaatagccacctagctgagagcactagccctgtgcagagtatgttggatgcttattttccagaacttattgctaactttgctgccagtctttgttctgacgttatactttacccattggaaacagttttgcaccgccttcacattcaaggaacacgcacaataattgacaatacagaccttggctatgaagtgcttccaattaatacacaatatgagggaatgagagactgtatcaataccataaggcaggaggaaggagtgtttggtttttataaagggtttggtgctgttataatacagtacacactgcatgcagctgttttacagattaccaaaattatttactctacacttcttcaaaataacattt

SEQ ID NO: 116864 - DNA, 1591 bp, Homo sapiens
aattatgtcattattgaaaaagacttaagggatgattagacttggcaatctgtaagcaggagtataaatgttttaaattgcattgtccctatgtaactatcttaatggctatatatatgtattttataaagccatttatgtatacacatgtaacttggaatttccttcatccctacacattttctacacttacatcaccttattgcataaaacaaagtcacgcgctttctgcttgaacatcaaaatatcaaaaaccaaggtacccaaaagatacaagtcagagacaacatccttgtccatatccaaacccagtgtttcagtgctagcaacttaatttctcatacatttatagagtttggtttgctttgctagttgtgtgaatcattgggctgtttttagagccactgttaagagagaatataaaataatcatgacaattactactgtttccacatttacaaattgtgtacttaaatgaacctcatttcccttttatttctgaatggcttgtctgagaggaaacaaaattaaaattcatctgggaatttgtgcctcttgtctagtatatagtcaccactaaataatggcttccgtttttattttctttcaggttttgctttaaattttgttttccaaaatagatgtacgtggagggaaaagcaattattcttatcaccttttatttaaacttctttagatgaatactgaagaaaaatccaaaccttaaaggaaatgtgcccttgtattttatgggtgaggggaaaaagtacatttgtacatttcaacatataataagcaaaaaaattactaatcagtttaataaaaacattttgtctattcctaaatgtaatttggtgggttaagcactttgtgtagtaaaatgatatgtgtctgctctatcattagacattttaaagtttcatgtcttcacgtgaataatcacagttgtatcatgaaccatttagcgctctgaagcacagtgactttgcactgatattgtccaaccaagaatgcatacgaatagaaattcattttacttgctaaatgtcacagaaatggttactttttgcaaatagtagtgttggaacaaaaaagtgatatccaaaaagtgtaaaaacagtaataagtagcaaatctctcgtgtgtgtgtgtgtgtagttactgaaacacctacattttccatttttaaattccaccaaaagggggaaaataaaattaaacaccactgatcacattttatattttatggtgactattttagattaaggtttactttgtccaaccaatagcatttaaattgttttcaattaggatagtttcagataagagtaaaccagaaaatttcaagtttgaaaaatttctagaaaagaatctgaatagaatcaagtatttactagtgaaaatctgtaggatcctttgtttagctaaaaattaaatatttcaggatattttttggaagttagcatgaaaatagttagttacataaattcattttattgtagaataattataagactgataggctgaaccatacacaaataaggttgatcttgttttcctttttggagaaagagaatacaaattaacatta

SEQ ID NO: 116865 - DNA, 1151 bp, Homo sapiens
agcctagggaaatttcacacttttctagaggccacagctggtttgtagtagattgaggaagagaacccatatcttctagctcagagaacattgtattttcccatatgctcctgttaaccacgggaaaataatgtcacattgttaccagtggtgaatacctacaggtctgcagcaatttggttcttgcctcctaggaggaaagagtttgactgaagggcataggcagaggaagagattgaggcaagttttagagcaggagtgacagtttattgaaaagttttagagcaggaggaagtgacagagcggagctagcgcgtcaaaggtacctctatggttttcctcgctttcttgagctgggaaatggccactgtgtagtcgcaatggaaataaatccccggaactgcgattcagtgtgtgaggaatttgaatttagagtttaatttctcagagtattctctccaggaagaatttttacagtatctcaaagatttcacttgactccttgatcctacataaacccaaggagaaaagaaacgggtcgctccaattctagatcacattcttcaaggtcaaagtctagatgacagtctagttctcgatcaagatcaagatctcattctagaaagaagcgacacagttctaggtctcgttccagaacatattcaaggtcttggagtagagatcgtatgtattctagagatgatcgtcgtgagtacagaaataatagaggaatgaaatgaccttatgggtacagaggaaggggtagagggtattatcaaggaggaggaggtagatatcatctaggtggttatagacctgtccggaataggaggcactctaggagtcctagacgaggtcgttcacattccaggagtccaaaaagaagatccgtttcttctcaaagatccagaagcagatctcactggtcatatagctcttctaggtctccaagatcattctcttctcgttcttcatctccatatagcaaatctcctgtttctaaaagacgagggtctcaggaaaaacaagccaaaaaagctgaaggggaaccccaagaagagagtccgttgaaaactaaatcacaggaggaactgaaagatacatttgaacatgatccatctgagtctatcgatgaatttagtaactcatca

SEQ ID NO: 116866 - DNA, 1124 bp, Homo sapiens
attttttctcctataacagttcatcgatcattgtaatagtgtctcttgtttacttgtttcttttgtcttctccgaaagaatgtaacctctgtgagaacagaaaccttgatgaggaggatgataatagtcagtgttaattaagtactttcttttctggaaaacaggtagagttgtctctcttggaggattgtgaatatcaaatggcttattagcaaaaagagctgggaggtaggaactagttgagttagtggaaaaggaaagtgagggcagagctgaggtgaagagcaattgggtttctcagagtctgagctggtaatggagacagggtgggttagaaccatattaatcatgtgaaagtatttagtgttaccattctctgcacttgttccttgcttgctaacttttgcttttgctggttaatgttttcttccttgaaatgtaatttttctgagtttattactgaaataactcttgaaatcttgtctttggtacagtgtctttcctgacactgcattacacacagacacaggtgtttttccctatattctacttccaaagaaaccctgtggtgaggagagtaacatatttgtacattttataaagttaacaatttacttactgtgtgttgacatttagtcataataaagatggcttttaagttctcctctagttctaacactgatgatacattcgtaacatcatggcatgtaaatgttctttacccagactgtacactgctcagattaaccaatgcattgggctgtgacctctaaaactgaaaatacttgggagtaaaaagaaaaaaaaaaggagctaatgaacctaagtcactaattgggtctacaagtgctctatcccatgactatggctatatatgctgtccccagtcagacttcctacagtcctacagattagtttcttctacaggggaaactagacaagttgtgaataggtggtggtagtgatggtagtagctatcatgtattgagcagttactatatgactggccccattctgttttacacaaatttactcattgaatcctcataacaatcccataaagtaaataaatacctgttttacagatgaagaatttgaggcacagggagcttatttttccaggg

SEQ ID NO: 116867 - DNA, 1027 bp, Homo sapiens
cccactgtttgtttttgtatgacccaggagttacgaatgattttgacatgtttaaatgtttgtgggggcaggctgggggtagggagaaggatatttcatgacatgaaaactatgtgaaaatcaaatttcagtatctatagataaaagtttaatatacccatgcacattatttatctattacgtatggctgttttcatgctacggtggcagaagtgagtagttggcaacagagaccacatgcattgcctgcaaagcctaaaatatttaatatttggcccattatagaaaacatttgcctaccccttccatcaccactcctggtgaaatacagttgaaaatataaactttcctaataaagaaaattagtgtcagtaagtgtctttcttatgaaggacagcatagcaaatatacgtatgaggttatatcttaatcttcaggtgttaggttattatgattatgtttgttaatgaaaatttaaccttttttcttttttaaacaggttcagaaacttagtctggttgcagtaagtaagtatggactttattctgaatttatgcacatctaaactttttttttattttgacataaatgtgagacttacagagcatataaggaagccaaggtaacatgtatgtcttataaacttacattatcagcaacaaaaaagggtgccaggataaatcatgttttgcttttagttgttatgtatctttattttctttaatctggaactgttctttagactttctttgtgcttcatgacattgacacattgacatttttgaagagtacaggctcatttagaatgtccttcagtttgagtttttttgacatttcttcaggattagatttaggttgtaccccttgggaggaatcacagtgaattgtatcagaaggcacatgctgttagttggttctgttcctggtagtgattggttaggaggctctatttttaagttagtgttttgtcatttgtaacgaataagtatcttttggtagtatgcactgggactatgtaaatatctta

SEQ ID NO: 116868 - DNA, 1004 bp, Homo sapiens
actgtaaggagaagttttcccttttctcacattttggtatttctttccaatggaagggtttttttttaaactatctaatagaataaaacatttctcagggcagagaggtacttgttttaccatcaaatatggttcttgtgagagaaacagaagacctacaaggactgtaatgtgtatgtgtattaaacttatattttaataatagattagaaggcagaagaaaggcattggaacttaagttgaatacaaaagtgaatgataaacttataaaacagggttatgcaaacaaatactaatatggaatttgcagcatgaaaagtacaacaatcctgtgtctactaaccctcctgccccaaaagaggaaatgaaaaggtcagtgtgaccaggatactgagagaagaatcatatgtcacgtgagaaatgctaaagattgataggcatatttcccttggagaagactgtagaaacaatattgtctttaaatgttttaggaataggcatatagaataccatatgtaatatttttgggttggtccaaagggtagagttagagatttagattttgagttacttttaaaatttttctggagttattagtgaacttgatgttccagaagatactcacatgggttaggcatgtggctcacgcctgtaatcccagcactttggaaggccgaggtgggcagatcacctgaggtcaggagttcaagaccagcctgtctaacatggcaaaaccctgtctcttctaaaaatacaaaaattagccgggtgtggtggtgcactcctataatcccagctacttgggaggctgaggcaggagaatcagttaaacctgggaggcggatgttgcagtgtgccaagattgcatcactgcactccagcctgagtgacacagcaagactccgtctctcaaaaaaaagaaaaaaaaaaagatgttcacgtgaagactggatgactatctgtcagagctttgtgtttcaaatgacagttttttccaaataacc

SEQ ID NO: 116869 - DNA, 3023 bp, Homo sapiens
accttgtgacattagcttaatcatcagaatagtgtgtggaagagtaagaacttaataaatatcacctattattatttcactttttaatgtgtagctgatattgttttcctccaaaaaaaaaaaaatacagctttcaactatttttcttcttgtagtaaacttctatatacatttccaggatggaaagttggagtgacagctcttcagcaggttagtatttttctgttaagtcaaagaggaacaaagttaataggaaaatccttcagtttcaggaatcaatcataattttagacgtaaagacgaaacaatatatagcttagtttacctttaaaattgttagcctgaggaaatagtgttttggaaatgtaagttaaaacaagtaataatgcctttgccaataacacttattggagtcctttgtgcttatagtttgacttaaatctgtggttgctatggatccttgtttctaatcattttgcaagtatatgtagtccattgtcttgtgtagactggaaatgagtgttcagcaatgcaagcggtattgtaagtcatgtagagaaatttgtcaagatgttgagatttatggtttgaagtaattggagccaaaatcctaatgtttgattcgatgatggactatttaagaaataactgcttttttttaatgaatctgcaaaatatgtataaataaatgaatgcatgtctacagcgaatcttgtgtttatattggccacatatgtagccactatacccttatctttttcagtatccattgtctatacttgcccaatttatatgtattccttatcttctcttgctgtcatcagcctagctccacttttgcctatccagaagactccataagtatcagaggattaggacccttgaggacaagggattatatctgttttagtatctccaatttctacacagggtctcatgcatagtagacacttgatgacaaattaataaaacgtgtagcctgattccattctataatgatattggacattgatctttgctaaaatagagaaattcataatagagcctgtatgtaagacttgtattatagaccattataaccatagaatattagaactggaacagactaattgtaaaactttttttgccttttcacatgttttgtaggtttttcctactttcttggataagcaattcttcacttcctttgtaattggttacatgttgccacacatagcgcaagcctttatgttttctagttgtctcctttttctgtttccatccagtccagtgatctgtagtgattttatacatagctttctttttctgttgtggttgttttctttccaaaatcttaccagctaggttttgggaatgaggatgggatgttgactggcagaattgaagctgggaagtaatttggaaaaatcattactgaatacttctatgctgaataaaaaagtatgcttgaatggtaatacttgctgagtttttctgccatcttttagaagatacttcattatttcttttgataacacctaataatgatgcgtatcatcaggattattaaagctattttgcttaagaaagtaaaagtttgaataatttaatttttaggcaccagccgtggatgttgttgctattggtcttatgtcaggtcaagttatcattcacaacattaaatttaatgaaacattaatgaagtttcgtcaagactggggacccattacttcaatttcatttcgcacaggtaacttttaacatacttattgataggagttaagaacacttaaaattcattactttaaaagtcaattttttttgtcttctggtagcttaatctaatagaagtgaatgaatactggagtaaaaggcaaagaaatatgaatagattattggtatatagtttttttctaactttatggattaaaagggaagagagaagaattcttgtttattttgggggatctagaagtatttttcttaatgtattttattttaataacagatggtcatccagtaatggcagctggaagcccatgtggccatattggactctgggatctagaagacaaaaaattaatcaaccaaatgagaaatgcacactctacagcaattgccggactgacatttctccatagagagccacttcttgtcacaaatggcgctgacaatgctcttagggtattatgattattgttaacatcttcctggctcatctaacttaccctttgggttattacaagcttgttttaatgtatcagctttcaacctagaagatgaaaggaatatggaatgagatattggtatagatgaaacaaaaagcacagcaggtgacatgattgcagtgaagcgggaaagaattacagtttatttctcccccaatacccactccctcccttgtagctccagagtcagtggcttagcaagcactactcaataccagttgatttatgtagggggtgatttgactgcttgcagatcagatggaacattgtagaagaactgacgtttttatttcttggcagatatggatatttgatggtcctacaggtgaaggccgacttttgagattcagaatgggtcatagtgctcctcttaccaatatcagatattatggacagaatggacagcagattctaagtgcaagtgagcttctgcttcatactattagtttatttcagcaagtattgagatgtgggtgcccagtatgaggtttgatatttacacatacttagattcacatatctctttgagtgacttagaagtctgggtaaaactaagagtcctttttgtctacttgagaagcactatagatgttattatctatgcttaatgtgtccttctatttactaatcctcagagacagaatggttagattctaaaaattctgttagtctgctgaaaattattagtacctcattttcattttatcctttgttcttactaaatggcattctataaaaagttgaatattttaatgaagtagttgcaatctggttttccctttaaagtgtcccaaactgtaacttcaagattttcaa

SEQ ID NO: 116870 - DNA, 1247 bp, Homo sapiens
tcttgggtggtaaaaacatactgctgccacccaaaagatgttcatggcctcacttgagctatctgtagagtgcacagtttttaaaatggaaggtagcttagagaaagcatcaaagtaagtggcatccaatatttttgctttaaagcaatcatttattctctttcccttttcatggtttccagcctttgaaagattttgtttattaaacaacaaaatcttacttggttttatgattactaatttttaagttactatcttatactgttcatgcatgtatataaattttaagattatttttaacaatatctaaaataacttttcttagaattaaaaaataacagtggtaataacatctttgttttgtttctgacttaaatgggaatatcttgtactttatagttacaagactgatagcttttcttttatatacactttttattaagaaggattcatagctatgtatgttcccctttcccccatccttaggattaataaataaaaagagagttaaacgtaaaggacttcagaataccatgtcagtgagacttccacccatcacaaagtttgcagcaggtaagtaacttcaaactgtgttttgagaagttctcctttgtcatttatttcctactgtatgctgttttattttctgttttaataaatgcttttacaaatattaataagcattcagaaggtaaccccaggtgcatgctggtcttgtgtgaagactaaaaatgagttattttaaatgtgaacttcttatctattaacatcaggctttgctcttctgtataacaggtattaataatatttgattttatagcctttttattctgtcatatgcctggtataatgaaagtcactaatgtaaaaagaactggaacagcagagtatgagaacatagagctctgactaattaagatctaagaatactgaggtcttagtatactatgtcatttgacctgtgccactttcaaagaagtgattttaagaaaaatatagataatgggtttgttgcgtgaaatctatcatgggaaattactgtagaggcaccatttctatttgaaagttgttattatgaccacctttctgttttctcagagcttgagtcatgtttctaaaaacatttgaatcacatcacacatctgcttaaaattttttagtggcttcttaacacctttagagtggaatctcatctccttaacatgactttcaagaccctttgtagtgtggtcctgattgccttgccc

SEQ ID NO: 116871 - DNA, 5492 bp, Homo sapiens
gaatggagatagaatctagcatatattcttatacacccaaatataattactttatgttaaaaaaactaatgaagcaattcatttattgttcttttgttaaataaaaaggaacaagtagataaaaaaatgctttggaaagcataaagtgcaataaaaatgttagttattttgtcatttgtgggttttttttcttaaaggcagtggatataacttcttgtggaaactttgctgtaattggcctctcatcaggaactgtagatgtatataacatgcagtctggcatacatcgaggaagttttggcaaggatcaaggtagagaatttttttccttgttttttattaatgtagatagatacaaaactagtagtgaaagctggtatgtataatctttaagtgctgggcattttgctaaagttgaagatgggttataatcaaccctatatggcagatactgcaattgtatcataaggaccatgttgaaagagaaaagtcatgggtacttaaagagttacgtggatattatacagattaattttttttcttctctcctttaagcagaaaatcttaacaaacttttcaaacctatgttgtatcgatctgatttctgtttttttactcgaacagtattaataattaagaatcttcttacacccctaaaatccagattaatttcaagattttaaaggatatttaagtggcaccttacatatttgaatgaaggaatcactgtgtgtattgttcagagagaaacactgccaattctgattttttttttcttttgacatctaccttacagctcacaagggatctgttagaggtgtcgcagtggatggattaaaccagttgacagttacaactggtagtgaaggattactcaaattctggaactttaaaaacaaaattttaatccattctgtgagcctcagttcatctccaaatatcatgttgctacatagggacaggtaaacttttaatgataatggattttctctttgattcttttggtaaaagtcataaagtcacaatttaccaagtgggaaaaatcagactctttaataaagaacaacatttggcttaatttcccccaaagtgtacttgatttaacaaaattcaagtggaggtgagattttagttcaagggttttttgtttattaaaactggtgcatttatcttgctagtggcattctgggactcgccttggatgacttctccattagtgttctggacatagaaactaggaagattgtcagagagttttctggacaccaaggccaaataaatgacatggtaaaacaaactctaactaataaaacttgactcatttctacttttgtttgggtgtgttatcctttaatagccttaaaatcattatatgaggtggttatcaattttaatttgcaggctatttttcaaagattttaaaggaaaattttgaattaaaagtttaatatttttcagggagttgatgcgatcaaattaaagtataagttttagaactcatcttttttttcattaactctaaacaaggccaaagtatactttagagaatgaatgatccattggtatatatgtcattcttaacttaatattaaaataggctgggagaactcatttctgatttactatgtatggaatgaattaatagtagaagaccatttccctggaatatctggtatctggtttattttagtttagtgctatttctagagtttacatatcttaactctgaaagggtttaattaataaaaatgtgcttaagtttactattatgttcttataatgggatatatgatatggaaagaagtaaactagtttaaatagcatatttcattaaaaagaacttttaaaataaatttgtcacttgaggaccatattaagtgtatattatcatctttcatcaattgcagataccttgatttgcttgaaaatagaaaaagtaaaataaaaataaaatcttaatacttagtgacgaacccaacagctgcatttactagttctcacaccaaaaatcagaatttactcctttccttcaaaattgaagaaaaaaaacatggtcaggacattgtgttctgcagataggaggctggcaaaattatacatcagcagaatttgttttgacagcatctgtagaaatgagggtgggattgggttaattgtgctgaaatggcacttttgaaaacatctgtcagtgtcaagttgctcttcctatttctttttcaaaccttactttcaacttgtatatctcgagtttccctgctcagtaataagttattccggttagtcaaatctgtgagcatttataacatgactttacctctcagaatcattctttcccatcctttactatctgtaccacccttctgtaaattgatctatctataacttgagatttgagttcccattgtattactgcagcctgaggaacaaatcaacatttacgtatcccagtatcatctactaatttaaactgatggatgaacagtctactacaactgtaaactttaaagtttttccttttgggtcatctttcacctgtgatctggtttgtgcctcacaacccttaggtactacaggcagagagatctattatttatccattttcatagctagaaaaaataatgggtggcataagtagtttatttaaatttattttgaaaatctgattattatagtttgtttagaaataaagcattattaaaagagaaaagatttttaacttaagcttcaagaaaagtaagcccttatcacacacataaacattgtctataaataaatagaagattgtgatttgaaaattaatgcagtacacttttttaacttttaataattcatttaaaagtctaatctttatccagattccaaatcagtggtatttaggaagtggtattttcttttatataaaataaggcagcctgaatgttagtcaaattaatttttttatgaagcctgcattatcttttcatttattacattctttaaggtgttaactatatatacatacacacatacatacaaatatattcatatatatttatatataaataatatatatatatatatattttttttttttaatttaaaggcttttagtcctgatggtcgttggttaataagtgctgcgatggattgctctattaggacttgggaccttccttctgggtggtaagtttatatttctaattccctaacctctataagatttctaagttatttttttcacatgtgacttttaccgatagttaatgggttatatgctttttcaatgtgactatatttggagatttttctgacatgactatattgtatccttggagtgtttttgataactaaacagcaggtagtagtgtcatgaaacataatagaaaaatgaaatctctcttaggttttctcatcctgcaaaattgagatacagaagcgagatgcctaaaccttaagaaagctcatttgacctttttgatactccaaaataaagctcagacttaaggatggcaaacttttgagtttttttagttcatgctgaatttagttaaaaggtcaaaccccctaacttttcctttttgtatgtctcttctgcttctctgacataattcttaaaagaaggcattttagatagtcttagtgcattttctgttgcttataacagaatattgaaacttggttatttctaaagaaaaggagtttatttcttacactttgggggattgagaagccccaggtcaaagggccatatctggtgagagccttcttgctggtggagactctgaagagtcccaaggtggtatggagaatcacagagtaaggggactgagcgtgataatgtaatagcttgagtctgtctttctcttcttataaagccaccagtttccctttcatgataatcccttaatccatgaatgggttaatccattaatgaggacagagtcctcatgatccaatcacctcttaaaggcactccctctcaataccatcacattggggattaagtttaaacatgagttttggaggggacattctaactatatcttaaagtggtgaaaatgtgtgtcttcggatttggttaaaacgtaacaaatgttcagaaatctgtttcatgggttgaaatttgctgctaatccagggctttaaagagaaagtggtatgaacagaggagacatacagaatgtgtcggctttgttgttaaaaattaagtaggtatagataccatttaaaatcatctcatttaacataggattgcttagatgagtatgaagaaaggaagaattgtgggaatagcaaaacatctaatttaacagtaacataccattagagaaagataggtgagaaaaatgagaaggaaggtggtactttttaatctaaaatattcccaaattaagctctgttcacttcctcttcctactcaggaatggataagctcatacatgaaaacagtttgacctttaggaaggaaaaaccctgatgtcctcagttcccttcgagttcgaaacaggcctgaggcatacctacccatcttgcatatacactggatttgtagtaagcacagctaacgattgtcactagtgggtccagctctaataatcagggacctttgtccacaggtttgtctctttcacttaaaatagagtgaagcaaaatcgaatttattgactgtatcctcctcaggcttcagaaagttcacttaaagttggtatttcttcaattaaaaaaacattttgttaaagacactattagaaatattagtggtctgtcacttcttgggctgttgctattttctaaaagttaatgttatataatttgaattgctttaaaataagaaagttgtataaatagtagagttggcatagtgcctttttcattttcctgtttaatagttttagtttatattagtgagagagatagattattcagtagtagtaaattggcaatgtattataagtggtaaattcgtctttggaatgaaaaaattaggatctgaaagtagcattcaaagccactaacctttgactcagcattagccttttgctgaatttcttatatcagtaagaagttgaacagattcaaatctgatagattttcagctctagtatctttatttttaggtgaacaggcaattttaagtgaatagagaggcatgaagctgggtgtagcacaagagcaagaagtgaccacatcgaattgttaaaagaaaatgtaataaaatgtacattgattgaagaaaagtatatttttattaaagaaaaaagttttggttaaaatttgaagtggaccaaatgagagagcttgaataactatccaacaactgctgctgcttaattgcaactaagctaagatttacaatgtgctgctaggcactgtttatgcttttatttttcatatcctaacaagttgtaggtactattactgttattagtcccatttcaaaaatgaggaagtggaggctattagagaaattaagtgatttgcccaaggtgacttagtttataaatgacagagcg

SEQ ID NO: 116872 - DNA, 1355 bp, Homo sapiens
tttgtatttttaatggagctggggtttcaccatgtggccaggctgatctcaaactcctgacctcaagtgatccacccacctcagcctcccaaagtgctgggattacagccatgagccacggtgcccagccagattgagttctttgaggggtgagaaatatataaaattaaataatcttaatagaatttttcatttgttctgtctcaccccacccctacttcctgaggagaattacatgagaataattggaatagaacattgttttcaatttctcactgaggcagaaacatccccttcttccttaaagatttctgtggaaggtgattttagcactttggaaatagaacatatggaagcagtctccatttgctcagaataataatcagaaacaaccttctgaattgttatgcagggctctgatcttgtaaatctgatctcttagaataggaattgttttaatattatttcagaaaaaattgtaaggtaccttgggacttacttttttaagattaccatgaaactgtatggtagttttaggtctgggatgagcctgtgcatttatgtttcatgaactaatgtggcagtgtagaatatgctgtgtatgtggaaaccaccttcctcaatttggtggttttatataatggaagtcccatctacccacacaccacagctgtggaaatgaagttacacaatgaagttgacaagataattatagtttgaagtaaaataagtttgctcaagcagtaagctttttaacagatagtacctaaacatgttaggaagttttacccttcacgtatgtaaacttttgatgagtaatattaagacaaaggaaataccttaagatttgaaattgccgtgttttaggtttaatctttatatgtgttaggataatatcttcatctctggattgtttggattaaatgacttaacataaataatttaatagtgtatggcatagaataagtatttagcaaatgttttcttttccccaattctcttgattcccaataaaagccattcttgtgggctttcaaaacagacttgaacagaaatcagacaggttattgctcccttccccataatggacaattaaacagcagtccttttcctgaacacactttgatgtgtgtgtgtttgtttccagtgcttctaattgttgtcttttctttccatcttgcattcattgtttaaggtttacatttttattggctcttttagcaaattgagagaggcgttttaccatgggcaagcaacttaatgcctcccactggacagtcttcatttacatttgagctgctcacagtgtgtgtcccatgaatcactgatgtaggcataccctcagtgtgtgtaag

SEQ ID NO: 116873 - DNA, 1060 bp, Homo sapiens
ttacttatttgaaaaataggtacagttgctcaaaagctttttttaaattactattcttatttacatccattttgttatattactttctccttttgcctaagcttttcattagtttcactgaagtaacagaaatacagaatactgataattagatttattttaaatgttatatctttagaattgtctccaagtcagtctaccaaaatttagtattcgagaaaaacagaaaatttcctcctgtttcctccctgttgttgaaactgcttctccagttagtcagtctagttaatgttgtctttctcattaagtgagattattttcacatagtaacttagttaacaaagctgtttattagtggtgactttctgatcaatgctggtgattaaaaaaaagaaaacattttctgcatctcttatcccttatctttttggcaaaaatatttttgtgaattatctcctttttggtagagttcaaatacttttaacatgttaattatttctgtagccttatagactgctttttgttggactcggctcctctcaatgtttctatgtctcctactggagactttctggcaacttcccatgtggaccaccttggaatttatctatggtaagttctttcatacagttctgttttgggatgaagaagattgtattgtcagagagttagagttgctaaaattgtcatttaggctgtttttaagtgtattaaatggaaatgtcacaagttaacacagatacttaattcactgtaagtctgagtgattcaacatctgcttgataatgtagacagctttgctgaagtatattctaaaccacatgattgatttttgtctgttacatttggcttttatttgcagaaagaatgagtgatttttaaaagtttaggaaaagggagtccccagccaggccatggttttcctgccagtatcccacaactactttacgaccttggccaatcccttctgaacttcagcctagtttgtatataaaataaggcacaagtataagcagaatactttctgagatttattctagttgcatgacttttataaccg

SEQ ID NO: 116874 - DNA, 1460 bp, Homo sapiens
acatcttgattagtcatccatggctagggtgcaggctgagtagcagaaatatggctacttagagggccattctagagaaggggaatctatgacctttcagcagccacaagaatatgctcagcatattcgcactctgacttactctctgagttcatctttccttttaatttccttaaataaaggttgatatatgtcaaaacaatatatgaaatttactttaccttataaaattattatctactactggtctgtctttaatatgtttttgtactacatcaggaaagagactcaataatgtatttacacagctttgttatgatggcatctatgacataagtcaaggcgtttttaaattgataacaatctatctttgaggtattttttaactaataaaagtctgtagtcaaattcaagattgtagagtgtttctctgaaagaaactttttataatttttaaaatattgcttatgttttgatttttcaggtccaatatttccctgtattcagttgtttcattacggccacttcctgcagattatgtcccttcaatagtcatgcttcctggtacttgtcaaacccaaggtaattagaaaattgcaaagtaatttttgaggtgtaatattataaacctaatgtaggagatattgctaccaaaggcaaagtttagtgcattcaatcaaagtgttttttaactgatataaaagactttgaatgacttcatgaatttatgcaaaaatataattgatgtggtattgataagctatcaaatagtataccattgaagaaggtgttttgggtctagtgatgggagttttagttaatatgagaaaataaggaaaagacagggataagtaaatgaaataaatgaacagtctacaaggctgcattaaatgaacatgttatgaaatacagatggatttggaatgaattaagttgcttttatatgataaaaatcttttgttttacctgaaaaatttttttaagatgtagaagtatcagaagaaacagtagaaccaagtgatgaattgatagaatatgattcgccagaacagttgaatgagcaattggtgactctttcacttcttcctgaatcacgatggaaaaaccttcttaaccttgatgttattaaggtaataattaacattctttatagaccctaagcatgcatccagaagcatttttatttttttaagcagagagaacttctcctacattgagggcattagaagagcaattaatatgtaagacagcactgacaatgctatttaatcaaatattgtttaatatggtatgattatcacaagatattcatatatatatcaactttgagaacactcagcagacatttggatgtggcaaaagttgagcctgtaactacagagctactggaaactgatcttttaaaatccagcctaagaaatcacttttatataagtttctaaaacgagcgggaacacata

SEQ ID NO: 116875 - DNA, 1016 bp, Homo sapiens
gttgcagtgagctgagatcgcaccacttcactccagcctaggcaatggagtgaaattccatctcaaaaaaaaaaatgttcctgagatactgatatgtagcagtgtacttaccaaaacaaaattctttcaatggaaatttcagtagagtttttgctaatataattttactagcatttgaaatacttataaaccagcaatcatgttttcttgaattttaaaagcacaaggtactaaagaaaaaattccagcaaaatagaaaaattagagctgtactttgaaaggaaattatcaaattacttataatgtcagtctgcttctggctccaaagttcctttggagaaaagtaatttaagaaactcttttgtattaagcatttatgtaaattttgctttccatcctgttttgtgaaagagtttgtactcaatacaaaaggaagtttaaaattacttaattgttatatcttcatgtaaatatattcatatttcaggaaaatgagctgtgtttgtcttagaacttcccctgtgccctgtcactttttttctgccttatcggcaagggtgctagagatctgcattgggaagcccaagttaaggatagctgtggtattggtcagaagagatcatattttaacattcttatgtgaaagagtttcattcctcttttactttttggtatttgttttaaaattgatttgaaattaaatatgagaaactgttggcaagataattcctatttttctttctcattttctcttaatcagaaaaagaataaaccaaaggaaccacccaaagtacccaaatcagcaccatttttcattccaacaattcctggccttgtacccagatatgctgcacctgaacaaaataatgatccccagcaggtaaaaaacaaattagaagattctaagtatatcggtgtatgtttgtatgtgttttctgcacttctttaccaagacctagttttacagatatagggtaaattaatgatagcttttaattacaaactatacatttttg

SEQ ID NO: 116876 - DNA, 1052 bp, Homo sapiens
gatagtatggactcataatattaatgtctgagaaatattgtttcctggtcacaggtcttcatttttcacacatagtctttccttttaccttctgtcatcagcaatgtgaaatcacacatttggaggaaaagcaacaccctttaatctctatttaccagcaggtgtgcctcttttgtccagcagagacctggaagagagagctgggaacccaataccagcccctgctagggctgctgcttcagctctgacgtgaaaggcttcagtttaaggtaggaaagcaatgtgttttcttcacaaagctggtagactcttatcatataggcttctcagacatcttagattgcaggccacaggcccacacctgctctcttagctgtcagaatgactagctttagtatgaattcatttctttcaagtaggactttgcaaaactcagcaataagaaacacgcacattttaaatttttctattacttcccttgatgctgcagctacaataagcacaaaaatataaatatttaataaccacattaaaaaggtcatcaacttcgcagcttgtaatgggtgagacctgtctacttctctaccttgtattcctggagatttcacatttttattccttttacttgcaatatcccactttcaggtaccccattttgcatcagaggagagggtgcaggcaagcagtagaaaacccactacagtggcttaaccagatgaggttttttttagtctgtgtaggctgctgtaactaaatactctagactgggtgacttacacaacagaaatttatttcccaccgttctggaggctagggagtctaagattaaggcgctgctcttttcagttcctcagatctctttttcttcttctaagaccaccagtctgatcagattaggtcccacccctatgacccatttaaccttaaatacttccaaaaggacctatcttcagtcacatgaggggttaagactccacataaattttgtggggacaaaattcagtctataatggctttctttaggcagacagagagtccagagctagggtagt

SEQ ID NO: 116877 - DNA, 1101 bp, Homo sapiens
tatgaaatttatgtaaaactgtcagccccaaatccagggaagaaagagatttatgctaatttgtcaagtggtaactcattttgggattatgctatttgtaccttttccaattctactctcacccttctcccaatgaaataaaaggacacatagtcatagagcaagaacccataaaaagaggcagagtttgttttctttatcttccctaaacatacagaatatatgcttcttggagggtaaatacatttaatgttaatctctgtatctctcactcccataccttggcttttgccatagaatttaatatttaactactgacaacttaagagtctctaaataaatggaaaatgaattttcaataaaactgagagcagtcagagaaaagttgtagcaatgataaaaaacaatagttttctcagtgtaatttgatttgaagtatagagaagaagaaatgattttaacccaagttccctgaaagatatttgcactgaactcatgatattcacggaaaaaatacgaaagcaaaggatttgggcaagtttccaacagctcattggaaatgatcaggaatttactgtctttggaggatgggttgtaggtatatatgcagcaccctgaattcttttatccaggcaataacggtgaccccacatttattgctccaagtcattggtgtcctttgaaaaaatgccaaacttatatgtggtatctcctacatgttctggtttgaattaagaaaatgtgacttacaaaaagttcccctgtataaaactaattaaaagtattacaaaaggacccttcatattaacaaatgatttcctgtgactcatttaagagtgaattcctgtagggtgtgaaagtggatttttatagatcattaacaacctgacaggttctgggagcagaaaaatataaaacatatgtgttaggaaaaatgccagttgaagatcaatcaaaagtgacatcgagtgtttctgaacgctttagaagaatcaagcagaaagtaatttataaagcatttcttaagaacatatcgattaaatacacttgtacaataaattctttggtaagttctataaattcttttaatgtcataaataa

SEQ ID NO: 116878 - DNA, 1057 bp, Homo sapiens
aataaaaataagtgaaaatttctaatttccactttttaatttctttactctcaaaatcccagctcttccctttcacactaaattggaagtctattcaatctctgtctgcctgtctgtctgtcttctcaatacctgtcaaaaaatccatggaaaggctttagcataatgtctataatgttagctattattattattgttcttctgtgtaataagaattataataataattattattacacaataattataattattattatagctttttgtagaaatcctaagttggttttatattaattcctacttcctgaggacttgattgtgtgtttacactataaatagtgaattgtaataaggcagttgcatacttaagctgagtagacttgcttccatggcaggaagcagtgaaaaagaacagtcctgaattcctacagaaattggatgaaatatacttgagcttttaaagacattttattctctatattttattcctctagactttgtggatttgaaccattctatgatgaaagaggcgatcagttcatgttcaggagaattctgaattgtgaatattactttatctccccctggtgggatgaagtatctctaaatgccaaggacttggtaagtgtaaccaaaacaaaatgaaacaaaatgaaataaatttatttttaactaattaatgggaagtacaattttttaaaattttacccatattaatgccatattttctttcaattttaaagtattttaataaaattagttcattaatacattttccttagagaataaaaactagatatgtttttgactcatcactagttgaattatcataaactacaattactacagtattaatgagcttttactaccttataagtataaaaaccttgcttatgaagaaagctgtgctgggtgaattcaaacacaatttacacagaattctgttttaacatggcttgcaattgcctagaatttagatgtacttcatttcttttttgtttctttgtttttgagacaaggtctcactgtcacccaggctggagtgtaatggcat

SEQ ID NO: 116879 - DNA, 2038 bp, Homo sapiens
taattacataattcaccgttaaacatggacccactctaggtaaaattaccctcatggaaacattttcactgtgagaatgatgaatttaaaaattatgtttgaatcacctaaaatgtatgtgcagcttctagatggccccttagatctgctgggctctagctgtgtactttaaaaaaacaaaaacagctttattgatatataatttacatattatgtaatttacccacttttaagtatctaattcagtgatgttttaatacatatgtagaactatgcagccatcagcacaatctggatttagaacgtttccatcattccaaaagattccttttgtcttttttgcagactcatacctaacacaaatctaaagtttatcactgttgccaggataattacagcaggttatgtttggtttcatttttaagagtggaggtgttcatgattctaagctcaggaatcttgtgatcatgtattaaatatgttatctcatactataatgataaaaaagcttaatgatgtgggttgggatggatattaacataaataattgagtccgctgcttctatagcaatgctgtaggatagaacaataatgtaagtgatatatgtaattaaaaaattctagaagccacattaaaaaataaaaataaacagctgaagttaattttaatattttatttaactcaatacatccaaaatgttatcattttaacatgtaattgatgtaaagatttattctgatagtttgtactatttcttgtactaattttttgaaatctggtatgcattttacaaatttgggcaagccacattttaagtgctcattagccacatgaggccagtggatactgtattgaatagcacagtcctatagcatatttattaatttgtcttgtagtaagatgaaatagacaataatacggaataatatcttaaatggaaatctttgttagtctctagagccttcattgcttgataaataggacatctaaactttagatataaatcagttgtcaatgagataaaattattgccagcaaatattttccttcaaagataagtaacttttgatatggcagttggtgaaatgaaagaatataatctgccttcttgttaaatggttgactattctgtagcttgtaggtagtacgtattagaaacttgtgtatgtgggaaatatttggcataatactgttttcagtatatagtagctattttttaaggaaattagtttcatacaagaaaaagattattataaaagtgatacttttgcatgaaatattagtttgtgttgataactcttagttaacccttaaagtttaaaacagtactcaaaaaaaaataatgagaatctagtattctgtagttaactaatctataagataaattgctaaagtactagggagcttgtaaatcttaaaaatctttttatttcagtgttcattcaggttggatatatttgaaattgtagatttctatctgtacaacatctcctagttaatagaatttttttccttcccctcccttctctctcctcctccttttctaaccaaagggcattttatcaacaatcatgctgaattcaattaatatctcaagctaaaaaactatgtaattgaggttgtatctggagaagatgggaaaacattgtataatttaagcccttaattgtctgttgagcttttagggctgagtaattgcctttcatacaaataaaagctttaactcttttctcaagagtgtaccaccgtccttagaatcaggtgttttaaatccagtttcttttaattaaatgggactgtagtgatccctaccctgtagagaaatcaacagaactagagaagctaagggcttgatcaggtttcccctagaacctgtgttgcctgcctgctgtatcttccatgtctttcttattcaacttctagaagtagagaaggttgggacttgagtgtagaagaaacatcagaataatttcaaaaaacaggaagttggaactataatttttaaattattgtattgtttttacggattttacatgt

SEQ ID NO: 116880 - DNA, 1042 bp, Homo sapiens
tcatgtattctgaaaggattaaaagtttccccattacctatctgccaacctcttgtcagaattctccttggtaagtctctttttcactctgccatggtcactttgggatttaattttcatctatatggataataataaatatttaaataagaattctggtaatattttaaaatgagagttttatgtcagttattgctattaatagtgctattttaaaaattgccttataggaataagtcttgactgggatgaaaagagaccagaatttgttcgaggatataaccatccctgtggttggttttgtgttccacttaaagacaacccaaaccagagtcttttgacaggatatattcagacagatctgcgtgggatgattcctcagtctgcggtagatacagccatggcaagcactttaaccaacttctatggtgatttacgaaaagctttatgagaggcaaaatacattcaaacttgtagtactacagatcaactctctcagctacatggcctgtaaaaatcattgattccacttttctgcatagccggtagaaaaatttgaaatgtttttggttcactagtacaatgtttggttttattcctaaagtaaatagctatctaagagagggcattttcacttttttttttttaaattttgagacaggctctcactctgttgcccatgctggagggcagtggtatgatcacagctcactgcagctttgatctgaccgctcaaggggttattctacctcagcctcctgaatagctgggaatacaggtgcacgccactatgcatggctaatttttgtttaattttttgtagagatgtggtcacactgtgttgcccaggctggtcttgaactcctggcctcaagtcattccccaccttagcctcccaaagtgttgggattataagcgtgagccaccatgcctggccccaatttaaaatgtggaattcagttggtgtccaagacttatcttgagactcttaaaagcatcagtctgtaactagaacaaatacagtcttagatttacccaagtg

SEQ ID NO: 116881 - DNA, 1028 bp, Homo sapiens
ctcaattgccattttaatagtaaattgttaaaatgaggaatactgtgacaaattgagggaagccaggggaggcaagagattccctttaggcttgaagctttaagtaggcttctggatctgggatttttgagctcattgaaacaaagaggactggaggtaaatgtttgagagttaacagcatatctatatatgagatacaattgcttccccttcctcctgtcttctcttctactttctgtatgagtgattttaattgtaaaaaatatgtaattctcacctctggctatgggttattcatcttgggagcaattagaaaaaaactatgcccgggtcctactctcagagattatgattagttgatttggggtgagggtagctatcttttatagctctggtaggttattatattgtgaaaccagattcgagacccactggcctattgcctcaaactgtggtatttgctgatgctaatcttggtctccataacagagagaagtaatggaaggcctgtctgatgttgcttcttttgcaactaaacttaaaaacactctcatccagtaccatagcattgaagaagataagtggcgagttgctaagaaaacggtaaattagttcaattacttatatttggggtatatcttctatctaatgaattggttgatgacttttaaaattaaatggaacaatatggacaaagaccatactttggatggatatgcaagaaaaataattgagctaataaagttgatagtctaatgtcacacagaggaagaaatgcatcagtggtaatcctatactgctttcattagctctttggatattagacaagagaataggctcatggcaactagaacctaaagaatggcctcttaagtcagcaaataaaatgtatcattattaatttaagaaagtgtagtacttgagagtttggaatagtttcaggtatatcaaaaagcctatgaaggtagctagttagtattcctttttactaatgtgacttgcccaaactattacataggtgacttgag

SEQ ID NO: 116882 - DNA, 1043 bp, Homo sapiens
tccctctaaattttaaagagctgaagcgtgtaccttggagaaattctggcattttggttgtgctgcattcaggctggaatttaacttgggttttttctaaaatgcacaagttcggagggagaaatgaattcttttgggaaggggtggggttttgtgcttgttggtgtggttaattttgttcttcttgctcctaaagccttgttagaaactgttgtgtttctttgcattaaatgcactttggtgcatgcaagcttttcctccctttttataaaatgaatttgtgtccctccgcccttacacttgattactctttcaatgctgctgcttccgagggtcttcttaggcattcgatcttgcagcacttttttctgcattttcttataaagcagttgaactttggcggggagggccttaaaaataaatgactgtttttttcttggtgattataataatctgatgtgcatttatgtgtatctataataacattataggaaaactctaagagcgaatgataccctttttgagaacttttagtttctccattcatcttaatttttgtcataactgtgttaacaaaagagcggtcttctgataatataaaggttgagggtaaatcactgcagcagtatgtacattaatgtttatttggtttagggagaaggacagaatggtgtatattcctgactccccccaccccccccgccgtgtagggttttttttttttttttaaacacggaaggttatgtaatgcagtgccatttccaaaaatatccactctgaggcattacactacacggtggaaggctgattcctattctgtcgtcttgattgcaaatatactgccagtagtatgtctgggaacaaagagcagccagaaaacaatctatttttatcacttggttctacttttaagttgctaaaccttttgaactcatgcaatttaaagatgaaccaaacactaagaatagcccaggactctgcaaagccaagtaccagggattcctttgtcccttagttaagcctataggccacttggaaagctc

SEQ ID NO: 116883 - DNA, 1055 bp, Homo sapiens
tttttagtatagtttcctcatcaagtaggctaaaccttccccacatatctctcacatctaaatatttttcacatctaaatagtctttcagcataaatacaaatcacattaatagagctgaaaagttctttataatctttgattccctaacatcaagtataattaatgcaaagtaagaagcgcttaatgtttattgactgatttgaaagtgacaggctgaataagcaaaaaaatctctcaccttgtctaacatcaagccatgcagtatagattctctgtatagataatcattaatcctaatttaattatttccaggaatggatggaaactctcaatctccttcaatggaaagaaaaatattcaattagcttgtctaatcctaataccaagtatctacaatattcttagcacttggttagagactgaaaaaaaacagttaaaactgacatggctcttgctacctaggaacttatcagctaatatggacaacatatgggaacagttctaatggaaatacggatacatgtatataaataaatatatacaaataatatataataaataacataatatataaataatacatataatatatatatgaacgtgtactcgtggagcaaggaacattattgtcatctgcccaagcctcccaacctgtaaaagcattcttcagatgtatctgtgacagataagtaccctctgcatttgaatacttgcaggcacagagacctcacctcctcttaaggcaggccagagcactactgacagggtcacacatctaggaattttgtctatatattaaaacggtgattctgtcctttttgggcatgatgatactccacataaactataggtccctttccttataagagcttttcatgtctgaggacacagatctcacttgcttatgagtattctctttaagctaagcaaaattatttacataatactgaatctcttcacaattttctaaatatatattaatttattatacaataataatggaaatcatttattaagcaattgttctatgccatgtattgtgctaagttcttt

SEQ ID NO: 116884 - DNA, 2344 bp, Homo sapiens
caggcactcaggccagggcctggagcatagtaagtgctgactaaatatctttcgaatgaatgactctactcttcctcagctggactcatgaattctgtcgggtcccaaaatacgtggtctaaagtcctttgggctcctgccgctgccagcactgatcatatgctcttgaccctggtcgggtggggggatgtctggatacctcctctgtggaaagaactggccacacatccgcagaggtgactcgggctgagaacccaggctcctcctccctttggtgacacgcccctcggtccctcactggcacttctccctccggccacacggcggcgtctcgccatagcgcagcggccgatggtacagcccgctcccccctcgcgctctcggacagtgggtccttccacttgtagaaaagcattgtgggacggaagcctgtcctttcttccttttggtgcgagcttgctgtggtttttgctctgggtcctctgggatggcgcctggctgtggccgcgtggtctctcacgcaggggcgccgggcgggggaacgcggccaccctgagtctggtgagtcgactgcggcggcctgtgtccgaagtgtccggggccgtgaacaagggcagcggcctggcctcaggcctgcgttcccacgtttggaaacggggagcttcgtcgatttgtgtttacatcatcgactatgccagggagttctccagataagcctggttttattttcgtcagtgaaaaggccttaccgtataactgactttatgcttgccctgcccccgtataaaataacttaaaagcagcgtgcctggttacagctgtttccacgtgcggtgctcgtcgggagtgatcacctaccctacaggtgagttttcacgttcgtgcaagaccagtcgccatttaaaacgcatcgcatttcacttttcattattaagtcggattttaaatcgtgagaaaatttctctgaaatgtattgtccgtttttaggctgtaatcggcattactgtcagccagtcagcaaccttatgccataaagcctacctcacgcagtgtcagcctttgtgttgcccattcactttggaaactagtgaatgtggtgtcaaaaaaggcgtaaattaaacgctttgcagccttttcctgcccttaaatttgatacctttggtgtaggagctgcataagtaacagttgctgcttttacgtttccacgcgtgatcttgaccctgctagccttaagtgtatggtttctcttagccagttctaatttttgttcaggtggaagatggatgcctgaagtgtagactgctgctagctgaataccatctgggagcataaaggtgacctgaaggtagggtgatatgtcttaaagcactttgtaatgggaatttttatcaccttttaaattggggttccttctctagtgagttttaatgtcagtggtacattcgtagtgttgctctgtctgtagctattaaggtgagttaataaatgggatagcctccacagcttatttttgggaaggttttgctgatacttcctgagaagcccagggaaataaatacgcatagtactggcattctgcatctctttaagatttgtttttatgtgtagtaattgagttttttaaaagcttgtgaaatcgcaggcatattaccaagttcttgattaaaatgtaatacaaaaatatttgctgtcgaattgagtactttattttttctcttaggatgtccttggtgaggattttgaaaatttgatcttcacaagagttgcctggatcatttgaaatttctgggagtctgaggagtactgacataattacctgctggagtctgtaaatacacatttaagacagtgaggatgtgaataaatatattaatgcactttggcatttgtgttttaagtgattaactgccagaaacagctatttctaaaaagttataagggaggaggggttcttttttgatcagtattcactgctgtcaccataattaatagccttaaaatagcttgtgtttggcccaaagagaaatgtactttcttccagtgactcaaaaatcgtggctagaactagactgatttctagtgacaggtgtgctttactgcactcaatgcgtatttttcctccaactaaattgtacatttaatgttgccatatcttctgcctttgctttgcaggaaacgacaaataatgtatagaggtattcaaaaaatttattgaaagcactgtactaggagctgagaacacgatgatgagcacaacacagttcttccctttggaaacatagataagtggagggaatgtcatcacaaatgtaaaacttcactatgagatgagttccgtgatagg

SEQ ID NO: 116885 - DNA, 1004 bp, Homo sapiens
gggctgctggcagctgtggagagaactgtacgtggtaagggggagatataagatgtcctgcataagtattttccctgtagattgcaaagtcatctatggagaggaaaggtacaaaatagtcactggggagagcaggtgaattagatggccaagcagggtggatggatcatttgaggtttggggtgacagatcaactgagatccacttacacttctgaaaacgcaagaacactttagaaattaacaacacttaaagctttttacatcatttgtaaataactggtggaacttaacaccacaaaataaagtattataaagaactttatatgaataaaaatatatgcagtctgaaagtgatgcctcagtccttttgcatctgggcactagttgagaaccagcccagccctgggaagacgtcctcccacttgtactattgcacagcaggctagctgcagttcagaattccagaatgttcatcagatgcatctggtcttggttgtggtggacacagacacaagatagaaatgaatgattgctatcctgttccagaaatgaaaatgtggtatcaagtgaatttttacaaaatacttattcttccagttaaaacaaaaaggtccttcagcacaactgtgctgtagttaaaccatggcctataatcccagcactttgggaggctgaggcaggcggatcacttgaggtcaggagttcgagaccagcctccaacatggcaaagccctgtctctactaaaaatacaaaaagaattagccgggtgttgtggtgcacgcctgtaatcccagctgctcgggagcctgagacaggagaatcgcttaacccagtaagtggaggctgcggtgagctgacacggtgccgctgcactccagcctgggcgacagagtgataacatctcaaaaaaaaaaaaaaaaagaagcaaaagataatgtattttctcatgctgaagaaatacttgcaggtctgagatttgaattaagatacctatttcacag

SEQ ID NO: 116886 - DNA, 1039 bp, Homo sapiens
tgtttggaagagtgaggttgagagcctggtttgggaattgttaacaaaagtaatgacactgatttgggtgaattatgcctaatattcatgaataaaatcgttatgcatgtaaatgtcagactaactttgtatattaaagtttaaatacaaactttattttgcacagctatttagagggaacatttattgaatagcttttggtattatgaaacttttgaattaactcagtatcttaaatttaagagcagcttggtttctgatgtaattaaaatacttcatttggctgttttcttctgaatctttctacatttttcaaatatattttagagaagaaatgggtctaaagatagcctgatggaagaaaaacctcagacatctacaaacaacctggctggaaaacacacagcaaaaacaataaaaactatacaagcttcccgcctcaagacagagacttgatcctgatgaagggtcaagggtaggggtgggaaggttgtgtgcgccactggtacttttgaaactgtgaaataggtatcttaattcaaatctcagacctgcaagtatttcttcagcatgagaaaatacattatcttttgcttctttttttttttttttttgagatgttatcactctgtcgcccaggctggagtgcagcggcaccgtgtcagctcaccgcagcctccacttactgggttaagcgattctcctgtctcaggctcccgagcagctgggattacaggcgtgcaccacaacacccggctaattctttttgtatttttagtagagacagggctttgccatgttggaggctggtctcgaactcctgacctcaagtgatccgcctgcctcagcctcccaaagtgctgggattataggccatggtttaactacagcacagttgtgctgaaggacctttttgttttaactggaagaataagtattttgtaaaaattcacttgataccacattttcatttctggaacaggatagcaatcattcatttctatcttgtgtctgtgtccaccacaaccaagaccagatg

SEQ ID NO: 116887 - DNA, 1022 bp, Homo sapiens
tttgtggtattttattcttcatgatgtaaatctatacatcgagattaaaatagagcaggaaaggagcaaaaaactatttggatcccccatacctgagaataaatgagacttaaaaagtcagaattatcacagtaaacatatctttttcatttaaagatttctttattcactcatgcataaacaaaatagttactcctgcctcttaaggacaaagtgctacaatattcttgcttctagggctaggatttttttctttccaagtagcacctgtgttttttggagcggttcagcagtggaagaaatgacactttcattcttgtaatgaggcaccattaactagaggtcttttgtaaggatgtaatttcaaacttcattacaggccaaggccgccacactacccattactcaggaaaatgtgcttctgttgtgactctccaaaggctcttacatttttaatgcatcttgttagaatatttatgaaacagcatcgccagtagagggcatctgtctttgaaacatgtggatcacaaggatattaactgacagggtttcactgccctcactttagacttttcagttagaaaaaaaggtaaaggtacatgtataatcttgaattctttctgatttggtccttattactattatagcaggatacaggaaatacgcatgcttatgtctcaggagttttaattttttatcatcagagtgaagtctgagtatgagggtagccagctgaattccacaatagatgagaatgaacatacagtaactgtgcttccttttcagtgtctgttactctaggaaaagtatgtgtttgcccaagttaggcctcagctttgttagcaggtttgacctctcaaaaatatttagacgccccgacttcctgacacaaacatttcacattgtaaaatttcgttctgcccatcaactggacagtgattttgttcagaatgaaagctgcatcctaaaagactccagggttaggagttaggagacctgagttttgtgtccaatcctgggcc

SEQ ID NO: 116888 - DNA, 2092 bp, Homo sapiens
tagttagaattttgaatctcgtccctgagatcagaagggccagcagctcgcttattgctgtaggtttgagaccatgggccatgtgctggacttgcccagggtgtaggatgaaggaggacctcgcaagtagacttaggagagtgaaacctttgatgaactagctttacctggatatgtcttaagcttaataaaatatccttgacattcaaggaaaaggttctacaaaatatcctttgtgctattgatgaaaatcagcagtcctttgagcattcactgaggagaatctttgaattactcattcattcattacctttgatgtgtttctaggctcttagaagtttggaagtgggagatgtggaggagtgggtgacatgagatagtctggtgcgtttttttccatcagcataaaagtagaaataacttgggagcctaccaagtattaaaacagagaaacgagagcagcttagggtaatagtagaactagaggaaattgacaacaggggactatttgaacgtttccctaattttattctaggatgtttgcatcataaacatgagtcatgtacgtcagtgtcaggctgcatgtttgtgtacatatatatgtacatgcaaatctgggagcctgtactatgaaattgaacccactttgaagaattctgtggctttgagctggttactttatcctgtgaatcttcatttctcacatgcaaagtggaataatacctgacctgcctacctcactagaggtttgtgaagttcccgagataatagatgtgctttgaaaagtagaaagtgccctgcacaggcaagttctgttaaattgataacatccagcactgctcagtattttctgaagttcctgcaggatctgtaaaatggggaccagctcccttgaacaagaaataagtcagtgttttctaacatgagtttgttctggcatgaatgttgctagtttctccctaacaacattggggtcttttagatgtcttttagggtctaccagatgtctacagtatctaaatagtagattaagacagatttaaatattttaattatgttccataaggtcttttatattgtttttctaaaatgaggaagcacatttctgtgtgagaaatttggcactgtaagagggacaatatatctgactagggcaaatctagaagatcacaattttggtaggattttgttttgggagtggtaaagaagaactttattgtccctgtaccctagggaaaaaatatatttgggatgttagcaaacttaaactgatgggcatttcttccgtcttgcttgaaaataggtaaccgcttccttgccaggaactgcctactgtcctgcccctgatttaggggctgcaaacgaggtaaaaattttgggtacggagagaagagttcgtacaaagctagtggaaacagtgttcaccgtactgcagatgcaagggtttctgatttctactttaataggatatatcaagatttagacatttgatatggttgatttagggcttccagagtataatcaaggttggcagagatgactgtggaaggacaaagccgcagcaactgaggaatgctgttacattactgagtgagggcaaaataggttaaaaattcatgaaaacaggagagtttgaaagggaaattgcgccagaggtagcccattgtagtagtgggcacgtaaggaataagtggaagagacagaagtacctttaagagcaaataagaataatttattgatggtagagacaatgggaaaagcaaatgaactttttgcttgctggtcttaagggagtatgtcgacacatgcctggaaccaacatacatttccctagggaagaaaaactagaaaaaaaaaagattgctttatagcaggtgatccaaaaaaaatgagtacagttgatgagaaacacaagttcacaatcagttggggcctgcagatttaattttggcaatggaggggccatgtgaagcaattgtctggaatgttatgctatagttgaagagtgtaagtttctttcagtgtgtctgtctggtttggaaataaaatacaaatagagaaacatcaagttttaaagctagaaaggatcttt

SEQ ID NO: 116889 - DNA, 1064 bp, Homo sapiens
ctaaaaatacaaaattagctgggcgtggtggcacatgcctgtaatcccagctactcaggaggcagaggcaggagaatcgcttgaacccgggaggtgaaggttgcagtgagccgagactgtgccattgcactccagcctggcagcaagagagaaacttcatctcatatagaaaaaaaaagaaagaaagaaagaaagaaaagtgaggaagttggattggataatctccaaggtctttctttaatgcttagaacccttgcgcttggcacaaattgaatcagtgatcctctaactacaaagcctgtgtaataatagcccagacagcattgtaagagtggacatttttttaggaaagcattctatgtggagccttctgaggctggaattacactagacagatgggagatctcaatgtgttacgacacctttctcaaagaaatgatttcagtttcttctttgaaaacccatatgtgggaggtagctccttcttaagtatcctctttctgataaaaaattcagtatttctgcgcaaacaacacaaaacaaagcaaaaatacccacttattttcttatttaacactttttattgatcaagccagtattttaagtctgtttctgttttacctaatatattctaaattgtgcccataagtgttctgttctcaactgttcagaaggtggccctgaaaataaataaaataaaacatttttgggggagccaaaattgctcacagtaccattcgctactgaaaatgaaacactagtgaaaggttgccatcaaataattaaattgctcatactgatctggttgcactggctttaatatttcttgtaggtattttctcccttaagagtttcttccccctttttcctggacagattagattggctttctttgtactgtgtaaaaagtatattttagaataacggtgattctgaatgtttaatgcactttgtaaggctagtaatgagaaatagctttcaaaacacattccgacacgtttcatgcaaaaaatccaacaggccttcacaatcatttatgctacgtatagaaatattgctctagg

SEQ ID NO: 116890 - DNA, 1310 bp, Homo sapiens
cctcattctattggtaaaatcagtcacaagaccagtgtaaattcagaggatagggaaataaactctacgtctctcagtggggcggatgggagggttacaagattttgtgtccatatttagtccaccaccgacttacggctttgccatgtcagagttctgttggaagtgattgattttgcggtccgttctgggaacatactgacattcaccttaatcggtttttatatttcccctgcattgccatttccctgagctatagactcagtcagatgtcttactgagttcagaaacactgacttggagagggataatacagctcttgatgtttggattgataattttactgcaaaatgaattccagaggacccatataaacctttctgaaattgttcgtgagttataaatgtgtgttttttcttttgttcttacctttttgtcttcaggtcacgttcacgctgtaacaccagcagtggtagtgaatcagaaaattctaatagagaataccggaaaaagagaaacaggtaatatctcaatattataattaactggcactctgaaatcagaggctgcccttggtggtagaaactgagtgtcctttgtaagtctgttttttccatctgagtctgagaagcaatctggcactattttgaagcacttagtttaggaaactttagctctttgagtggagttttcttatcttcacaataagatgattaaacaacttgacaatgaggtcccttcttgtgtgtgtgtgtgtgtgttttaaaagatgattctgtatatagctacaatgtgtagtgaatttctctaaggctggtaagaaagtttaccattcgtagatagatttctccctgaactatcttttcaatggcattactatattttacccaaccaaaaataactcattgtttcttagattctgcggtttcaggcttatgtatatatatatatgctaataatatgtgcatttactcatctgtgtgtgcctgacattccatatatgtaagatagatttttaagatatttttaatcacatcatttgacatgtagtcagtattagtggtggcttaatgcattaatcagttatccctagttccaaaatatgcactcgaaaacaagaagtatttgtgtcattaatgaaaagagcaccttgggagtcagagggatttggttgccagtcatgccagttgttaacccagtggttctcaactgggggagttttgtcctccctgccttctccccaaggacatttggcaatgtccagagtcattttttatcgtgacaattggatagggggattgcaactgtcc

SEQ ID NO: 116891 - DNA, 1064 bp, Homo sapiens
cagccagctgtttaggactgatccagaaaacttgcatagttggattcacccatgcctgggattttgccaaaaagatggaatgaaaaacagagttgaggaacatgttgagtatcagcatgcatgttattgaaatgatggattaggaaatctaagctgagtacagaagacagtgaagagaagtgaagagctggtggagagtagccaggtcaatagatagtcttattggggtcaaagaaaaggaagaatggaaatagttgaataagcaataacagcttatcttggttgagtgctaacaatggcccaggtcctagtgtatgcattttaaatgtattaattcgttttatcctttagaggagactttaaaggagattctattaaaaatgagtcactgagtagaaaagtaacttatttaaatcacataactcatcagtggagaagatgggattcacattcatgttgtctggctctagagccagcacctttaaccaggatgccccattgaagctgtttgaaagtaaatggcgagtggtaaacaggaggaagaggagattgtggtaagagagcaaagtgtttggaggtggttacagatgataaagtcgtaagtatgaggtaggttgctgagttgaagtggaggagattatgagagaagagataaagagaatttggagcctcagggtatgggaaagggcatccaagtgagatgatgtcagttccactatggcagaaatcagcttggaggattgcagttctgaaactgcagactaacctcatcattggattaatggaattcggacggtttgcaggttccactagagtgaggccaggtgatgttattaacattatatttctgggacgtgttgtatgtagggttaggcatatacatatgacgtaaatgtttggcaaatgaatgaatgtatgacaaatatgtgttaactgaagtgaaactcattttggtgtgctttccttagccaattgataatctcctgttttcttaaatgtcttcatttgttttcacaggaaagcccataacagtggtgaagattcagatcttaagcaaaggagga

SEQ ID NO: 116892 - DNA, 1056 bp, Homo sapiens
gattattttcagtttaggagtctatgcccagataaccataattgtttgtatagaataaagacattttcagaaattttgggttccaaaaaagtgtatctgtcatgcaaatttttctgttagcaactaaaagatacactttaccaaaacccagacaagtagccaaaagacctggagatgtagggtccatcatatcaagaagcaaaaggagttccttggatcatggtaaaggggagttagtcaaaggtccaggtatgagcaggagggcagagggctccaggagggataaatggaacttgcagattacctgagtatccatccatagcaggagttttgctgttctctcagagtttgaagaattagtgataagcaaaagaaccctaagcaagtgatatgtacatggaaaacttaggcaagtatcttctcttagaaaatttaaaacctacaaaagaatggaatcatattcctggaacactatttagatcgtctgtgaccaatttcggtataattgtgtttatgctaaatagtgaccccaaaatttgatgtaagaacagagaccacatattgctgttcatgttatttgatataagtgtgttggaggaaatggagtaacgtaagccatacgttaaagagatcagaatgggaaggtgctagattacagattgtaaggaaatggagcatggggcatagacaccactctccaaaagtttggctttgaaggagagaggagagactgggcagatgaggggggatgtggactcaaagtaggtctatgtttgtttaaacagtagagtcttgaaaaagttaatagcttgtaaaaagagtctgctagacgggcaaggtgactgtgtgagaggtgggagggtagttaatgaaagtcattgaaaagacacagggtgatgggaccacaaagcactggtggagggactaaccttggtagtaaggataaatccataaataacagagaggaagatgttggtaagtttttatttttggtagcaggaagatgaaagagttacatctggaggctgctttttccttcggaaggagaaaacaaaa

SEQ ID NO: 116893 - DNA, 1049 bp, Homo sapiens
aattcagtttcagatttttaggaatgtttgcatgaagaacacatttgaaaatgtcttttttttatatgtgagtgatacagatcacatgtatattactctttttttgacagctgcattatgagttgggatattttcaggtttgaagttttttgtttggtttgatttcaaatggggactgtcatgatatgctgagaaacttcttcacaagtagtcatcaaaacctgatcattatgttttatattctaatatatggtactaaatatctcagaatatcattttaatagtctaaagtgaatgttattttaacatctaaagatgtggagacttagttttaaagtctgaaaaaaatagcctagactcccaggacattgttatgttgagggtttagtacacgttagaaaatagtacctccaatttattgggtgattcattatttatttggggttataatttatcaataaaatgtgccacagtgtccctaaaattgcattttaaaataagtcttctgtttctttcatttccttatcactgtttcctctctcttccatctttccttctcctcctctgctagaatcaaacagcatcagtaggataactgcaaacatggaaaatggagaaaatgaaggaacaattaaaattattgcaccttcaccagtaaaaaggtcagtgaagttaactgaagaaacgtacaattatatgctgttgtaaaaatgctttttttctgtagacaaggttaaaaatcttttaactttgatgattaatgaatacttttgatccatgggatccaataaatctctgggccaaataatacattaaaacaccaatgaaatataaaacatcaggacctgactctcttatttgaagaaagtgctctttttgtcacaaggtgaactcacagattgtctgtggtctgcattctccgcagaaaattaaaaatttcttgtgattttgaaaatggcatgatataatggactaactcagagggacttgtaaaataaagtagatgatattcatgtttaatgtactgtgttcattatagtggtgcactg

SEQ ID NO: 116894 - DNA, 1094 bp, Homo sapiens
cttataatctaccctccagcttttcagtagaatgccttctttgatcttgcagtagcaaaattggtgtctaaaaagtctatgtatatctagtaaaaaggcaactgcttaaatatcactcttggaactttagaaggcagaaacattttttgtgttttaagaaatggagtctcactctgtcaccaggctggagtgcagtggtgtgatcatggcttattgtaacctcaaactctcaagttcaaacaatcctcctgcctcagtctcaataactgggatgacaagcatgggccaccatgcctggctaattaaaaaaactttttttgtagagataggtctcactatgttgcccaggctgatctcaaactcctagcctcaagcgaccctcctgcattgtcttcccaaagtgctgggattacaggagtgagctactgtattcagcccaggaattcttaagcaggaatctggctgccttttggggatgagccaggtgtttgaacttaaacaattagccattggatgcagaaacatctttattttccaaattatgttttaatatttatttttgctttatagaatttaatgagcatctgttttgccaaatataaaattttccagctggatgcggtggctcacgcctgtaattctagcattttgggaggctgaggcaggtggatcacctgaggtcaggagttcaagaccagcctgggcaacatggtgaaaccccatctctactaaaatacaaaaattagctgggcatgatggtgggtgcctgtaatcccagctactcgggaggctgagatggtagaatcgcttgaacctgggagactgtggttgcagtgagtgggtggctgagcgagactctgtctcaaaaaaaaaaaaattccatgatgataggaaaattatataaggttttcttgaatatttagctatttggccgtaatttgtggtatagaaaaagaatgttttattttgctaatttgctatactgccattttttccatagtacctagtctaaagttggtgaaattaaggcaaagtcactttgagctgtcaatgtgagaaatagagctaaaatatattttcaattattggtcagt

SEQ ID NO: 116895 - DNA, 5978 bp, Homo sapiens
ctagacactctgcagatagtagcttactcttttagaagatgctgtaattctcaatgtttaggtgagaaagcagaggctgagacttgtacagagtcacaaagctgagatatgaacacaggtcagttacagtctacaatatagagacgaaagactaagaaagaatgtgttacatttgtatgtacagatacgaaatgatctccaggatatggtatataaatggtgggggcagagaagcagaggggcccggtagtatttaatgtgttaccattatatacaaagacaaattgggtgggaaagtatgcatgcagataatacttgcaggcaggatacattagaaactagtaacagtagtggcctttgggaagcgtttctgagagaatggggattggcagtgggagagagatttattttcatttgaatttttaccaagcacttttcaaaagccctacagattactgtcatgaatgcatgaagttcacaaatgctcatccacatttccaatagagacattctcaataagctcagagctgagacattgttcttaccctagatcattgtgatttacagagaaagagcaatataagatcaattgtacaaaactcaaatgttaggaatttctcctgtgttatagcagacacaaccagagtcttcaaggagaggggcataagtccaggattaaagtacataagatggcatataagtcctcaagccagagggtgctccatttcatgaggaagactcatggtatagagtctttggattaaatgaagtagaggacgctttgtgtttttcacccaaagaagtgatgatttgcaggtgtagcaagttctagaatgtggaggatgtctggatgagaatcacttagcaaggaggaatgtttgggaaaagagagggtaaagaaactgggaaaagacagtaacataataatagctctcacatctatccggcctttgacgggtattgtgaagtttttgtttatttcttctgggtcagaaaaaggaagaagttagtataaattttcatacaaaagggttagaacaagacattctgacctagaattgttatatgggtggctatggagatgatttctgaaaatatggtggaggagctttgttttggcaaaagtgtgattgtggctcttcttttccaagtgcacagatcagaattagaccattgactgagttatggtccaagtctgtggtccctccctctctcctttgtaagaacctctgctctgagggatgtttaaattacctcttgactgattatttaagccatttaattgagaagcgacttagtggggtggtaggggagcttaaaaaaaagagtgtgaaagttgtacctgatttgagtagccctgaattcctggtctgccttggttgtgacctgtaacttgtcattcagcattctcagctttcatccctttatccataaaatacaataattgggtatgtaagctttaaagattcctcttctttctaaaattcctttattctgtctgacttacctgcccacagagttggaaggaccaaatatgaaaaatagatacagtggaattttagaaagttttttttttaagtatatgggtttttaccatttcaaaagtcttgcaaagttgtgaaaaagatcttcccagattataaaatgtagttttgccattggaaatacacagtactttttgtgtttggaaaaaccttctagccaattctttaaaacatctcaggctggatgcggtggcttacacctgtaatcccagcactttgggaggctgaggtgggtggatcacaaggtcaggagtgtaagaccagcctggccaacgtggtgaaaccctgtctctactaaaaatacaaaaattagccggacgcagtggcaggcgcctgtaatcccagctactcaggaggctgaggcagaagaatcgcttgaacctgcggggcggaggctgcaatgagccgagatcgcgccactgcactccagtatgggtgacagagtaagactccgtctcaaaagaaaaaagcctaaagttcaaatgaaactcttattgacaaattgaataaagttaactttaaccatggctctattacagtttaaaaattattcttttagtccaaactgacgagatgaatatgagattttgcctgtttggttaactcatagttaaaaagtgctgtctttctgggtaaaaataaaaagaagacattccttcttagaaagtttttgcatagctttgtctctgcctttgagttgtgtgtgaacacaaccttagactagtcgtttcttgaacctgctccttcttttggaagtcagcagtgggaattggctctacctcggcagttgtttgttgttgcaattcttgattttactaatgcattgggcaaatttacctgtttttttacccctcctgttcttgacaggtgggggctggagggtgtgtctgtcagcggtttgggattctgttttggggatagatattcctgagtagatggcatctgaggattccacacctttgctttactatcagaattcattgttctgaggtgatggtttctatgccagtattttcttcagactttgaaaactctgggattgatttttttattggctctgtttggccataagttactcattacttattaatatcaatgttaaagattttgggggttctcagagttcagggttattttggtaggttatagggagagataggtgaggtaaagaagaaagaaactactttcggtcgggcacggtggctcaatcctgtaattccagcactttgggaggccaaggcgggcagatcaccagaggtcaggagttcaagaccagcctggccaacatgacgaaaccctgtctctactaaaaatacaaaagctagctggacatggttggtgtgtacctgtagtcctagctacttggaaggctgaggcacaagaatcgcttgaacccgggaggcagaggttgcaagcagggattgtgccactgcactccagcctgggcgacagagccagactccatcttaaaaaaaaaaaaaaaaactagtttcacttgtggagcaggtgccctgcttggcccttgggtcactggcactgtgctggtctttggagcaggagtccagaaggggtggaggaagagccctctgtaacagtggacttgctcctctcttctctcctggggtaagaatggggcctctgaggaaaccgcccagattccttctccagaaaagatgatgtgcagtccagcagatgagtcagttatctggggacaaccaagccttttggggctgctttacggtccaggtaccaggtacagctttgaacagagaagctggtttgcagagaaagaagaatggagttggctcactgtgagaatcacacagctttgagaagagaggggaagggaggcttagtagctatgaactgaagtctgtgagatcctgttgtgcattcaccatgaattcctttctaatttgagctgatttccttgcatgaaaacagtggataacattactgggtataaccctttcagtatccccatgagaaagatgggtggtagtctcatcttactgatgaggaaactgaggcatggaaacattaagtacttgtttgagattacacaggcagtaagcgcaaagccaggatcctaacccaggtctttgggatactatggtacatgcttggaaagtaaatggaagttaagaaaggtgaaaggtctagaatgatttgaaaatatacaacttctgttttttccccatgtgtgatttcttcagtagctctaacttgttttcaacaaatactcttgagaagaccatacattctgctcatttatagtcagagtcagcctacttttactttaagccatttttagaagaaaatgtgtaagttctttggggcatcttacctagccaagagagagggggaaaggcagtaactgttaattgcaaggagcattaggtagaccatatagtcaggtgtatgtttgttgcaggctgttagcctttgttggcatccttttctattctgccttgaaacttaggcttattttccatctgtaaaagatttattaatgtatggcgagtctggttagattttctctaaaaagttaatgttttcagtcttcttgggagtgtttagcattccaaacatagctacgaaaattagaaaagcaagcaaaatgaaagggctattatatattcaagttaaaatcacagctttagtgagttaccataaatgacaccttttttctttttcttcttattcaacaagaatttattgggcacctctttggcataagaccctattttatagagcacagaaaatggaataaagcttggcccctaatctgtaggaactaagtcatatacaaataacacagccgtcagttatttagcacttactaaattccaaacacagtgctaaaggctttatataaattgtctaatttaatccagctgtgcactatataagtagttagtggtgttcccattttacacaggagaaaactgtggcccaaagtagtttaataacttgtccaagatcacaggatcaatttacaatgggtaaactggcagagctgagaaataaatctaagtttgttggactttcaaccttgtacacttaaccagctgctttgcaagactagagaagcaatgctggaatgcaggcaggacatatcaagtggcatagagtggagcactgacagagttctaagtgtccggaaggataatttgcttatggctagaggcagtccatgatgctattgcaaaagaagggggttttaatggacaggtgaattaaggcagtagatttcaggctcgtgtatgcaactgctagggtggattgtataggggagaaaaagtagtagcttcctcacttatcactaggttcatggctgaggtccccataacaaaagattaacaagagaaaagtgtacaactttgtttaatataagttttatatacatgagagcctttagaaatgaagacccaaagaaatgagatatgtgtatattcatggacagtcatgcagaagtatgactagaggacaaaagggtatattctaatggtaataacctggaggggggcttagcaaaggttggttgtttggattcttcttggtttccctgtatgatatcccctccctctgggtaaagcaggatatctatcacatgagggattccaggggaaaaaggaggaagaaggtcagagagttaccttctaggttttagacctgtttcaggagaaaatgacagagggttgggagatgagaggggctttcttgcttctgctgttttctcaaatgccaaggtgttatagtttggggtagcgtgtcctgatctgagtcaggtggggagggcaacacacagaggctttctaagatgtacttgggcacaggtagttttcattgaatcaatttctagattctcttttctaaaaggcatattcctgtggtagtatacatactggttcttctgtccagcctgcccttttgcaatggaccttcttccattttgcaaaagaaaagagccctttcctacatctggaatctgttagactgctttgtccataagctttgaacctcttggggttggtattgggaaggtaaatgactctaattatcaagtgacatatccttttctaagtcattttctcatttttacttgcaacaaaattgaaggaggacccagcggatttgtcacttgatagaacattcagaataattttggataatatatcactgttagatatctaactccttagaagttctttgactcagtggtgatgtctttataacagaatacattacatatacctctacttattttgaacatgggttcacagcatcgaaaatcaaaataaaagtaggaatagacttgttgctaaactgtttcattctagcaaaaaataacatttgtaaatagatttgatacatgtaatcattagggaaataaaaccacctctgtttacctcattaaaaattgctttctgg

SEQ ID NO: 116896 - DNA, 1246 bp, Homo sapiens
aagtacagtttcatttgatgaagtatagctctgggctgctaagaaatagcaatgtcaaaacaatagttatttattgaacacttcctctgattggcacattgtgtcagatgcaagtcagcagaacctcagtgtggcttgtggcagtcaaatctgtgttttgaaggcagaggaaaggtgagttatctgaatagagacggatgtatcagtgcgatccagtaagctggatcctggtactttgctggttcagcttcagtaatccatgtactagacatgtaatattataaagtcacttagccagcttgagccttgatttcttcatctgtcagatgagttgctgtcatggggatgtgtctgaaatgggctgagtatcttgtcagaacttgtagaggcttggtacactttagtttccttctcctaaaccaaaaggatgtctttctattcacagtgtggaccactgtgaatccatctgtcaatgtctgaggtatattcgctgtaatggcatgaacttcatatacaaaggatgatgttattatgttgaggtgctgtgggcttttgagagtgaggggtaaggagaggccattcaagtacagtgagaggggcttggaaaggaaattggacactctcacttaaatctagaacattcagtataaatcgagtgtgaagaactgggccagtcagagcatactatgtgaaggtttcttctgtcctgcctgcctacagattttagcaccccagggcagctgttgggagcagtatcaggatcacagagttaggaagtgtctttcttactatgtttctactcttcagagtagcatttagtccaagccttttttttttttttcattgtggtaaaaccataacattaaatttaccatcttaagcattttaagagtaagttcaatagtattaaatatattcacattgttgtacaaccaatctctagagtgttttcatcttatgactctgaaactataccccgtaaacaccaattaccccttcctgctctccccagctcttggtgatcgtctttctactttgtttctatgattttgactactttagtacttcatataaatggaatcatctagtatttgttcaagccatttttcttctctgatttttttttttacaccaacatctctaccctcctctcctccccacctcagatcttcactgctctccagccctcttgggattttctatgactatgaattggaaagaacaaacttcttacagtgtgttcatt

SEQ ID NO: 116897 - DNA, 1050 bp, Homo sapiens
caaaaaaaacacaaaacatttgtatataattttttaaaaagtcgtgatgggggttattactttttgttagtttgtatcattaatttatactaaatgagtttttactttagaagacctttctttttaattccgaagttaaagtaattcaatcaaactagatgactagtccccttaacttgcatcccagttgtctgtaagtttaaaaagcatgtttattcacctctcaatcaggagtaataaatgccctggcagctaaaaagccattgtgtttagaatttgccaagtgcaggccctggcacctttatgaggaagtacattccagaatcaagtgccctgcacccagctgcctgcttccccacccagaggaggtcagcatcagggcaggcagccagagcattcctgcaagtctaaactgcctcagaggagcttgggtaaagccagaaaagggacggcaggaggaaaaagtgccctcctgttacaaccctctctctgacaagttcttggcaactcacacagttggattcctgtcaaaggagatcgtctctgctgtaagtaggcaatgaagacagaatatttggatataattcataattagctataagaaaagtaatgggtgaagccatttgggatggatacacaaggctttgattatctgatgcagcattttaagttcttaaaaatatctcactgaacacacaaatacttgcagcataatctttgaactattgcaaagcaagataagatgacatttttggcattcccattctgcctctgtggaaggggctgcaaacagagtgcataaggggttgtgaaaatgatttctgagaggatggtttgtgcacagtgtgcaagaggacagctacttaccgcttggaccaagccagttgtttctgtgcagcggagtggacctagtgttgatgtatcttccagtgtttcaagagaagtacaaaatctggatgttcatgtgaacttcctagaatttgaaatactagcaattaattttattataagaagactttgtgtgctaagttaaacatttctgatcaacag

SEQ ID NO: 116898 - DNA, 3743 bp, Homo sapiens
gtttatcctgtaaatgtaagatgaataggatttggggccattaaaagacttttttcctcccatagatggctgtacttgtggtgaatcaaactagacttgtagaaatgcgtttttcctgtacctaaatgatatttacctgcatgaaagccagggtcattcagttgctcaaattcagcagttgtggaataaattgttagtaaggtgaatgttcactgaaatccagcaaactaaatcacatgattccttgggaaaattacttgagaagtttggcccagccccagggaaacctgccctggaatctgcatggaatgtatagagcagcagtgctttgcatggggttctaggcctgccttcagtcttcctggacacttgatctggcccaggcagggtgggcatagtaaatggctaattgtgccatgacagagtccagaataaaatcataccgagtggtcttgtgggggatggtttacaacctgctgtgtgagtacaacatggagctcatgtggaatcattgccttcccacagtttagcccaacttaatttctttattatttagtgaccttaaagactgtcagcaacctttatttctagcccatcattctactgaaatctaattcctcctttaataaattctttcttcctgtttcctcctctgaaagattttccttctatctaatgtaaatctcctcctagaatttaataaccactcccttgatcaatattgcaatgagaatcaattaaaaaccagggagtctgtgtgttttttcttctctccatatttggcagatgttctgaatgacctgttgtttaattttgtggctgtgtggttttacctttgctaatcaaaatgttgcactctcaagtggcaggacagctttgcaaatgagccgagatctttctattcagcttccccggcctgatcagaatgtgacaagaagtcgaagcaagacttaccctaagcgaatagcacaaacacagccagctggtaagtcatggttcccctgagttatctatgtaaccttgttttcctttaggctggtagtgtaagatatactcaggtgatgtctataactctacagtctttctattgaaatttccaatattaaaattttctaatattagaaattttaatttgatcttggaaatgttcaagcagacagtaattttaagaagacatatagtcatcttgaatcaccatggcctgcttaatgactgtactttctttttttttcttttttgagttaggatcttgctgtgtcaccaggctggattgcagtggcatgattatagctcactgctgccttgacctcctgggcccaagtgatgttctgacctcaggtagctgagactataggcacatactaccatgcctggttattttatttttattttattttattttatttatattttattttattttattttattttaattttatttattttatattattttattttattgagatagggtctcactatgttgcccaggctggtctcaaactcttgggctcaagtgatcatctctcttcagcctcccaaagtgctaggattacaggcatgaaccaccatgcctggccccatacgttctttttgaaggggttttattttacataaaatcttggctgggcacaatggctcatacctgtaatgtcagtgctttgggaggctgaagcaggaggatggctggagcccaggaattcagggttacagtgagctatgatcatgccactacactccagcctgggtgatagactgagaccctgtttcttaaaacaaacaacaaaaaccacacaagacaaaatgctaaactgagtaatttcttaatttgatgtatttgagttgaaattgaaaaaactcttagcaagagtcttgaaaaaaacaaacaaacaacaaaaaacagcacttctgggcatgatggtaaggctgtcgtcctagctactcaagaggctagggcagaagtatcgcttgagcctgggagtttgagtatagcctgagcaacaaagtgaggcccctatctattaaaaatacaaattaaaaaaaaggagcactattgaggtaacttaatttgagcttcatttgtacagaatccagttggttctttgttattattggtcttttattgtgtaacataatacacatatagaaagtatataaataaaatatccatacttatggacatatacatacatgtatacatatgtgtgtagacacatacaaagtttaatctagcctgcatcccaaaagtgccacatgggcatttctctgataagtgttctcaccatttcctcccctcagttagaggaaacttctgtttgactttgtggtaatttcattcctttcttttcattataatttgtcagtttcctgaacaaattagtttattttgcctgtttttaacattagatgaatggatcatagtatgtctttttttgtgtcttgattcttcctgccaacattatatacagtgtgtactaaagcacattcctttttcttgctgtgagtattcttgtgtttgacaatttattcattctactgttgatggatatttgggttattcagatttttttttaatgaagacactgtgtctttaataaaaccacctaatcaagcagctttaatccatgttcagtgctcattgctcacagaattttactgtgaagtaatattgctgacgttagtttgtggcttgcttatagatcacccttgtctaacactctccagtgtcctttcacagatattatcttgtttgagcctcaccctgtgaggtggggcaagggaaagagtacataccattttacagatgaggaagatgtgcttctagcagttattcagaggtgtggctgggacaggagcccaggtctcctgggtctagcacattataggaagtaaatgaaatttttagtaacaatattaacattggaacattgtgtgaaaattgacctagcattatgacatctatcatttcatttaatccttttgtcaagcctgtgaagaaaagtgtatgagtttattttaccattcctgtgtgtgagaatgtcacctgacttactgcttctaaagtcaaattaagtctcactctagttcccctcctcttgttgggctggaaggaaataaagttctttctggtggttctacactgacaagaataaaacatgactaaatttgcaatagattaccttgccacatcactattattttgcctcccttcaggtaatgaggaaactaagacgtgaaaggcagtttggctaaaactactgtggagtaggtttactgggcattggttactgacttgtttgagtccattgagagagaacacgctcatatgcaacaagttacatgaagcttatgtattacttacacatgggcatcagaggacaaaggatgtctaggatttgttgtaagctggtccccctaatgcacagcccagcctttttggaggacagcctcccagcatcaggtggatctctctctctctctctctctcttttttttttttttttgagacaaggtttcaccttgtcacccagtctggaatgcagtgttgtggccatagctcacagtagctttgaacttatggctcaagcaatcctcccacctcagccttctgtgtagctgggattacaggcatacgccaccacgcccggctaatgtttttttaatcttttattttttgtagagatggggtcttgctgtgtttaggctggtctcagactcccagcctcaagcaatccttacatc

SEQ ID NO: 116899 - DNA, 2555 bp, Homo sapiens
gagcaggtaatagtcagtacttggactgttcttccagttgtggcataaaacatcaccaggattatagagagaatgtctccttgtccctgaaaaggagctggtagaaagacatctgtcttaatgttcatactattaaaattgtaattatcctctttaacatacgctgttgttggcttccacaaatttagccatactttatttctcaaatttattgaaatgcaaatgttgtggctactgggaattattattaggaagttattggattttgcatattaagtatcatttcttccaaggaagtgattaaaagtaacctttgcaaaattggaggccatgctaaatctgttccaattttgtggctgatgttaactgcctagtaagtcttaatgaatcttaaatctacatgtctatatgtaggagacactaacattacaccatccttggaagaaagacgatgcccagaggttaggcagggatgggtctctgattgctgggggttcattagcacacagactgtttattgtcaaaagagggcaagcaaccagactttaaccagcacaatatgcctgcccctttcttgagacattccggagacatcctggaatgaaagcagagctctggaaacacattctcttcctttcaccctgcaggcttttaaagaatagggtataaagaacagcttaacaggtggctgcagtgtatgaatgcaggtatctgggtgtgtttgtgtgtgtaattgtgtatgtgtttatagtgatgtgttagtgtctttgtggttgtgcaccatacatatatgtgatggaggaagacaagagttctagtctttactctgtcttgcattttaaggcttgcaaaatgccaaggacggtagcactttttgggaaaactagtgcttacttaagggaaaaatcggactttttttagtgatatgggaaaatgaagattaaaaattaaatttgtgaggaaaggctgagctgaaatctgatgttccagtactttttgttgttgttgttactgttgttttattaccagggaccaataatctgaaatagaaatctttgattaaacattttgttatacattgctatcttctctgagccccttacaaattaaccttgcctttacctgtcattaagttgtggggtgctcctagttttgattaatgagttgtgtagaatttacacttgagaattgagaaagaaggcttagaaactcccctgggaacccagatcctcactgtaggactcaactcacaggagctgtcatgagatttcacattctatgaagcatggaagagagaccaagttctcctaagaacctcctttgtgtcagttgctttcacatgtgcagctttatttaatccacacaatgacctgccaaagaggtttcatatccccctttatatagatgagaaattggagcctccaaaagtaaagtaagcgtccctaatcagtaagtggcaaagctggggttttgaacctgagtatttctactctcgttcttttctttctgtctcacttagaggctgaaggggctgctggcagtgccactcagcatgcaaagggctgtatttatgccagaggcagcagggaagtgggtgatcacagaaataaaactgtgtcctgtcgtaacagagagccaccaaacatgtgcagggactttcatcaccttacactgtaaatctccatacttgtcaattactttctgctacaaggaaataggatgctatataagaatacttctgccaggaaattgtaagaacaagtagaaatataaatgaggaaaatgaggctgcaaggatttttacaaataactttctgaagaccacttagctggggaaaggcagagctttgctttaaacagggcttgcaacttcaaacccaacagctacatgtgctgttccttctcccatgccatcagcctatgccatactgaccagcaggaggtcagaaagcttgttctagtgctgggtcctgtatagcctatggcagatcactttacgcttctggtccttggtcttattaatcttaggatatgattttctcatttctcttttgttcctagagagaaaccatgagaaaaatttgaataataaaaaaaatctgactgtgaaatgcctcagtggttcacatattgggttatatttttagggggaacattttttcctctgtgagtgaagtgtacagtgcccaggtctttctgttaatagtctgttgaaagtaggccttatcttcatactccagaccatttataataatgaaacttttcactttatggggatttttagctttttggaaatctatgttatcctgtgtacctttttagaagaagttacatttcaagcaaaagaaaatctgtcagtttgctcctctcccctcccgaatttccatgaactgttactgaacatgaagaacaatcatggatgcgccctggcatctttattcccctggtagctgataccacacgtcccaacttagcctgatgcagagtcatttttataagttttgtaggcatcttcatttttaataaaggtagaggaagtagtaaggaggagaaac

SEQ ID NO: 116900 - DNA, 1026 bp, Homo sapiens
ctattatatgatattttatgtatgcatattgttgaatttgatccactcagtgacttgatgcaggatggagagacatggcatcagaggcattatttaattttcccagattatgctgctggggtggtcactcctggtggttcttggcttgagattctttactcattgctttatgtgtgacttgttcatccctgaaagtaatacacttaaggactggatttgtgggcatcttttttttactgggagttgattttcacatggtccgtgcttttcctgtattagtggccatttatgagggagattttgtagtatttcacttctaccgtccaaactatctattgtcatggggcaatgtaaaagtaggtaataaaggtgctttaagatttaagtgtaatttataaaattttaatcgatggaaggtgattttaatgcacctctccaaaaatagttaccaagagacagttattatttatatattatcaataatctctctgcttgaatttttgttacttaaagggggctgttatttgaagaatgctatcttccttccctggtcattattcatattctgtctctctttctctcttagtgtaacgaaacctcattcttttttgaagctcggagtaaaactgcttgcaagcacctctggaagtgcagtgtggaacatcatacattttttaggtaaattgatgtaaaaattttgtttgttgtcttaataaatgaaaatggcatttatttttataaaaagaattctgtctaaaacagaaatttggaattgtttcccttttattaattttctcaattcctaattctctggattatattaatacaaacatgcacacattcatgtatgtgtagatatatatacacataggcacttatacacatagatacagttatatctttgatactgcaagaaaggatcgaggtaatattttttaggtttatgtaaaacatgcagccattgctagcacctatgtagtattggtggaaatggagtgttctgtgcataattaatttgaaaagcct

SEQ ID NO: 116901 - DNA, 1030 bp, Homo sapiens
gatttttcagttaaaaaatacgtaaccatattacatacgtttcaaaattttttaaaaaaatgtgtgtgtatctatatgtagagggttgtttatgtatagtgcaatattttttaaactagagtatgtgcttaccatacacttccctgaaagaaagttctttgatcaaataaattagaacaacccacaaccttactagctcttggagattcacagtacatattagcgcattaaaggtctgagtgtttagcccagtgtttcccatacttatctgagcaaagaacccttctatgccaatatcgcaagaccttagtgttgtaagaaatgctctttggggagcattgtgtaaagactggaaagaataagatcatgttttattcagtgtcttaacatttccttctgacttccttttccaagtaatgacaaaattggtgaattttgttgcaggactcaccctaaattcattagccaggtggaaactcaggatgcctagaaaagagagcatgaaaaaatatgaggaaagccattaaaacagatattgtgcccaggatatcatgtgtactaacatagtttaatttttaaaactatagtcagtttcaccatttagaaagataaaatttttcaaaagacttacaattttgtaagctttctttggtatctatttccagttggagaataaagatttcagtttgactacttgccttcctttgcatgatcagtaattaagaagaaagttattttagtcatttgctaccagccgtctgactatttttgtttctctccctggaacctaaactgagttaatgattgcgagttaatgtaaatcttgtgtggattggatagaaagaaaaaagcaaaaatctcacagtactttagacttgtaattgtcacacttctttttagcctcttccccacctctatggagcatcagtaggaaacctctctgctgtagactttcaggtacttatataatgattgcattttacttttcttagaagtactcatctcttttgctcttcagtgatgacctaca

SEQ ID NO: 116902 - DNA, 1047 bp, Homo sapiens
agatgtggggtagaagacctaaagaaggtggggtggttccagcacactgcctggttcagcctgactcttcttaggggagggcctctcttaactgtgggcatgagctcagactcagcacttgagaatggattgaggacttgcggggaaattgggtgttacattaactctgggcttcaccctccatgatcggatgtgcatttaagaaagcacactctggctgcagggtggaacatgccacagacgtgagcacagaggcagacagagtaggagatgtgatcaaggggagacaagaggggactcactgcaaagacggaaagaagtcggcagatttgggaagcatttaggaggttaaattgtttctgattggtagcagattcaatgtttttgtggaaaataggaatttaggataatactggaatttcttggttttggcaacaagaggaggatgtaattcctaacacaggactaagcccagaaattggcatgtagtaagcacacttgtgaaataaatgaaagaatgaataaatgctgctgtgcttacttttatgtataatacctcaggaaactaacctcagctaaagttaccccgtgtgacaggatgtagaaccaaaaggttcctggcaactctggctgtgagtaatgagatccacttggcagaactctccggcttgctttaaggagagtacacgggaagcgatgatggccaggagtcatcactgtttgtcaacaagcgcaagaggtctcacttacgttaagccaagggttcctttcacattttacatggtaatatagatttttaaaaagtatttttatttgaaaacaactcaaaatttatttaaaaagttgtaaaaattaaaatattacgaagaacatattcatttactgttacctagagtcacttatggttaacattttacttcacttcctttgttatttgtgccttctttctctccatacacacacaggcctttctctttagaacagcttgagagtaagttacgtatgtcatagactataaatatgtaagtgtgtatttcctaagaatag

SEQ ID NO: 116903 - DNA, 2007 bp, Homo sapiens
cagtatataaaggagccagtattcaccagtctttttccactggatacttccctgattttctgaaaggttaatacttaaaaacagcagcaacaccatctgctttgttttttaggcctcggattacaaaggttcacttcaaggagactcaatttgaactcagagtactgggaaaagatgtaagtttccaagcccttagcttaaattagaagaggggtgtcttgtgtgttcatttgtagcttaaaagacattgtgaagaaatgttttcttcagctgcttccacatggaaccaggttaattaactcacatgcacaacttctcaaggaaggaaagggaagtgaatagaaatgagtgagagggtaatggagaaatgggcattttagatttagcaaaggaaagcaaaacctttctaaggcagaggagagaataggaggtgatcattgttgttagtgcaatttgctttccagtactctctgtgagggtagaaggtaggagttataatcagaagggtatagcctgcattcaggactgccaaaatgcattctaattttgctctaatgtaaattaaacaaccttttgggagtcttacttctgctcttttcctcattgagtgtgatagacaaaccagatggaaattctggatgctttcaagggagaatgtaaaaatgccggcctttgctttgcaacttggcaatgtcctctgggagtatttgggtaatgggcacagaacttgtcagtgcctggatgtgctttcatgccttgatgtgtgtctttgagaaaaatggtcgaaagaaggcaaggatgtgaaagcttccttttgatctacctgtgaaaataatgcttcattgaagtgctactagtgtaaaccacatattatgggatacatgagtgaaaataagatgtttaatccatatttatgggatacatgagtgaaaacacgatataggagaatctactcttctgtctttttgatactaactttgtgcagaacaaaaactaagtggagttgaattgattttcttgattaaagaaaagtaaattggtgcttatgcatgcacacactgagacacaggaataggagagctgcagctacatttggggtatggtatttggcagagtgcctcacatgtagtaggtacttcataagtatctgttgaatgatcaatgagctgatgcactgagacactgtgtgctgccacatcagaaaacctgatgctactctttgttctcctaataggaaaaaaacattatctcatcctgaactatatggcatgctgccatttactgatacaattaaaactggattttgaaatgagttttaacaacttgtaaggaaggggaattccagatttttaaagaaatgatagtacagaagccatatagttgttcttatggtttagtttggaggaaatccaatgtgttcttcagctcctgattagacatctcaattttaaaagatgtgcattataatataagactgaattaaaatcatgcaaaaagtagagtagctaattaggagggttttgtagtttctccctatgttgccattaggttcacatgaataataattcatctaaataataataatgcaaggagtaagatctgttagatatatttgaaagtaatgtttcaagtttttttagcagaatatgataatcaaaagacttatggaagcattactattattcagagtattctttccttataagttatttttgtgagtgaggtcctctggtgaatgactttcatgttattattacagtgccttaaaatatatgtctactactgtctcaggataaatatttggcaaagtcccagctaagctgaactttcatcttcttggacttcatgattaggcaaaaacaacagcaacaaaattgatatcatcatgttatttttcaaatgacagtctccatcgaatgaccctgtttcctgtgtactcggcttaggtgtctcccacccccacctcattccttcctcagctttgagatgaaatggatgtctggggag

SEQ ID NO: 116904 - DNA, 1046 bp, Homo sapiens
aatgaattgctggagagtatttatagactgattttttttaatcaattggattatggaactcagtttttaaagaaccctaataaaactttatctagtgcaaataacactcatgcattcattttgtatatgtcttttgctcattagcatttcctccaagaagaaacaatctcatattatttttacagttagaagcattcctgtttaatgtggcaataaaagctatagattgtggggaagaagtagttccctgatatattagattccaatttcattaggtcattaatgcttcatagcactgtcctttaagaatactgctaaaactgtagaatcattatcgttttaccttccctccctttagccacattaatcttgttaggttttcagtttttaaaagaaaactttccataggaaatttataaagagagtcttctgcaaaatgcttctacatttgtataatgtttatcctaattagaaatcaccttctgttgatggtagaaatttatggcaaatgagctagatttattagactcttcagtgcattcctttaagatttgaattttaagaactgaaagtgggcattggcaggtattcctccaaatgtattgctttatgttctttgtgaatataattttgcaggttaccatttatcttagagtagaaataacattctcacaaacagtgctgtgcatgtccttggtatctactctatgactttttcattttaagatcctgtttttaaaatttggatttattattgccttaaaataaaggttctctagtctttaccagaagagattatacttttacatttttgagcactcttaaagttataggtggaagtaggaagaaacatgatagagacttcaaaaaattcaagtgtgtgtctgctagtgactgcctaaactttctagagagagttggggtggggatgcagtgggtttcatgattgtccgcatcggagataaatcaagccattcaaaagcacccttgatagatgccagtggttctcagtctttaactgtacagaagtatcacctgggagtcct

SEQ ID NO: 116905 - DNA, 1044 bp, Homo sapiens
ataatgagccagaatggatttggtaaatgaaattaatataagtatcacttcagagtataaaattttgtcaccaagaagcaaaggccttcttgaaatacaaggacttaagtttgcattagtaaaaagtattatttgttttcccattgaatacaatgaagatagtttgcatccctgtaagtgcagtagctgctgtaaaataaggctctttgtttttgtgctgggtgtaggggtcagattccttctgaggctgagctgaattacttgaggactgccaaatccctggagatgtatggcgttgacctccatcccgtctatgtgagtaacatttaattaacacaaaatattttaagctgatgacatttttcttaaaaagtcactgagactcccaaaggaaagctgcagtcctgttgtttagcaagcagatgatacttttttatctgtttttctaacacaaagcagctctcgtgtggattaaaccctaatgagttttgcataaaaatctgtgattatatttccatgtgtagaaaacaattaagtgggcttgaaaacacaatctggataacagatacaaagggcttagctaaacatcaaaacaatataaaattgatgtataggccaggcgtggttgctcatgcctgtaagtaatcccagcacttggggaggcagaggtgggtggatcatctgaggtcaggagtttgagaccagcctggccaacatggcgaaaccctgactctactaaaaatacaaaaattagctggacgtggtggcgggcgcctgtaatcccagccactcgggaggctgagacaggagaatggcttgaaccacctgggaggcagaggttgcagtgagccgagatcgtgccactgcactccagcctggcaacagagcaagaccccatctcaaaaaaaaaaaaaaaaaaaaaattggtgtgtaattgactgtattagacagaaaacaggaggatttttcaaaaaatagattttatggcagcaaaacataaatacaatcacttgccaggtaaaggatgcgttaggcaataggcca

SEQ ID NO: 116906 - DNA, 1535 bp, Homo sapiens
aattatttagttgtcttatatgtgaattttagtaagacatttgaaaaaatgtttaagcatgttaggaatattttatttctatgttttaaggactattttcctaaaatggaaaaaactatgttatctttcttttttagcggagcttggagattatgacccatataaacatactgcaggatatgtatctgagtaccggtttgttcctgatcagaaggaagaacttgaagaagccatagaaaggattcataaaactctaatgtaagaatcattacaccatgtcttattgcatcatccatcagtcatcatcttctgatattcacaagaaaagtttctagaatgataaattcttcacctgtgcatttaatattctaatactcctctttgtatagtttaactgattttaactctaaaatgctcatcgaaaacttcagtaatttaaaaagtgtaaaggagaaagtaatttcaatatgtaaagttaccattttttggtcaatggcctttcagacatctctttgtatgtacaatttcccagagaaaatttgtcatacataggttcatgtatttatgatattacatagtggaatcattctgtaaatactagattttgcagtctttttttttttcagtcaccagtatcttgtgaaattaatctttcagctataaatatgtttaatcacaacaatttttaaccataaatgcattaatatattcttcaatgtttcctctgtctgaagtatcccagttcttcacggttataagccaagtcctattcaggccatagcaacgagtctggaaatagtgatgatgccagtgtgaaacctttgagggtatggtgataacactgcatgcatttctgagagtagacacgctcccctagtaggattttcaattcatggcctatagcactgaagttttaatttcattatagttattttggttaaattctttacaccggttaacattgctttattccctgttatgtaacacttcctcttgaatatacttggtttcagatctattatagttaaggaaaaaaaacatggctgggcgtggtggctcacgcctgcaatcccagcactttgggaggccgaggcaggtagatcacctgaggtcaggagtttgagaacagcctggccaaaatggtgaaatcccatctctactaaaaatacaaaaattagccgggcgtggtggcatgtgcctgtaatctcagttacttgggaggctgaggcaggagaatcgcttgaaccctggaggtggaggttgcagtgagccgagatcacgccgttgcactccagcctgggcaacaagagtgaaactccatctcaaaaaaaaaaaaagaaaaaaatgtagaattaatctggtcacaaaaaaatgtttgcctaaaggatccgtttcagtgagtgtagaagcagaagtcagctgctgaattgcagtcagagaaagaggccctctatgttgtattagcatgcactagaaggctctccaacctgattgtagagtccttcattttcagattctgctgaagtagatggtca

SEQ ID NO: 116907 - DNA, 1047 bp, Homo sapiens
agccccctcacacaagaatggggggtgactttattttaattgaaggtgattggttgttaaccttgattatcagggtccgaaacctcaggtttgagtagtgtaagagatcgttaatctctctttttgtttctcttttagatatcagtttttcttgcaggtgaagcaagatgtccttcagggccgtctgccctgtcccgtcaacactgctgctcagctgggagcgtatgccatccagtgtaggtgccacttaagcatatttgcctcagaaatgtctggagaaagtatttgcatttttaaaagggagtttacatactaaaactcttcttatccatgagattttgcaaaaaaaagaaattgaatttatttggaattcaagttttgttcagtgttccttcggaacaggtaaaagtggagcctagtacaaatcccttatggtaggtcgtatggaggtttagtcactggaatagcattgattcttgattaagtggagggtctaacaatctgttctatctacatctcatctgagtttattgattttcctccccacaccctctcccaagcttctatgtgtcagagatcccattgctcctgcattgctgttgtgaagagtctgcatggccaggtgctattgctaggttccgcatgtggcatgggtgttgagctcagtgctcttcagctcttcatgttaatacggtggctgtgtggggtggctccaggatgcattgtcattttggagactgaggctgagactacttccagtgacgattagacaccttctaagaatcaagctagatgtggggagaataagatagcatggtccttgcccttgtggcacttgcagactaaaaataatctagaagaaatatgctaggaaaaatgtcatagatgaagtgggttggggcttgcaaggtagattaacataggaagaagcatttgtataggagtaatatagtgggctttcttgtatcattttgcttctttgtgtaaattgtaatgggatatgtgcagcattgtattgcatttccatgatcattatttcaggcaaag

SEQ ID NO: 116908 - DNA, 1031 bp, Homo sapiens
taagaaataataattccctgatggtctatgcagaataaatctgatctctctattctttattagtactgtagataattcgtgtcctcaggagagctgttaaacttattttcagttctgattcaaaacatgacatccttccctgtattgtgtgtccttcatagctctgtatcttccagatttgataagtataatacatacatttgtttaaaagacaggcttgggaatcagaaaggctgagtgaggtctgcatccttgctttgtcattcactagttctgtaatcctgagaagattgcatagccttttgtaaagtctcagttttttcatccgtgcaatgggattacagtatttcttcaaaaagatgcttggaggaatatgtaagagtgtacttgcaaagtacttaccataatgcaaagatgtaagtgttcaataatgataaaggtagctgacatggaaataatggttattgttttatattttcaaattattgattaaaacatttggaaaagaccagcttggagccctgagataggtcttcttgcatgtttaagtcaatccagtaatcatatccttcttattgtaggtgctgatttaactatgaatcattttactatcccctctagcctgcatttcttgaatttgtatgtcaagacagaatgcccttacacttcattcagtaactatctggagtaccatgttacagtgtgctgagtaaaaggagtttcagtggtgaccagggcaagatctggtttcagtctgcccgaagagagaatctgtcagttgtcttgctgacagccctatctgaaatgccattggaatgtccctgaacttttaaggatcttaaaactctttctacaagtagaaaataatgttagttccagatgactcattcataatattttttagagtctcaaaacaggtgttcgatttttttcttagcttttaaaataatatttcacagcattttgctgaggattgatattatgttcatgtcttctttttgcaacccagaatcttcccttggtgaagatgg

SEQ ID NO: 116909 - DNA, 1068 bp, Homo sapiens
acaggctagagtgtagtggtgtaatcatagctcactgtgacctcaaactcctgggttcacagaatcctcccgcctcagcctcaggagtagctgggactacaggtgtgtgccactacacctagctaatactttttttttttttgtcttgttatgttggccaggctgatcttgaactgctggcttctagcaatcctcctgccttggcctcccagagtgctgggattaccagcgtgagtcactgtgccagcgtagacctcatttttagaaccaagcagatgtctgcattcacattgttcattatcacattgttaatgagcactttgaaaagtagacatgccagtttaagcttttgcagagcacatctttctgggtaaagggccattaggatggggaggatatgttgaggggagggatggtattttcattagagtttcagagggaaactgaattcaagtggtataaaaaaatacacttatatctgtaactcgttagggaattgcaaggggacagcattttttaaaaaataaaatgaaagtccttcatattcaggttgtgagtaatctctgcctgtgcctaagtgtcctcagttgtaaaactggagatgtacctgtttcaaggtttttgtaagcattaaatggaataatatatataaagctcttatgattgtccgtgtctcgtactatgtttgatgaatgctaatacttatttcattctatcctttttctagatgtatagtggaattatatcttcaataggggttagggtccaaaaatacttgagttaattttaagaagggataaaaaagatcattgttttataatgcattacttcacctctgttcaccacacacatgaacaggaatttcccaacagaatctactgatggctcattaacggaatacatggatttttgtataatttacaacccacaatattttcagtacaaccagttgtattgaaagttttagaccagcttgtgtagttaagaacacagtgacatagatggcttgcaattagtgtccatgatttgttgcctaaaacatatggttgaatttaggtaagttaaatg

SEQ ID NO: 116910 - DNA, 1046 bp, Homo sapiens
gcttggaaatatgcacttttggaaacagtacagattagattgataccctcagaaataaaaatatttctagtaaaagcataatataatgtgttcagcacccaaggggtttgtgtcttcttgcacaatatgagtgtttattttttatttgcccatgtacatacaattccaggctttgtttctgattttaaaaaaaagtttgtaggcatagttcttctttggtaaattaatgagatgagaaaggttttcttaaatacgtgagaacacatttttagattcagaaatgtttaagaatgaaacaaatattgtccctaattttattatgtagcctcactgatgacttttttcctgtaaaaaaaggtaagagttatcataagaaaattctaatgaattagtttaaggatagaatgtttctagcccttcttcccagagtttgccatttagtaattttttttgtactcttccaggaaaaaaaactcaaatatatattaactgatactttttcacaaaaggtatgatatttctgtgctcggaaatttagatagttggtcttttccacatgagcacatgcagatgcccttctgtctgtttaaacatttgcatggtatatgtcctgtggctggggctgacttaaatagtccacatgctgctgagcatttaagttgttttcagctttttgcagataggtttaaaaactatttttttttaatgaaatgataggtgggtggttttttaaaccatttattttttttctttcttcactatgaaaaattacatatatactatagaaaatgggaaaaacatatataataaaaattgtccataacctcaccaaccagacataagaaccagcaacattctggtgtatttggccctgtcttttatctgtgtgtgtgtatgtgtcgaggtcctatcgtcacagttctgaaccttgctgtttttatcttatgttttcttgtttctttagacaatcttggagtgtaattgtaaatagctgtataatattatactgtaactttgactaatttatgattttagtgaaatttaat

SEQ ID NO: 116911 - DNA, 1050 bp, Homo sapiens
caaaaaatatctggctagacatatccttgtccaaaatgttcatttctatagcctttgattgctttctgaaacagtgatgcatatgagagtattatctcactctaaaggtattattattttgtatttccctgagaagctgtatagaatggtgcaccccaaagtgctgagccctagatgatagcaaacttttttttcttccctgtgattttaggcaagttgtttaactccttggagtttaatgtgccttgcatatgttcccaagtttttgttgttgagaatcaaatgtttatgaaacattttcgtacattatgaagtgtaaccaaatggtaataatgccttatatttagaacacagccattttatatgtgaatgggaaatgaaggtctagtttgggccagaagaccttagagaaaattagccaaaacctaatgtttttaactgtgtacttttaacatttttgcttaactgttcatactgaacatttgaaatgcgtgggcttggtgaatagggtgtaatctgtcatgttccaaagaatagaagcagctctgaggcctggagaaggcctcttccctttgtgcaccatctcagcagcatctgtgctcctccccgccccctaggtaccaaccccagctgcctgcgggcacaggcagacccatctgctcaggaacatggagcttgattgacacagacggataagctgagggtggacttcctggctcttctaaatatttaatagtctgtgcctccctgacatctatgttcagggatagaggtgtatttgtcagaaatacaaacacagtggttaaacaaacataaaagttaaacataaggaatcaactccaataataagaaattctagcagtttcttttaaagtttagtttttaaaaaagctgtagcataaggagtgtctttacacaggaaggcacagatgaggggaggggcaggatcctcatcttgatggtctcccacatgccaggaacagggttccagggtgctgcacacataagtatgtgtatgtaatattaataaatagtaacatagttcatatg

SEQ ID NO: 116912 - DNA, 1017 bp, Homo sapiens
actggaaacctggactgcaaagccatccgaaagtcctgtttctatgaatgtcagcatcattgttgtttctcatcgcctttccacctctgtagtggaaaccactggagtttacaagttacagctctagcatatttgaaccgattaaaaaaataccagttggaaaaccagaaaaatttcaggaatgattttttttttttttttttttttgagacggtatcttgctctggcacccaggctggagtgcagtggcgagctcttggctcactgcaatctctgcctcctgcgttcaagcaattcttctgcctcagcctcacaagtagctgggattacaagcgcccaccaccatgcccagctgatttttttttttttttgtatttttagtagagatggggtttcaccttgttggccaggctggtctcgaattcctgacctcaggtgatccacccacctgagccttccaaaagtgctgggattacaggtgtgagccattgcacccagccaattattttaaaataaactcacaggtttcttttataggaaaagttgatatttctatcaaggtgatgaaaaaatgttaattattttaaggtgcattattaaagtgttcctaagcacatttaaagtgtctacttatttacatggtatgaaatattttatttaagtatcagtctataatgcagtcactttttcattctaaaaatgcaatattaaaaatttgcataagactcgtggtgtcttatgcctgtaatcccagcagtttgggtggctgaggcaggtggatcacctgaggtcaggagttgaagaccagcctggccaacatggtgaagcctcgtctctgctaaaaatacaaaaattagccagatgtggtggcgagtgcctgtaatcccagctattcgggaggctgaggcagagaggatggcttaaaacccaggaggcggaggttgcagtgacctgagatcccaccactgcactccagcctggatgacagagcgagactccatctcaaaaaaaaaaaaa

SEQ ID NO: 116913 - DNA, 1056 bp, Homo sapiens
attttatttttaatttaatgttatttttaaaagatggggtcatgccatattggccagggtggtcttaaacttctggcctcaagcagtccttcctcccctgcctcccaaagtgctgggatttcaggtgtgagccaccgtgcctggcctattttttcttttactgttcttgctgcagaaaactcttatgtatgtttgtgtgtgtatatgagagaagtgtttaactgaccaagttttaaaatgttgtttaaataacattttgcaaatattcttgaagtaaaagctaatgaaaagcaactaatttctttaattgtccttttcttcctcacacagtattggctggatcctgcaaaaacccttgctgaacacaaagaactgatcaacagtaggtatttagcttttactttgttaaagggtggcttgaaaacgatgacaaagtccatgattagttgggtgcagaagtgggctttagtactggagaaagaagtgaatactagtacttgagtaccagaatatgggaatgtgtgtattgtgtgcattgctaggccctctccaaagtcagattaaatttaatcagtttctgagtggatcttagtatggaatttttcctagaggcaggtctttccttgattttgtctgtggtttttctgtatgcttgtctttaaaatttgaccttaaaacaaaaaaggcaaatagacattaacgggggtggtaggtgggctgcagggatgggtcataatgtccaagcttttaaagagcttgagtttcttgggttatggcatggttttgccattcagaccactcagtttcctaagccagtaagtaagaggtgcctttgtgatctgaaaagtggtcttcagagagagaccatttttgggagctagctttttggttttatcaatacaaatattataaggagatgcaatataattaagtatatattccttaatcttaatttccagaacccaagtttttatttataagcacaaacagaggctccttaagtgcgcaaaaaatactctttttaaaaaaattgtctgtttcaattgaaataaaagg

SEQ ID NO: 116914 - DNA, 1327 bp, Homo sapiens
tggggcaggtggaaagactgaatggactacttccctttctggaagttctccatgaatattgattgcttagctgagtatttgttagctgttaggcaacactgacttcaatagggtgttcaattgtaaaggacttagagtattacattctgtgttattacatggaaatttactcacttgctttaagagcagttgagctgatagacatgtactttatacagatttaaggctctgttatctcccatttatgtattttgagaaagtttttttgaacatgctatttaacgatttttttagtaaagccattgtatactcaccctgcagttaattttccttgtacatgattttattatctcatatgtattcatcttatataagtaattattgtctcaccacattgtattgtaattacatggctgtgtgtctcctgctgggctgtgagtgcgaggttagtcacgggtctcattcaactttgtgttcccatactaaggacagtgtctgacatgtcatgtaaagaacatgtatagtggatatccataagtgatgaatgaatgaatgatatcccagttttagagtctacctctagaatattggcactccatgaccagtattctggatgtattccttaaaacagggatattgtgttcattggcaattttttgtgcccttttttctcttaaactatagagtaacaggctgctgtgtttcactctgatcttccatgtgctctgtttgattgcttgttgataatgaatggtgacaagtgccatcatagcatggctgctttggttccaaggtcacatctttcccttggttgaacgtaagtgggttttacatttcaagatcttggcttctgaaacctggtgacttgtgtttattatttatgttcttgggcatttatcattgtctgacctctgtaacccctggtttccattttgatcaaatgagatttgtgtgtggccggctctagggtgatgcttagcatagcaaatgtgcagtgagttgattgaatagcctttgactgagtcttgctgctgctgcttcgtgctgcagaattgtaatttctaacttttcttgaaactgttattttacttttttcacctctcaaatttaatcactctcaaggaaagagatttattttaaaatagaacagattatcattaatgtaaaatttttgatagattaaccagtttttcccattatatgtagttaaaattttttcttcctattttctttagctggctttagtgactgaaaagcattctggagacaaggaaacaaagacaaaacaaaacaaaatgaatcaaaaaatctgaaaaaaaattacaaa

SEQ ID NO: 116915 - DNA, 1590 bp, Homo sapiens
taccttttgataggaatagtgttgactaatttaaagacatgttttaatacatgagattcctctgaccaaaaattatttatattctttttacatataaaatgcacttatccctcccaaggcctcccaatattcttatttattgtgacatgggacttgagcttaagatataccatctccagcttgcagtgagccgagattgcgccactgcactccagcctgggtgacagagcgagactccatcataaaaaaaaaaaaaagatatatcatctcctctaatcagactcttcgaacattttccctgaagtttaacccttgagtacagttccttttgatctgaagatatgtgaattaaggtgataagatatgtttcctgcctacccgccccaaacatacagtggtggaacatgcataggataaccagtataaatgcttccagttagaaaggggcaaaacaggaggcacacaacaattactagtccataatactagttttgaaatctagccagacacatgtggtgatttctctgattaggacttggtcctattgcctaggagttgttcactatgacgattggccctgtcttctcggctcttggttctgttgtctgggcttgcttgcttttttaataaaaagtagtgtgtatttgcggtggagtagtgttctcggcctggattttgcctaaggaagattgggagttcaaaggcctcttttcagtttgtagtatctctgtccctttcagcccaagctggtataattcttctaaaagtttttgtggatttctaatgaatcaacctttaattaactttattagacaaaggcagcacccacagattgctctggaataagctcttctgtaccttagattccctgtaaggctgttgggacacggtgccgttaagattattagaggatcttgttttgaaagggtccatgaggcatggtgttaaatcttataaattgtattacatctaataaaggattttacagttatagcatgtttacctgacagcatgctggattcattctttgcccagaagccatttcttaattgcagcattgtttgccttctgataggactaggaatgcgaaagttttattttcaaactcagtaaaaagtcctggctcctttatattttaatagttcttctttctttttagcttatctctctcttcttacatttcatttatagccagcaaaatgaagccaatcagcaatttcaacagtttacctggaaacctccttatctgaatcatccagttcgtttggtacattttttattccacatttttttctgtttccaatagctttctctgctttaattgaggctcttagagacagcctccctgcaagccctcaggcttctaccaatactctccttaaggtccttcttgctacttcatcccaaaaacacacagtggaaagtagagggagtggggccagatcatggaaggccttataggttattagaaggattttgtgttttactttgagtgcgaaaggaaaccactggaggatattgaagaaaagagttaactgatttgatccgtgttgaaatgattttctctaactgcaagggcagactcaagga

SEQ ID NO: 116916 - DNA, 1115 bp, Homo sapiens
ttaatgattttagacattagaaaactagtttttttttaaatttagggtttcgacacaaagctctgataaattaaccttgatttaaccttattctgaatcttaagagaattttctccttgaatataataaacagtttaatcgtgatgtgtcagtagcctactaataaaatgtattttatggaatattttctattctacttatattttataaaattgcaaatttgctgcatgtactaaaagctaagtgactagtttgtctatcattttaggacctgttccaataagagagatgttcttggaattgttaaaaagctgtgcaggtgcttttttgtttcatgggaaagtgggagttacctactttcccttctggactatgagttttgagagctgctttatgaattaacagaagtgggcctttaaaagctgatgatctgtaggagcttagtttattctttcatgatacccatcagtattggaggccgcaggatattttatagaggatattcaggaagtttcttgtttaacattttttagagttatatccttactcatatcagcacagcctgaactgggactgtgaggaaagatgagcatttgctgttgctcatctccattcaatcacatagcagatacttaccaggcagccactgtgtctcaggaagtatggcacaatggtgagtaagagccaaggtctctggtctcaaggagtttatttccaggggtgagacagaccataaaaagatactcaaatatcaggtactgaatgctttgaaaataagatgatatgctagagttttgtgaaggcttcttccattgggtggtatgtagagaaaaagtctctacccatgtaattacaggtgtgagccactgctcctggccgaggcctgtggaacttctgaccaactggcttcaagttggagttcccatgaccttctctttgggtttgattaatttgctagagcagcttacaaaactcagaaacgcagaatatatagatgaagagatgtgtaaggtgaggtatgggggaacggggcatggaacttctatgccctcctgggcacgccaccctccaggaacctgcatgtgttcggctacctagaagctccctggaccaag

SEQ ID NO: 116917 - DNA, 1607 bp, Homo sapiens
tccccgaccccccagaaatattttgggccttcttgtatcacatattacaaatacaacattgtttgtgtctattgaataataccatttgatcggatactttttgaagggaagcattgaatcctattcaccactttcttaccacctctgtcactgcaaaacaagtgatctgtaatgttactgagtgaaagaactctcgcctggactgtgtgggccgctcactgggaggcgagggccttgacaagagcattcccacacctccccttcccacgcctgcatgctccctccttctcttatgaaaggcctctcctgctgttcattttaaccagatttaacttacatttaaaaaaaaagaaaaagctttactgagatattaggaagttagattgaaaattcttattgggattataagaaacaacaggtacaggatatttttaatgtgctggcagctactaggtgctgtttagaatattcttgtctggttagaggtatagtggtgtagtatgtaataaaaggaggcatattatatgaggatttgagttcaaacaatgtcatgtgtaactgtatgatggtggatcccatgattttaaaaaattgtttataataaatagcacttctaaaagtagatttttctatttcttcttggttaaacagtgtttaataggaaaggaagagatgatgttcttctggaacattttctgtttagagtgggtgtgccctcttctgagcacagtcatgtgaaacaccatgagaattcagcagctgacatgcctgaaataaccccgggaagtgctgagaggggagcctcccaaacggctcccccaaagtcgcttcttgcactgcatgctttcctcactgcggcatcgggaaaagcagagcatgctttgactgattggtcttcagtttgttgattttgacacggactcaaaaacggctcttgaaggacccaggtttgtgtaggatcacctccatggcacattttgaactttagttcttttttccttctttccctcaaatggttgattgcagtaggcatgaatgtttcttccatgggtcatgtataatattttatcctgcggtttctaggtttagggaggtgaagggctgaattctatcttggagagaaagttttctttgttaatggcacccaatgccttcttcaccaaaactaaattaaactaaattaaaaggagggagaggatgaggaaaaataactaatgggtaccaggcttaatgcctgggtcacaaaattaatcagtgcagcagaccctcatgacacgagattacctgtataacaaacctgtacctgtatccctgaatttaaaagttaaaaaaaaaaatgcttccatcgaacaacaattgaaaacaataaaggtacaaagtacttaataacaaaactatcaggaatggtagaaatgtcaacatatacatacatgtatatatatatccatatatccatatacatttatatttttgtatatacaaccaggtacgtaggtatgctaggtgttcttatcaataaatgcagtacctgagaaatttctgtgacccataccttcttagttatatacataagtgaaaggaatattgatttctttactatgaacatt

SEQ ID NO: 116918 - DNA, 1468 bp, Homo sapiens
actaaatcagaacacatgatagctctttgtagatgataaggcattgaacatgtaaaaggcctttcctgttgaaactaggatgggagaaaatattgctggtgatatcagcggaatgaaggaagaaggaaaaagtctggaagaaagaaaagaaaaaattaaataaactgtagattcttaaatacctttgagatttttgaagatgagttttgttgatactgaaagcagtaataaatataaatgtgatatctcaatactacttctggttttaagattagttttgaaagggaaagcgcttagcctgggctagagcctattttctgttccactctggcttgtgccagtcaggttcgttcttgatccagactggtgtgtttggggatgtaggtctctcatattagggccttggtttgacttacagaaaattcccagaaattatagttatgtcttactttaatgttagcacctgaggctcctttacagattactccttgaaaggcagaagttgtatataattagggcttttctcagaatatggaaatcaacgtggcattgagaattaggtcctgggtctgctgcccttttacttcagaagtcaaaggagggggaatgtgtgaagcacacagatgaagacagcatgcaaacactgtcttctgccagtgaactctgtttttcccttgctaagacaataaaagcaatcagaaacttcccactttcttgaccaccccacccccaaacacacttagttgcttcatacccttcctttcctgtcaccagtgtctgtgagctggatcttaccaccttgctttttctgttttgtgtctctgtaccctacctgctccctctttccagtcagtgtttgggtgtgttcaagtctttcccatttagaacctcccgttcccctcctcctttgccctcccttatctgctgctgtctttggctccttctgcatcacgcgtaaacttcagaaaaccttgtctaagtttcttacattcacttctgaaatcccattgtttcctaaacatatcaccatgcagcttttttcccgatcacatcactgaaactggccctgccttgccagttgctaaatccaagagactctgtcagtccttgtcttacttgacctttcttttgctttgacactaacaacttgcccattcttgaaatcttctcattttgttcttctggcactatattctttttgtttctctctcttcatgttttctctagttattcctgttcagtcttctctacgattgtgattccactgcctgttccataaaatgttggtgttcaccaggattttgtccttagttctcttaggctctaactctgttcaggcccacacatttagtgctacctttgctagtactgtttacctctgagataatttccttaaccatctaaactaagctgtgtatgtgttaatatttgtattctcttccctgcccccgagtactctgagtattga

SEQ ID NO: 116919 - DNA, 2013 bp, Homo sapiens
cactgcgatttaaaaagtattttccaaagcaatttctataatacattttgctttaaatcacgtttttttcttcataattgaggcacaacttacagagaagaaccatggtctgatacaattgctgctattgtgagtgaaactaataaaagatgagaaccatgactgtgtactacttaggaacaaaagggcagttaaaaaatataaaactgaattatttttgcagaagtcaacgaaaggttccgttgtccttgaccacgtattccatcacgtaaaccttgtggagatagattattttgggctacgttactgtgacagaagccatcagacggtgagtaaggtgactttgtgttaaatttttctggttataaatttcactctatctctggcttttcctgatatggttttaggtggttaggttctttgtcactgaaaaagactttgaaaatctcaaacatgttttcccctgataatttctttgcattttttcctcttctgccaaaagtctgtagagttgctggattcacagcttctgtacatgtgtagtcgtctttgcagatggcatatgtggtttccagatttgcaaccttatcatagtgaatgcaaagcatgagtgaacatggaggactgaatatgtcgtttaatatgtgttagaaggcaagtggctagtctcttgaggtgagagatattaattgccttttaagaaagggaatggttagagaagaaataacagtgtaaaaaaaaaagtgactacctaagttttataagtgagatgagctgttacaaaataaaataagtagaggtttttttgttcatgaacctgatgaaataagagtaataaaggcaacttagcttttagttcttatgtcagttgttcacaaaggttaattcagagggtcttccagtccggagtagagagttactaagaaattcaccacaatggaaaaactttggagatgaagattttgaaggacgaaaggatatttattaatgtgacttttggtttagtctaagaaagtaaagatcttagcttcagataggcacagcctcattatgcagaatgctcacatgcttatctcagaaataccctatttgacttgccttttatttttcatcctactcaactgctgttgaaatagagatgtcctcctcttccttcatttgttctcccatcctccactgggtcatttgtggtacattcagtgaagaacatgattttctgagtggtgtttccactattgatggtgatcacttgtgacttttcttgagctggttccttaatcttttctgtttcacaggaggatttcataaggttggaatgaaaaattgggtatgttggatagctttgcatagaaaggaataactttctaaaggctagtggtcattatggcatgttgcaaaaaaggggaacagacatgtttagaagtccactgaattctatcttgtacagaccatgaataaatatagcagtactgtaaatctatacagaaagattaaattgaaggctaaagaaggtgtcatgtgctacattcatatttttgaaataacatttttttcctagcagagaaaactacagttttctgatcttatctactatgtcagactttgcctggaaagattgactgtcttgctaaagttatatagaccttgtcggtctctatcttcccccttaccttttttaaactttgcaaaggaaaaatgtgaaaagctagagaatttcaaaacaatggcccctactgtagcagttagtgttgctagtttattgaaagttttgtagggtttaaattaagaacatttttttcctcttacttttactcctaaaggtttggcatttatcatagtgtttataatacaggttttaggagaaatgacacatttaggagaaagctcttaagtcatattgttttgatgtgataagaatatcaggtgtgcaaatgacatgaaaaaagtattctttccctgtttttgttatattctaatggtaaactcagctaaaatagagatgatttgtaaaca

SEQ ID NO: 116920 - DNA, 1032 bp, Homo sapiens
ttgggcagatattattaatttgttttgcaaataaggacatccggtttgaaagtgattcagcagacttgccgacagtcacatagccttgtggagacctgtaaggatgcttggtagagtaccataaagcctctctttttgatgtggcagataaccctgcgggccacccactgtgggaatggcttgctaccttcaactgaagagggggtggggtgctgaaagtatttcccccacaatggcttaggtgtactcagatccattcacaccccctttttcctgtagagagtgacatggatttcatttgcagggcagtccctgggattagagttgtattgtggagccactgaacagataaaatcagaaagggtgtatggtgcagtagtgcagtgaaacgagccatgaaccggaaggcaggaaatgtggagtctcagcatcttcattgtttaaaatgatgacttggtattagatgttgtctaggattatagatgaggatttagggccagagagattaagtggcagttccaggtcacccagctagttaatagcagagccaggactaaatagggagggtttgtattaagagaattagtaatgagagctagtagtgtcctttctccaactcaggcagccagctatcagcagttgtgttcctttggtaagaaaaacttcactatggtgctcttcagtaaaatatgataagaaccaaatctgtaattttaaaattttcagctagttgcatttaaaaagtaaaaaggatgattttaataacgttttatttaattcaatatatctaaaatattatttcaacatgtaatcaataaaaaattagcaattttgtttttatatggtcttcaaaatccagtgtgtattttatatttatagtacatctcaatttggaccagctgcatttcaaggacttagcagccacacatggctagtggctaccgtatcggactgcacagctctcaggttaagggctggttaaacacacactgttcaagttgctttgaaacatttcactgtgcatttgccact

SEQ ID NO: 116921 - DNA, 1028 bp, Homo sapiens
ttttctcatattctgtatctcttaaactatatagatctggtaagatttcaaagaaagtggtaaacattttctgcttatacatctacattaggttcactttttttctgttaaatcgattaatcttcctcttataaggcttaaaaggtgtctgactgttcaagaaggagggtccttaacactgatcccctctgtgagttggtgcttgggtgttaatagatacagactctagcacagttgcttttgtttttgtgcctcttggcaatggaaatctctcccctgccctcctgtactctgtgccaagccctggccaggacctgacgagacatcctgtgtccagggctcctttgtgcccaatcagtgcaaagccaggaggctttgttcctctacttgacagagtggttattcctgggccatattgacttcacgaaaatgaacatgactttcggggtgaggctgtaccctagtataggccagtgttttgtgaaacatttcctaaagttgtgttctctcctaaagtttgatctttgcttggtaggacatctgtgaaatacccagaccccttatatcagtttttattttcttatactcactgttgtaatccaaaacatgtctcagataggtctcaatcagtttaggggtttattttgcaaaaattaaggatcatgactcatgacacagcctcaggaggtcctgagaacatgcgcccaaggtggttgggttacagcttggttttatacattttagggagacagaagtcaggcaaagacataaattaatacatgtaaggtatacattggtttggcccagaaaggtgggacagcacaaagggaatgatggggttacatgtcataggggaatttaaagatttttctgactggcagttggtagacagagataaattattatataaagacctggaatcaatagaaaggagtgtctgggttaagataaggggttgtggagactaaggtttgtattatgtagatgaagtctcatatgtggccatctttagaggcaatagatggcaa

SEQ ID NO: 116922 - DNA, 1385 bp, Homo sapiens
ctctccactgtatacttcagtcctataataatggagccagtttatttatgggggcagtgctgtcaggccttgactgaccttgtcaaggagcctgacactgttattttaaacccatcagtggtgtgatagccagccctgattcacagcttgtgtttatggtttgatgattagaatctcatcctttggccaaggaacacagccacatttgaaaagctcctattgtgcaattcctgctctcttcgctggcacctaaacccagtcgccaggcctgttgatttttccctccagtatctcttgcattcatatgctcttctcccttcattctcccccaccctgtcactttcttttatttacaaatgttctctgagtgcctactgcatgctaggtaaggcgccaaaatggtctggagataaagtgtgagcacagcaggagacagagggagatagccattcttgagcagtagttggcaaacctttgctgtaaatgattaggcaataaatattttgagctttgtgggccattaggtctctgttgcacctcttggactctgccacagacaatgtgtaaaacaatagtggacgtgtgttctaataaatgcttaggcagtgactcagatttggcccatgtgttgtagttttccaaccctgttctagagggtgagggaggccgttaacaaatacacaatgtgtgtatgtgtttgtcaagttataactgctacgaagagaatggaaagctaggtatctttttgtgtgtggtggcggggggtgttcttttttatatacgctggtagaggaagcctcccccatctccagacagtgggggaaacaaatcataggatacctgatggtttgaagggccttcctggtgagggagcacaggtgcagcgacctggtatgaccatgtattgggcttgttcaggttaacagcagggagccagccatgctggagagagccggagcaggtgggcaggcagtctgagacagtgccgagagaagagttggtaggggggtcaccagcagacagggagaaagggctccccacaaagaaagtagcttctttgaaggtttgaaggggtctgagaagctgatctgctatgggaaggtagcagtttagtttggctagagagcagatgagatgggatactcaggggtgtgagaagactgagattagtaaagtcagcttcaaatgtcatgccagaggaatttcactgtattcatgggcatattttttaaggcaaggaacactgcttgtgttttagaaaaggtgacacatggcattttggagggtaagaggcagggatgtggatgggaagaaggttgaaggcctgacctgaacctaaggggatggaggcaaggcgagcgatttaggagatatctcaccctcag

SEQ ID NO: 116923 - DNA, 1036 bp, Homo sapiens
atgggacaaatgacttccccaatataacacagctggtaagtaccaaagttgaaattcaaacccaggcagtctggatccagaatctgaattcttaatcactgtagtaccttgtctccatactatatatttcttcttaagcagaaggactgagaaactcatttttagctgcctcttaggatgtgtttgaaattatgaacctaaatttgaccaagtgtttttcgggggctgttgggagaatggaatcaattaatgcttcaaagcacttgagaacccttaatgtaaaaaactgttatggaaagtgtatacctctctgtaaagccaactgtctgttattcccaaattcttatttgtgctttgtatgctagttgcttccaaatgggatctatttctatcggccacattctgaatatgacacttttcatttaaagtcagttgtacattatagaaatcctctaagaaacctgtttagaaaccgttctatccaaagtactttgcatagtttctaggttataagggatttgtttatggtgacaagattgactgctgaaatgtgtgcttgggagtgaatgcctcagaagtgtagcaatttactacaaaacgtgtgtatctgtgcacgatggaattttcttactttgtatgccagtctgccaactggcagcataaaagtgacctacgagagtctcagtggtgctctcttatgaagtccacccctttgggtctgatctgcttacttcttcaacccaggtggccatggaggcagttgctcctgctgctggctgctgactgctgactgctcttgctcgactaggaacaatagaccctcagctctaatgcatttcacatgtattggattaaactggtaactaatgcatcacgtggggaaattggcctggctgataaaagggccttgaaaatgtgcctggtgcttttgcaactctgtaaaatctgccaccagcacacctacttgtcaggactgcctgttacctccagcccaccacactggattgtgctgagcacaatttctatgaataaagca

SEQ ID NO: 116924 - DNA, 1088 bp, Homo sapiens
gtttactgttgaggttcgttttctctctccataaaacacctgaatacttcattagtgtctgatcacattcctcaccctgaagtgccttactttgcagatttgccgtgagctcacccctcccccacctgcttccctatgtgagtttccccttcccctgcagtgtgattcaggggacttcccagatgctttaggttttgtctgcaactagaaacattcagaattactgtgttttaaaatcgaactttctaacaaaatggcttcccataaagtaggttttggctacgttattatttatcatatctgaaaatgattatttagaaatttgaggactgtgttcttggagatacaaagaaataaaaagccatggcttttgagaggtttataggctactaggaaaaatcatatatactgcataactttaatacaggcatgatgtggtaaatggacaaaggtggaggtgtcgcagatggtttcatgaaggagaagacttgaggaggactttgaaagctgggtacggacttcaactggcagagactatagagtgaggataggcaattcaggtggagggagtgacatagagaaaagtgtaataggtagggcacatgttggcttatcttgagcatttgagtttgactggagtggaggcaggttggagataaacatagactgaggaattgagccacatagtagagaagctcaaatgctaacctaaacagtgcagatatggtaagcagtagggagcctttgaaggtttcccgtagaggaaggatgtgaggattgggtcctgggaggatggatctggcagtgagcaataggttgggtgtattggaggggtcgagacagggcccctgtggctgggtagctggaccggagagtggtaatgctgaagctttgtctttagagtgctggaagacacaggggatgcccctttactgtggctgctcaggtgcttgacttaaacttttctctaattttccactagttcacattctttctcactgctgtattccacaaatattcaattatgttctaaagggaagcccaaagctcagacagtgaaagggaggaagaagagaattctgttaccg

SEQ ID NO: 116925 - DNA, 1026 bp, Homo sapiens
gttaaagttgagaaccattgttctacatctgtactatttagcatggtagcttctagccacatatgcgtatttaaacaaatgaattaaaattaaacaaaatatataaagattgagtccctcagtcatacctgacacttttcaagtactctgtagacatgtgtggctagcggctgctctattggactgcatattacagaatatttctgtcatggcaacagttcggttgggcaatgctgttctacaccatgctgtctcccatccttcacactgtcgtcgtcttcgcccctatgatctttgccactactttttatagcagtttgttcacatggcctaactttgggccatgtcatcacctggaacttgttttgctttgcaagattttttaactcatcattcctctttgaccagaactttctgtcctgtccgtaaatgtcaccctctctgcctgttttcccactatcagcttcctctaggtttcatttatcttttccatgccattttggaccccatgttgttctggacatctccttcagtgtctttctttttctcaccacacccatggtgggcgtctcttgtgctgaatgtgaatccatttacattctctgcttctttgatctcattactgctaaagaaaatcatctaacagtgtcagcataatttttcagtctcattccgaaactcaaatctgcatggcagtactctcactcattcttaggcagctctctgtttgtccctatagcagctgttataggcttttaagctccctggtatcctggtcttcccactcctcctcggtctcagcaaatgatctacaggcaatgctgcacaaactctttgcacctccttcccttcacctctattcttgcccttgtctcagtgcagaggccctgcctctttccaaggttcacttctccagttggttatctgagccctgtcttcctgtaccaggggactttgctcaagtctcctatcctaaaaaaaaaagtatactttcttgacctctgcatacctgtaaaatgatgtcct

SEQ ID NO: 116926 - DNA, 2064 bp, Homo sapiens
aaagtggtaagttagacagtgatgtaataggagttaccacccttaagtatcaagtttttgatgatagtattaacctctacagttctcccatggatgcagtatttattttggttttctgttgtggtagggaggggaagttcagtcttccagttggtcattcctatctgttgtaatagcccatattccatcgtcagggagccattgtgggacttctacccacaatgtggagtacgtttactgtcaagtggagtattaagttttatacaatccccaccttaccccccttccaaaatttaacataagttatctctcaagtaatcagtcaagtaacataatccagctacccaagtggagtgtatttactgcaataatacattcaaaaactgcaaaataaccataagaggggttcgtggacttactggatccatgagatgcgagaggccaaagcttcatgaatcacttgaacacagtaaactttactttgactgatagaggcattttagatccctaggatctagtgaaactcaacctttttaaaagtagaaaagtaaggattctctgaggcagtaaaagcaaatagaatgtgtatttgttatggctttgtttccagttctaagatctctcagtatatctctaagaagagcatccctgggggatcactgagggagaagaggtgaaggagtggaattctccatgggtggtgttcttcggcaaaacatagttcctgcagagtttgtggttgtatcgggagagggttcggaagagtattgttttccacattcttagtggtctcaaacctcacttctaatgaggaaccagaaatgaactcatcatattggaaattgtgttccaactgtgaaactcaacttgtgctgatagataaacacatttagcgctccagaagcctgtgaaacctcattttgaagtgtgaaacatgtttgtggaaaggaggttataggtgtttctttttctcatgagaaggatctttagtctgtgaagaaatttcatacttaatttaaaaaattattttggtaaaaatctgaagatagtggattcatctgaaacccttgatctgcatgcactgcattgcttaatttcaaccattttagttgcatagaaactatctttgaaatagctttcggtttctagtggtttacaagttccaagtaagtgagaatactttatcatgtattttattttgcaagttaatgaaatagattatatttggtagtgacaaatgaaatttgagtataaatctgtgttcatgtctttatgtgaaattttagagaaacaacaaaactgcaacctaaggcatttgttggtcagattttcattcctcctgcctttttctggtcctatttcaatttttttcccccttcctccttttgtttattttggcaactttaaaaaaaatcagataaaatacttctttccagagttacacataaatgtagcatactgtcattattaatgctattaatgctctctgagactaataaaagatgtagttaaaatgcaaattaaataggttttctagtagagtcttggcatatggtttgcaaagactacaacatcaattaagccaggtttgaactagatcaattgtgaatcataaagtatatactgttaatctgtggagaaatgactattactgtggaatccagattcaaaaatgctattttcattcatgaaaaatcttttctggatggtgtttgtaaatggggagctagatggcatggggaaacacagaaaaacattactcgactgataacttatgttaaattttggaagcgaggtaaggtgggggttgtataaaactgaagtaatgattcctccacacccttccttatctaactaaattttgactttctccttaccacagagcttccctcatttttctatgcctatctgcagtgttgccggagagctgagtctatattttcttgtcttatcactatctgttccaggttgtttattttccctttattacttattgcattattttactttgtccatacactcaactttgttaatttttgacttctagctcccacctcaacatag

SEQ ID NO: 116927 - DNA, 1015 bp, Homo sapiens
ctttctattcccgttgtgcctttccatctattcagtcttccagtgtcatgtatatagtatctttctttactctaatatccagtcaaaatgactgaatctgtaacctaaattttgagctgtgtcctgtatttattatcctaaatatgggattaaaaagaaagttgatacaatcgattcatttaaaactttcttctatagtctgtcctgaagttagtgctcattccaatatcttacatcttttgcagatcagagcctgacggttacatccaataatattttgaattaaaacaaactgaaatattctgttacccagaaaacctcattccccgagcatcctttttaataagtattgggccatgtagaggaaattagaattatttttttctttcttaaaataattactataaatatgaaaccttttaaaatatatggaaatcaacattattaatttttaagccaatgaaaatttattaatgaaggtttgatgtcccattggaaatgatttagcattagacaggagtaatttgctgtaagggtattttatgtaaggtttgagccattttgtaggctgggtttacaaggttagcacttcagaggctgattatttcttcactgtacatttccaggattcagcatatgatgcccctcagtgggtgataatgccttcgttatgtctcagtacaaacagctgtgcttattaaagatgtgactaacaggctgaaaggatgcagtgcatcacttcattccattatgcctttaaaaagatagaatgctagggcttaatttttaaagtagttagaaataagagtagttgaatggactaattaaaccatattaaaaatttaattatttggctaacaatgagctcacaactatttctgaaacagtaaaccttagaggaagaaaggagtaatgtcctagtttcaagtaattcagtgcatgttgcccacattatttccagaaacatcctaccgatttgaacacccactaggagcttgtgagactgaaaccttat

SEQ ID NO: 116928 - DNA, 1027 bp, Homo sapiens
cttcggccatgatcataagtttcctgaggtctccccagccatgtgcaactgtgagttaattaaacctctttctttcataagttacccagtctcaagtgcttctttatagcagtgcgaaaatggactaatacacccagtctcaggtatttctttatagcaatgcaagaacggcctaacacataaatgtaatctagggctggtagtgtgatattgaaccagtgggagacatgatgggcccatggagaagtgtcttgaatttgactttgaaggattagtcaaagggggtgaagggatgcccactggagctcctaggtcagtgggctgctggctgagcccagaggcaaagaggagtatcagcttgcatacagttggtgttactaggtaggtgaagggcctgaagccattaaggggatttaagacgtgatgtgtgataggtcaaagcagagaagaaccctggtggtatttaaggaaattaagctggcagttaccacctgcaggctggattagagctttagggagggaatctggagtctgagaaagtgttatgtgtggtgatgagagctagaattcagcatggaagtggagtagagaaaaaaagatagtgaggatgttttggatagtcattctttaaacagatatatttcgagaaccttccaggtgccaggcagtgggctgggccctggatgcagccatgaagccggctgacacactgcctcccagtatggagcttacaacttagtggggaacctggatggtgattacacaggtctgggaggatatggttgtggtgacatgagagtatacaacaggggaatctgattgaatgggaggggagccttcctgagaatgggatgtttgggctgaatgggggtgacaggaggcagaagttcaaggcagagggagcaacctgagcaaaggtcctgaggcagaaacagaaagaacccagtgtggctggggtataaggaggagaaaggaaagagctggtgatatgtgatgatcatagcaggggagggtgtattgagaggaa

SEQ ID NO: 116929 - DNA, 1115 bp, Homo sapiens
tttgggtggagaataaagcatatgcaatccatatacatatttacatatttgctgtcacatgattctggtatttttggtgtatcagttcacatgggtaacatttttaaaaattctttaaaattaatgagagaacattgagaattagtttcctcttatgtaggaacttttagttcttcactgagtgaaggatgaagaaagaattcctcagatcctgggtagtgaatacgttaaatgcatgtttgatgcaagtgtttgatgattaggataaatggccaagcttttttctagctctgaaggtctgctggatgtggctagttttcaagcctggaggtagtgtctgtggcttacctagtctggagtcacaatcaactttttattactcaggttctgcaggttactgtgactttttcatttcctctcatagataggggacagataggggccaggaaaatcagtgaaatttcctattttcaacaatgtggatgcttgtttggtagggaaagaagagtgaagctgtttgttctttcttggactcatgagtattttgattttttaatgactcattttttggaacttcttattttcatcattagggctacttcatagagtaagaccatatatagttaaaagttatccagaaggaatagggagccagtcagttccatggaagttttaacagtacttgcactcaagatattttgtgtctccatgtgatgtctaacacccagtggtgttcagtaaatgttaatacctttgccttcttgacactagtcaggctgttgtgggggatacaaaatgaacatacattaaattagaacaacaaaattgatagagtttggatgtttgtccttacacaaatctcatgttgaattgtactccccaacactggaggtggggtctggtgggaggtgtttgggtcatggggttggatccctcatggcttggtcctgtctttgcattagtgaatgagttcttgcaagacctggtcatttaaaagtgtgtggcacctccctctgacactttctttcttgctcctgttcccactgtgtgacctgcctgctccccctttgccttccaccatcagtaaaagctctctgaggcctccccagaagcca

SEQ ID NO: 116930 - DNA, 1035 bp, Homo sapiens
gtttttggattttagatttggagaagagatttggcctcctgaaagttgaaagtgaggccttgtgaggatggactgtgtctctgaaggccatgcagcatggagaggtagcatgaacatagagaagggagttttgtggaggaagacgggggatctggggaatgcttgaactagcagtccctcctgtgcaccaggccctgcacttgatgcagggcgtgaagaggtgaattagattgcttctaaccatccggaacttaaatctagagttatgctttgagaaataatcagcttgatgaaaatacttttcattgagtgtctacaataagaaagaaaaagtctatgtagtggaagaaggagagaatatagactccgaatatctggattctgcttccagctccttcatttcctagcttggagaagtcacttaatgttttgcagtcatagtttatccatttataaaattaaactgatgctaatattatcccattaatatgacaagtattgggaggcttaagggagataatggttgaaaaaacttacaaaatgttaaggtgccatagatttttaaaaatcattatcttgtggctccatcatttactcactgttggcaagttaactctgtgcctgagttttgtcatcagtgaaatgagaataacactatctgcatcacagattgttgggagagttgaattaaatagtacatgtaagggcttagaatagtgcctagcacatgataacatggtaaatgccaaatgtgtgttagctgccattattatatagtcatataatgccatgcctcatgagagatgatatagttagatagtgctgtgccttatgggaggtgaaatcatgacagaatgtccttagacataggttctaagcaatgaagcaaggggcagtttttcttagaaggcttcttaatgtttacatttgcatttgccgattagaaaactgatttattgcatggaacagagcttactttgaaaacaacaaccagctttctctctttttttcttcttcctccttttttgatgtcaa

SEQ ID NO: 116931 - DNA, 1814 bp, Homo sapiens
cctggccgtattggtcatttgtatatcttttttggagaagtgtctgtttacattgtttgccagtttttaaaactgatttgtctttttgagtataagaatttaaaaattctgaatgcaagttccttatcagatgtttaatttgcaaatattttctcccatttgggtcatctttatactttctgaagggttccttatatacccacaaatttttgattttgacgaagtccagtttatctatattttttcctatgttgcttgtgcttttggtgtcatatctgagaaaccattgcctaacctaaggcctgaagatttactcttatgtttgcttttaagatttttaatagccttaggtcttacatttaggtctatgacccattcttcatttgcacatgtcgcaacaccatttgttaaaaagactgtttttttccattgaattgtcttggcacccttataaaaaaaatcaattaaaaataaatgtgaggagttaactctgggctctgaattctatcccattgatctacatgactatctttatgcatcttgtttatttttactagttccttggtaaggtagatgtgggtaattcaacagagaaaacattcctagttaaaaacatttaatattttgagaaaaatttcctgtaaacttcctggagcagcgacactgtatattttgctcactgttaaatcttcaagaacctaaaagaatgccaggcacgtggtggtgctcagtaaatatttgtcaaaagactgattgaaggattgttttagtcctgctgctgctaatgcttttgtaacttaaaactgtgcttgaatatttagacttccaaaacttttctctataagctctgagtgttgttatttatgttctgttaaggatttggctttggttcttgtaggatttttctgtaaatcacttggtggaagactggaaaaaagggtatttgcataggttttatgaataattttttggtaggtttgacaggtgaagatgttaatgtcatttaaatatacatggattttcatctattatcttgaaacatatttagcaggttttagagtgcaatgtgtgctgctttcctcacaggaaataatgtagacagctggaagactgcttctaaacacacacacccttcccacctccatgacttcctttcaaccttgaactttggggatttctagcaggattgtaggttaaggcatttggagcagctgtggctttgtggaattgaactacaatcctctatgactgagggaaattgtaggaaatcttagtggtatcaaaactggcataatataagctttacagtcttttctggatggcacattttaaaagtcaatagtattcaaacgcttgaaaaatcccaataaatgtgtgggctactgctccctttgtcaagagaatctcaagcattcagaatctagataatgtggtagcttcacaaaatctttcacacgaactcgtttctgcttgtcattgctttttcctgtcagccactcatgcttttgcccagtagttctactgtctgatcctctgcaccaaagctgcatgcagtcccatatcctcagttaattcagccccacgatgctacccaaagtgcagcagacagccagggcaagagtgtggaagagctgacataattacaacagagtgggtttcagttatgatggaaagttaggcctgacatggacatttggagtcatctaatccagcccacactttctacaggggagggaacagagacttagcacatgggcctagactcttctctctggtttttctcttggttctttttttggtgctcactcactgtg

SEQ ID NO: 116932 - DNA, 1016 bp, Homo sapiens
aaactactgcaatgaaatgcagtctggattagggtcagaagagggcctctccagctccgcatcaaggagaagtcttcacaaaaaagtgaaacctaggcagaactctccttcatgagagctgatacatcactcaaacaaaaggaggtgggtggggctttctacacacagaaaaaggtgagagggaatgtggaaaattcagagactaggaagcagctccatctggctagagtatcagacaagtatgaggagatggtgggagaaagaatagaaaggaggttgggacttgaaaatgactgccactcgcagctaggaatttaacccaagcacagaggctgactagacattaaagtattctaggcaggaggcaagaaagagcactctagatgcaggtggttaatgctggaagcaggggccttgcagggattaggaggccctgcaaattgtccagctgagaactgagaagggcctgaagtgcagcagcaatgaaaacaggggaaaagaaacaatttggaagatgtttaggaggtgggaattccaagacctggaaggatgtggaaacttaaggatcctgacccaagaggtagactggacactgatggtgacaacagtacccacaactctcctccttccttcctgagcccctcccccatgtagccactggcctcagggaaactgaccccactcccacccagcttcaggaaagaccctttattcttctacaggtgatcccattgcccttatcgcccaagaatggccatgagactcattctagctaaaagactcaagggaagtctgctggaggacttcaggagaaagcctttctcctagaaaagactgtctctattactatcctacatattgccatatacaaatatcacctcttcatctctagaatttggccattgctaccacctgaggatggcactggctccaagatagcagagcaaggatgaaatgagagaagctgggaccttgatgtcactgacccgccctgaacctcctttccttgcccctgg

SEQ ID NO: 116933 - DNA, 1051 bp, Homo sapiens
taggaacgacaccttctgagccctcgggaaagcgcatttagtaatgtggagtcctcatcttgagggggactatgtttcagcggttggttagaaagtgctttgtttagagaacagtgggggccgtgagtgagggtcaggttgctgagctagcccagagagactatttgagttgttaaatcactcaggttccaccttgaccttcatcagacctgtgtttgagaagcaggcttggaacctctgctgccttaattgcgacttgtcgaaattggtttttctctgccatcctcgctgctcctgacttagtttggccctttcacctgggccagcctcctaatgggagtgctgtatggtcaccatcagtctttcccctccctgctccctgtcctgtgttcaatcaaatccttgtctgccttgtaattactggctttgtgattggacaagtgattttttttttttttgccagccccagtttccttatctgtaagctgaggggcatgatatctgcctcataggatgactgtgagaatttgaggaaagaattttaggtacataggataaaaggtgctcaataaatgatagctattagtatgtatgatatattatttgcaaatacatttatttctgaatttcagtttgggatatcgaatctctgccacccctgcctaaggttgcacaggttctccgaggggtatgagtggttgttagaagtgggagagcagtggtgatttgatattcatatatatttgtcagatctgtctgtaggagaaatagtatcatgttccatttgtgcatctactcacattgcctcaaccaccactagaatgctgaaactccacatctgtacctgtagtcccaacttccttattttctggattctgatcacttactagattctgcactagatgcctaagccagccatcactaccctcctccagacctgcttatcttcctgtgcttccaagtttgatgaatgatctcacactctatcagtaaagatgctttggtcaccagttatggagataccattgcaaactacttgaacatgaggaag

SEQ ID NO: 116934 - DNA, 1982 bp, Homo sapiens
cataggctctaaagtcagattacctgggtttaaattttggcaccgctaattacttactagccgagtcgtttctgagtttcagtttccccatctgtaaaatgaagagaaatgatgtacagtattcaccttctacattcatgctgtcttgcacatgataagcacccagcaaattttaactttattccacctttcctcctcttctccttgttgtagtggctcattccttcctagagataaagtccaagcttcattgtttgacttagcaccctacctgatctagccctgccagtccaagtgacttgccctctaggtatgcagaaactgctcacggtttcccaaatattccagattgttttgagactttatgcatgagattcctgctgattggtgtaccattttgtttctccataaacacatacttatcggaagcatccttgaatcaagtgtcccatctgctaggcagccttcacttctgcctgaccaagcggaggtaggtgcctatttgtgcctcacacatccctgttacagcatctgtcacactgcatgcattatttctggacacatctgtctcctccagcagcctgtgagctgctacctgtgatccccaggagtcagagctgtatacttcatgtggtagatgcttattaactataatttgatagaagaatgagtggagtgttacagctggaataggctgtattgaaaatcttctagataatggagttcctttgctattttatttttactagaaaagaccctagaataaagtgaatcccactgtgaaaaatctgttgtcaagatactctaatttttgtattgataatgggtagaaaatgagacggtgcagtggactgaatgcatgcagtacattgaaaagctgactagcagctatttcagaaaacatgaatcacaccgtttttgtattttgtaagtaccaaatctttctcttctaaatttaatgctccccttccaacctgagtctttccgaagaagagcatatttcccaaatggaaaatagatcctcatactttagtgacttttcttccttgtctcccattcttgaaactgagaaccatgttggttggtttcacagtgggggtttatgctattgtgaaccagcactgtaatttttaatcttgctgaatcacctgtgtgttactcttgaagctgtttaaacctaatctgacactgctctaaggcttactggaaaagatggtgtaaatacattaaatattgggtttttatgaaaaaattatatttttcattctgatgcaaagtgtgtttgtctgcaggcctgttgtaaacatgacaagtcagagatcaaactggctgcatctacggctcctgcctctctgagattgactgctttggttcagctttatctctgacaattttaatcacatctgaagctcctgcatattgctcctggtcatcctgctttgggttgtgatgactaaccaccgtttgtttctgcaccataagttttgtttccacgtttcatatgttaagattaaacaggcacctgttatcacatgtcctgggcatagactcagtgtgctaaattcaggaaccagtcagtttactttgtgactcaaaaaccttgtaagtacaatttagagtgtctataccattgtaaaaaatgtgattgcattcctgtgtcctctgagccatgcatgtatttcctgtgttcttttttaagtgaaatagtcattatgtcttaatgctgcgtattgtgaatccctttctctataactacacactcttgcaaagagattcatcaaggtctggaatagttccttcggaggctgtcttaatgatcgctgaagacataaagggcctgcagcccttccaaaatgtgtgagaagtttgttttccagcacaggatattgacatgccaagaggaagttagaacaagagagatggggacaggcagggaaaacagagaagtgctgagcgatagctcacacagacaataaccaaaa

SEQ ID NO: 116935 - DNA, 1037 bp, Homo sapiens
caggcgcgtgccaccacgcccagctaatttttgtgcttttagtagagacggggtttcaccatatcggccaggctggtctcgaactcctgacctcatgatccgccagcctcggcctcccaaagtgctgggattatggacgagagccactgcacccggccggatgtggagcaatttaaattctcataatcctggagtgcatgcaagatggtataaccactttggataagttttgtagtttcttaaaaagctgaacatagaccttccttaagattttggaggaagactttctctgcctatccagagaaacaaattaacaagatgctattcaaacactttttcccaggaaaatcatatagttttcaacatgtgcataacataatatgctctatttaaagctttgcatcaaaggctttgatctcttttcagtgatttttgttttaacattttgttaaatgttaaacattaacattttgtcatgataagcctaggtagacgagtcaaatggcaaataaattcagaataaacataattctacagaaatatgcagggcttccatctgtgaaagactgcaggaatcctcaatctggaagaagaaatttcattttacgtaaaacaggcccccaccccttgctgaaacatgtatttcaaaatgcaaactcagaattctttttaaagcaccatattctttttagtaagatgtatttaaacaatcttctgtgatctttttataatcttacatttttcaaacttaagaaagttaactgtaatacgtaaaagaaagaagcctgaatttcttgacaatagatacataaataatttaattactaacatacctgagagcaacgcagcagaatcaccagggcttgttaaaacactgatttctggccctaaccccagggtttctgatttagtagtcatggaatgggacctaagaatttgcatttctgacaagttcccaggtgatgctaatgctgcagattggcaagcggactttgagaatcactgctctggagattgtctttcaaaaaaaatagttg

SEQ ID NO: 116936 - DNA, 1037 bp, Homo sapiens
tgttctctcttttctcaaatgggagttgatactgaagctatcctgttctcttgccagtattttatatgaagttgtatgacttggttaaatgggaagagcaacatttggagggggactgaatattacccagacaacctacacttggagctggttgaatacatagaagatacttagattaactgtctttgaggagttttctaggatctagctaattaatatccactgccactgtcatgggagaccactgagattcgactgatgttctggccacagatgctgactcttgacaccaccccaaagctgcacacactagcgtgctgccctcttctgagttcttagtgttctgaagctatgctgtgccctatgcctaactggacagaagacccctcctcctcaccctgcctgcatcctcatgtctcacagtgtctcagaatcccttatgaaaacagttcctttcatgtgtgccagtagccactttctccataggactcaaacccaaatttatggggctggccaaggggaacatcactgagactctgccatgttccctcacagcttctcctggcctctgcatcttgggcaccctgcctctcttctttttcagtcagcaaaacaaagcaaaccctcctggcaggcctgccttaccagttcagcagacaagcctggtcctgtctgaagcccagttatgagtcattgcagaaaataaactgatgtaagcattcctatattctatttaagaaagcctcaagggtcttggagtgattgagcagaaaagccaaagtacttgaaactgacttaccatttaatttttagaataatccgttggctttgagcagaggtggtagagaaaatttatttattaatgagtaagaggtatcatccataaaaggaaaacatgatttttctttatttcaattgaggctgcaaagttgagagcagtagatggcatgtacccccatattctgaaaagaggtgatagatcatctctatagtacttgctaagaggtgactccacactgcctctgttacttcttcta

SEQ ID NO: 116937 - DNA, 2025 bp, Homo sapiens
tcaccctctcccctccccgcactccccattcaggcctccagttggcccctggctttgcaggtcctccattctcacgcagtggatgggggtcgcgacgcccgccgtcctccacctttcctggctgctgctggagcttcgcccctgcaagtggtgccccattcgcgttaggtgggtgggtcgtccgcccttcccattttagtcgcttccccatcttcctcgtttggaccctcttgcttcctctaaaagttttaaactctctgcctgggaaaatacctgatagcccggcatgtggagttacaaagaaagggctgttatccaaaggccggtgaattttgttcactttgatgggagaatcaagtccccaggagccttggatggttaggtcagagtctgactccttgacccaccaagtagaggaatggtgcctctgttggcaaatgattgttcatctaaatcattcatttttttcggctgtaggaaatctttggtctctgaactgttgaggtgggggcgtgagctttctagatctagtgaaagaattggaaactgttatattcgttttaaaaaagaagaccttatgcagtacatgtaagacatcacttaatggtacaagcaaggataagtgatttattcttttattcagtgttagcttaaattgcctactgacgtcttagaattccatgttgtacaagccctttgtttctatttagaaaggactaaaatggagaaaagctttttaagttcaaaacttcttaaattgcttgtattctcgattgttgttactgttcaaccctccttaggagtacttgatattttctatatgatttagtcttgtgccagtctcagtactccctcctttattagtggagcaagggtagtcagaattactggtgtaaaaaactgtcctaaataacgtagtaccttgccagagtctaagtgcaaaatgtgggatcaaagcggtagtggaggaagttgccatggctaatttttccatctttccctggatggaagggttggataacgtgtcaagagccccaaaattgtagaagtgagattaaaaatataaatgatagcttgccctttgaaattgcaaatgggtggaccttttttattaacattaaattgagcaatatcgttttcttgaagttatgctagatgttctccaaagttgttaagcacaaactatgcctgctgtattagaattgtatgttaaaaatttttaacgtgtgggttataaatagcctggcagatttgtttacttttcattctgtctcataacacataatctatttttccctttactgtggacttttgaccttttaatgcatttttaaaatttagagatagaattgttcagcttaaaagaaggaggaatatttttatgtttgcttcttgtatgggctagttcattcgttgctagccttcacttttctggaaccagagcctgtgtgtttttagagctggttgtctctgaattctctgcatacagtttgaaggggcagtagcaaagcaggggttgctgagccccaatcagtggctcactgcttctggcaaaatgatttgtagctctgtatcaaaaaacatctgaccacaaactctttaaaacctctcactttggcagggtgtggtggctcatgcctgtaattccagcactttgggagaggccaaagcgcatggatcgcatgagtccaggagttcgagaccagcctaggcaacatggcaaagcctcatctgtacaaaaaaaaatacaaaaataagccaggcatggtggtgcatgcctgtgattccagctacttgggaggctgaggcaggaggattgttggagcccgggatgtggaggttgcagtgagccaagattgtgccattgcactccagtctgggtgacagtaagaccctgtctcctaacaaacaaacaaaccctctcactcttccactcttatggaatttggtattttttcctttctctctctctttctctttgtgaaccttctttgtctccctgttcttccaacccattaccctaat

SEQ ID NO: 116938 - DNA, 1052 bp, Homo sapiens
gggacatcagagacagctatgtgaggatattggtcagtttttatgccagttggtgctctctgctgggtctctagtgttgtgttccttttcttctcatttcctcaggtttttatagcaaataacttaatctcttcctttgctgagaaaaatctcaaccatctgaggtatatttccacttcacttttttcatctcagtgtcatctctttatatatatatatctcagaggaagaaatgaccttctttcttttcaagagcaaccccctccctccagatgtgtccatgtaccctttcccatctttctttctctagaaactgtccattttcacttcctgtccaccttcttcagcctctccctctctagcctacatagatgcttgtatcttctgccatataagtgtgtgtgctgttcaactctaggaggacgttctaaagcttgagtctgctatgccactgtatttctattcttttctttaaagacttattctttcatcccaggaagctgttatagtaggaagaacattgacttttgagcaagatagaacttttgatctgggtttttgaagtcttttaaaaccactttagtagctgtgtaactgtgggtatgttactattcagatttcattctgtatctataaaatatgttatacttagctcacagggtggtggttaaagaaattaatacatgttaaatgtccatccaagtgtttggtacattgtagagttcttactaaatgcttctgtgctttgcactcgtactgcctttaccatttcaccactgaaactactgttttaaaagttatctgtgacctccgaatcaccaaatccaatgacgtttcctctgtcatccttggtttccttagacccaggggtccccaaaccccaggctgcagacaggtatcagtccttggcttgtttggtgttaggaactgggcagcatagcaggaggtgagcagcaggggagcaagcattaccacctgagctccacctcctggcagatcagtggcggcattagattctcatagtagtgccaaccttgttttgaactgcacat

SEQ ID NO: 116939 - DNA, 1336 bp, Homo sapiens
ataaaaaaaaaattgccaccaatgatgttcatattatagccccttcatttatttccaaagaaagagagaaggccacttctcctagccttttcccaagaatcctaagctctagtttgattaaacaaacatagatcatgctgccaaacctgtaacaatatctttgtctagagggatggaattatcctaagtggcttagccagtggagtgaatcttacctgaaaatagagactgcaacacaatacggggaaggggtggatcctggggaagtaaccagtgtcctcaaggttccatatgcttttcactgtgttctcttggtgatcatatcctttatgatataaaccatcatttctgtggggctgtttcttggttctgtaactccctacttccatttcctcctgtatatgtctatcttatatatactaccctaagtttaactcatactaaactgagtcagtttgatctcttcaccaaccctcacctagtgtgtgtgtgcacatatatgttttgttgtttgtgagaccgacggggtttcactctgccacccagactggcatgtagtggcataatcacaactcactgtaacctagacctctcaggctcaagcagtcctcccatctcagcccttagcctcctgagtaactaggactacaggtgtgcatcaccacacccagcccttttttttttttttttaagcgaccggggcttgctgtattccccaggctggtgtcaaactcctgggctcaagtgatccacctgggattctcaaagtgctgggactgcaggcatgagccactgcacccagcagcatgtgcgcgtttgtattcctcttcccccgatttctcttttctaactacctctctctcaacaacccagtcttgaaatctttcagaaatcttggttcttctcccactgtcaatcacgtgtcagatcttgaatatatcttgtttagttaggcccccaagttgtataatacccagttaacattgatttaaacagtatctcgggctaggcgctgtggctcacgcctgtaatcccagcacttggggaggctgaggcgggcggatcacttgaggttaggagtttgagaccagcctggctaacatagtgaaaccccatctctactaaaaataaaaaaattagccgggtatggtggcaggcgcctgtaatccccactactcaggaggctgaggcaggagaatcacttgaacccaggaagtggaggttgcagtgagccaggattgcatcactgcactccagcctgggtgacagagcgagactccatagcaaaaaaaaaaaaaaaaccagtatctcacataaaaagtccagaaatggagta

SEQ ID NO: 116940 - DNA, 2436 bp, Homo sapiens
aatttttttgtactttgagtagatacggggtttcaccatgtttgctaggctggtcttgaagtcccggcctcccagaatgctgggattacaggtatgagccaccgtgcccagcccctactcatacagttttgttgtgcattttaattcattcttattttttctctttcttcctcattattgttgttgttactgtttcatactgccaatattttatttaagttaatgcatgtctttaccatctttttacttttcgtatgatcttgcacttaagattgctttctttgattttgaaggatctgaaacacaccctttagaatgtcctttagtctgcttgaaaatgtctttattttatctcagtcttaaaggatatttttgctaggtacagaattctaggttagcagtggttactttatttcagcacatttcattgttattgagacctcaactctttgtgtctcaacttttaagataatgtgattttgtttggctgcttttgagatttttatctttggctttggctttctgttttactaagctgtgattaggcatcggattctttgggctgtgtgaatatatggattggtgtcttatcagtcctggaagtttcttagccattattttttcaaatattgtctttgcttcatattctgtctcctgtcattttgggactagtttagtatgttaggccttcttatcctgtctcttacctcttttctttttctttttctttttctttttttttttttttttttttttttttttgcttctttttgacctcaaggcattgttctggatattgcttcagacttatcttcaaagttcacattttttttttcacctatgcctaatctgttattaactcattcagtaaatacctaatttaggttattttttagtatagaattcttatttggttcttttcaaaactgtatcactttttacagttttcaattttaagcaaaaatatttaagtgtggcctttatccccttgaatgtagtaagcatagttatttttcagtttgtgtctgataattccaatgttgggaagtctctaggaagctgattcagttgtgttgtagaaataaattgatgtatataatgtaagatgaagttaatctttctctaaagaaggttttcatttgctgtcaccaagtgcctgggggtgtgagaacatcttaatgaaatttcaaatctttaactttcctgggccacccagatgagttgaaactgacttcagtccatggtttccttctggttccttctttatttctaggttgcagccctttagggtctcagccggaagccaatgctgttttcactgcagtcctcacccttggtgggtctcagactctggctttggtcccctgtgcctgcaatgcaggcaacaaacaaccaagctcagcctcttaaatgcttctttgttggcaaactcacaaaaggcaaaagctggggtcacctttctgggttcctgacttctagtggatttgagcttcttattcattcctcgttattttgctggttatttggtgctgttaagatcattttactatcttatctagctttttaaattgtctttgtaaggatacttggtctgaataacctggtctgctgtttctacgagtgtaagtccaaatatttctttgactaacttgttcagaaagactggaaatttctacattagccattcctttgtgttagggctcctttgatggtgcaaattagatacctggaaaaggtagactttaagctatggttgccttttaattcctttaaagttaggttagttcctaggactttgcaaagccctaagggaaggagacagaggatattttgtatgaccggagaagcaaaaaatacttgtatgtgagtagtgccttagggtaggaattatgtaagcaaatagaatgtaatgtgaacatttttgaagtgggactgtatggaggagggagaatgtactaaactgaggagggactgcagacaaatttgtcttttagtatttttgttggaagtaggttcattttcattctttccttctttacttcttctttcttttctttctttggacagagtcttgctctgttgcccaggctggagtacagtggcacaatcttggctcactgcaacctctgctttctaggttcaagcaattctcctgcctcagccctccgagtagctgggattacaggtgtgcaccaccacgcccggctaatttttttttttaatttttagtagaggtggggttttaccatgttggccaggcttgtctggaactcctgacctcaaatgatccacccaccttggcctcccagagtgctgggattacaggtgtgagccactgcacccagcctcattttcaataataattctttttttttttttttggagacagagtcttactgtgtcgcccaggctggagtggcgtgatctccactcact

SEQ ID NO: 116941 - DNA, 1087 bp, Homo sapiens
gtaagagagtgccactcggttctgttccccagaggaagtcactgttgtttcttgagtgttcaagcagcatattcttaatatcagaatagtgttagaaacaaaacagtttcaaaaggagaaggaggggccgggcacagtggctcacgcctgtaatcccagcactttgggaggctgaggtggatggatcccttgagtccaggagtttgagaccagccggggcaacatggtgaaaccccatctctacaaaaacatacaaaaaaaaaaaatagctgggctcagtagtgcaggcctgtagtcccaggtacttgggaggctgagttgggaggatcacctgagcccaggaggttgagtctgcagcaaggtgtgatcatgccactgcattccagcctgggcaacagtgagaccctatctcaaaaaaacccaaagcaccacatatcaaaaaaattcctttactatggaattcccaagtattttgttgagaaaatctaagtatttgaattaaatagcagaccttcttcagaaaaagattaggaaaaagcccttaccgtagtatatgaggtacagactggttcaggatcaagatccttattaatagcctgtgtctatttgaaatgggagagttccctgacccctgttgcaggatgtgcaacaggggagtggctcatctgttcaggccaccgtccatgctcaaaccccttatgggagggggagcacacagacgggcaggtgcagaagccggggcaagtgcccctgggctccggccccctggcagcatccaggggtgggagcctgcagctcctgaagcccaagtgggcatgtgttacagtgagcccctttagccttgcagacgacttaagtgttaaccagctaagtaccctcctggtacccaggtccttgtctggcatccaggaagattcaggttgtacacggacttgaaggatgaatgcatgggttttatcgagttgtggaggtggctctcagtgagatggatggggagctggaagggggatggagtgggaagatgatcttcccctggagtttggctatccagtaggcaatttcctctctgaccatccccagccaaact

SEQ ID NO: 116942 - DNA, 1031 bp, Homo sapiens
ctcagcctcccaaagtgctgggaatacaggcgtgagccaccgtgcccgaccagtgtattttatatgtggctcaagacaattcttccagtgttgctcagggaagccaaaatattggacatccctggaaaacactgcataccttgaaattgaagttttaaccgattaggacatgttaagaatttagaaaaataaagttcttacgcacagttttttctaaatcttttgttaattgggtaaaatggttgccagaggtgattgtgttttttttttgttttgtcaacatcatagaatttataaacttttttataaagagtatgacttagttttttttttcctgcaatcatattttccagttgaaaaagcttttggccattacattcagctataaattagtaacagtgtgcatatgatttctgattatttttcctcttgagccagaactagaaactggtcctgtaatatctgtggatcttgttctaattatatatccctttttatttgaaatacttagtattttcattgcctatatggtgaattctgagttttttaacctaacacacaatattgaaatctctgccctgaaaaattcctaaacatccttgaagtctagttctgttactactttctctctgaaatcttttttgattacctagctggaaacgatctaatctcccattctttaacagtacattcccttgtattaaaacttcttctgtaaatgtcttagtcctcttctagattataaattgtcttactcattattgtatcatctacattcatacattgaacaaaaagcaccaagcactgttatagatgcgagggaaagagcagtgcaggagaatcttggttcttgtcttcatgggatttatattccactttggaaaacaatgatgagagagacagaaaattaaataaatacatagatagagcttttcagatctcaaatgcttagaatgtgaaactccatcatgtggtagaaagtgtgaggatagcaccagtgcgttgataaggtgatcatggaaggtgtgatc

SEQ ID NO: 116943 - DNA, 1029 bp, Homo sapiens
aaccgatggcctttccttggcacagggtccactgcagcatgccaaacgaggaggcaggggcgtcgtccccccgccccccactgcagcactggagatggatttcctgtacttcggatccagggtttttgacagaagaggaagaagggggaggggtagaagtgttaaggggagtctgctgagaaaagctgtttttgaagccagaaggggtttttgtttttataatgccatttgacagagtggaataacagtatctaaggaaacgggtagaggacaacaaagaatggagcatattcatggcgaggagcaaaagctctaccccattgaaaggcttcttttcctccctggcgacaaggacacatgcattggtggccaaaagagagaggagacaaaaccgctgcagatggctgatgtgaatctagtggaaagagctactggggatgagagaaagaggaggaggcaggtactgcagagcgtgagtggtggtgttggttggtgaaatactggtcaccagtagtgtgcctgcttttgtaaaacatctaagtaaactccctgtgaacagggtggcaaacagataccagtgtctttgttagttacaaaatgcagtggtagtggctttttgcggacgactgcagcagtgctttttctccctctgttaggccgaaaagacaactgcagaggaataagaaaccttgcagcaaatgctggggtagaagcccatttacaagaagccatagtttataaatgcagcctgaacagcagaaaaaaaattactgttttttaaagtaggaataatgtcaggctatgaatgttttgtcattggaatgtattggacactttgattctacatcacgaaagtgatgctcaaattctttgatttaacataaatcctatacgaaatcttaataaattatgtatgaaacagtggatcttttcttttgttagtgaagcttttatgccattaattaggtcattcaagagcaaaccactttacaacgtaaattactttgtcaaaaattatggtgaacaaat

SEQ ID NO: 116944 - DNA, 1901 bp, Homo sapiens
acccttggcaaccaccactccactttttgtctcaaagaatttgactattctgggaacctctaataagaaaaaccatttaatatttattcttttgcacctggcttatttcacttagcataatgtctcgaaggttcatccatactgtagccatgtgtcagaatttctttcctttttaggtctaaatgatgttccattgcatgtatatgccacattttgttcattcatctgtcagtggacacttcaggttgtttccaccttttgtctatcatgaataatgctactatgaacgtgggtgtgcaagtgtctgcttgggttttactttttttgtgtgtactcaaacctgtgtttttaatttacataatttttgaacattattaactcaatactgtttttaagatctatccattttactttatgtccatctagtttgtgatgctaactctgctctatagtattctatagtacctatcactgttcctccagtgaaggccgtaagttttctccaaatcccgttaaccacaaacacctttatgatatacattcttatacatatctccttggactatgttatttatgtatttctgtataacaaattgtaccaaaacttagtggcttaaacagtttctgtggggcaagaattcaggaatgtcttagttggatggtctgactgaggcaggatctcttatgaagtagcagtcacgatgtcagtcacagatacagtcatctgaagggcttgactagactgacggatcttcttccaagatggctaactcacatagtctcagtttttcattggctattggcaagagacctcagttccttgtcacgtgggcctctccatggggctgcttgaatgtcttcatgacatagcagctggcttccctcaatgattctaacagaaaggccatttatgacctagactcagaagccacacaccattgcttctgctgtattctctttattagatatgagtcactaagtccagcccaccaaagagaggaattaggatccacctcttaaaggagtagggtcaaagaatttatgatatattttaagatcattacatcgaccagtgaaacagtttcactggatttatccctaggagagggatcactggataataagggcattgtttcctattgctgttgtaacaaattaacacaaacttagtggtttaagagaacacaaatgtattatcttgcagtcctggagatcagacacggttttcactggaccaaaatcaagatatcagtggctctgcgtctcctctagagattctattgaagaatccattttcttgcttttcttcagcttcttgcattccttgtctcatggcctctttctccatcttcagtgccagcagcattctaaatctctctctgaatctgaccctctgctgctcttgtcacatattcttctctgacccttctgcctccttcttaaaagaacctttgtgattacattgggtccacccagataatccaggaaaatcagcttcaagatctttaacttaatcacatctgcaaagttcctttagccacataaggtaacacattcataagttttggggactaggatttggccatctttgtggggccatacacaggcatactcatctggttctccattttttttaagctgaaggatttttttagttatttttacttttgcgaatgtgtgttactttcttttggtaatttcagattttcatttaccaagtttatttaaagcatagtataatatataatgatcaccaagatggtaagcagatattcattgttcaattagattcttgattttatcatcacttaatttatatcagtgtatcagctacttctgacatagtctgtaatagaaactgagaaacgttaaagcaacacagccttattaaatttctcttt

SEQ ID NO: 116945 - DNA, 1023 bp, Homo sapiens
cttgatccatttatgaagactctgtcctcaaataaggtcacatttgacatgacattttttggtgtttttttgtttgttggtttttttccctctgttgcgcaggctagagtagcttctgggctcaagcagtcctcccaactgagcctcccaagtagctaggattacaaacatgtgccaccacagctgactaatttttaatttttttttcataaggagagagtctcactatattgcacaggctggtctcgaactcctgtctacaagtgatcctcccacctcagcctcccagagtgctgggattacaggtgtgagccactgtgctcacacctgtaacatatctttttatgaaacacagttcaacccataacactcccttaatacttggtaccttgtgaataataagatacctaaatatggtaccttgtggataacaaggcatattgtcttactttttttatggaaaagtcatcttggacattctctgaacttgtgccctctctttctgttgtctgccctctgtggctgataatgcaccctttctgttcattcttacgtgtatatttgtcttttatatggctgtcgctgagtaaagcattttgggaattacaaaagctaagtattagatatagaccttgtcttcaagatatttatgctccagctgggaagacaaaacaccccaaggtaaaatggaataatttgagaagttaggccaaattgtatagtatttactgttcagccagcaggaagattcattattggctagagacatcaggaaggttttgtgtaagaaactgagctgggccttaaaggatgaggatatattataacagcagaggaaaaaaggatgtggtattcagaaaggggaggaggtataaacaaaaatataaaggtaagaaatagtttgtagaggaaagtgaggagagacttacttgaggaaggttatcttggaacttaataggaaataagttttgaaggtagactattatcagatataatagattgtgaacaccagacagaagttat

SEQ ID NO: 116946 - DNA, 1016 bp, Homo sapiens
tatttgggttaccttggggtgtttgaaaacccaaattaggaaattatgctttagaccacctgtttttgtaaattaagttttattagagcatgggcatgcccatctatttatgtgtttggggctgcttttgtgctacagctacaaagtcaagtagttgcaacagaaatcatacgacccacaaagccttataatatttattatctggcccttacagaaaatgcttgccaacccccgctcctggtcgttgggatgggcatcttgagacctgcccacacgtggtatgggcttggataggtctagccagtgttatgtagctatttacagaatgtaagcaaaggaaagtgtggggaaagaatatggcaaacagaaaactgaatatcaccacctaatggggccttagtagggaagagaaagagaaatagaaaagggttgttaaagagaaaattaaaatggatgaggtgaattctgcttggaatttaaaactttttggtatattattgattttgtatctggcaagcctaaaatttttatatttctaagatgtttctattttgtttctttccaatgataacactttctcttttttaaattttactgtgtgaattaggacttccaggattatgttgactggaagtgtggatagtagacatcttattcctgattttaaagagaatgtctgtaacatttcactatgaagaatgaagtttatagctgggtgtggagcgcctgtaatcccagcagtttgggaggtggaggcgggcggatcacttgaggtcaggagtttgagaccagcctggccaacaggtaaaaccccatctctgtaatcccagctactcgggaggctgagggatgagaattgcttgaacctgggaggttacagtgagcccagatcatgccactgcactccagcctgggcaacagagcaagactccatctatttaaaaaacaaaaaaaagaatgaggtttacaaaattagctgggcatgttggcttgtgtctgtagtcccagttactcta

SEQ ID NO: 116947 - DNA, 2020 bp, Homo sapiens
atttacaaattgtgaaatgaattaaaatgaaagggcaaagattaaatcatgaccaggcctgaaattaacacacaagactcaatttttttcaaccaaagacttttgtaggtgatccctgcctgcaggactccccttcctcctcagatgtcattggattgtaccaggtttactgtagattctagccgttgtagaactaactagatctaagatgagtcccctgatttcctttggtagagtcttccaattgctgaactccaatattgtcgtgactagccagtgttacaacctgtctgccttattttgtgtaatggatttcatattacagaggcatttttttaatgtcaagatgtttaagtattgcttaagtgcaaactacttaatactttttagctattaagtaattaagataggcaggattttatttgttccaaaatgatttgacctaaactaaaaagagaatgtggatctcctgaatcttacttggttaatcttaatataactcctagcattctataattcttcctaaagtcctcttacctggctatcttttgtatcttctttgtctctcctcttctttcccagtcataataactgccagactctgcttcatttctctttgacagtctctactcctaaggtcatccattctctttaggtatcttttggcctcagtttgagcacagcagatcccaagaccacatatgccatagcataggctattatagtcaaccttttgaataaatgtgattgaactttatgttagtaattcttatttaccatcttcctatcaaaaaggcttaaagtcttcatttaatgctctccttcatgtccattttgttaaatgattgccttttaatgacatcttagaacttcagaactatttcaccatggaggatgtgtaagattagccttttatcaaataaaaagtgtgaaatggaatatgtaatctcattaatccattctggctctaaaattctgtgactatcagataaaattcagaaataaaatagtattactaatataaataaatttttatcataattatatttcctaagttttgcctgtaagaatgggtaaaatatctttaaaaccttgaagaaattattacttgatagaaagtttaatccatctgtgagaaggcaaatgtattcagacacaactaaagttctctcttctattttaatttcatttatcttgaactaagactccactgtttcatcctcttagatgctgctacttgaacaatattgttttgagaccaaaaactagcatattaacacaattcttcttaaacgtcttaagagttttgtttcctttacccctttctttaaaaacaagcagccactaaattttttagtagtgaatttcaaaatcctttttaaccttataggtccaagggtagccaaggatggctgcagcttcatatgatcagttgttaaagcaagttgaggcactgaagatggagaactcaaatcttcgacaagagctagaagataattccaatcatcttacaaaactggaaactgaggcatctaatatgaaggtatcaagactgtgacttttaattgtagtttatccatttttattcagtattccctcttgtaaacttgaggtaagacactttacttaaaagtgtattttaaattaagcaataatatgtaaactctttcttgcaaaagttagcatttatatttttaaataagatatattgaattcattcagtgaatcatataaagaaaataagtgtaaaactccaatggctagttagttcttagttctttttaagattaaagagaagagaccaaatatagcatcactgtactgaggcaaggttttctgtgtagttcatagaaactagcctcatgattttagaatatgccttgaatattaagtgtagccttcctccccaactccctcagatcttgccaccccttaagtgctgcagtgataggtgatcaagaaaatcaggataccctactgggaagagccatgaactgaaagtcagtacctggttctatcc

SEQ ID NO: 116948 - DNA, 2259 bp, Homo sapiens
ttgtttctccctcttggctattttaacatttgagttcctggtccagttcttcctgtctgttcactactcttattccttactaatttcctattctatcctagtttttttcctatgcatttcaaggtttcccttattctccagacttttgtgtgtcactgaggtaactgtttctgcttctcttttaccctttatattcagtatcatcacagctcaacctttgctcatgtgtcctattctctttttccatccctctatcaatcttttctactctaattagcctcttctgtggtaaaactgtccccagcaatgacagacatccaatatacctacttcaaatcccttgggaaataaggtagactataaacaaacattttattctttccacaaactatgggtgacctaaaaagacttgcattagttgcctaacaggttaaaaaagagtagtttggtattttaacattgatcaacacattacatttcaaatcattatacttggcatgtgtttttaaaagttttaaaatacagaattaaaatattctttcatctactttagtatggtatatttcgcagagaactcctcctggcaggcctgtttagatagtacatgtctgttttgtagtgtagaactctgagatctcttttttaaagtttgtttaattccttaagcaattcaaaactcatatttgagagacaatgtaacttacccttagatccatctccacactgaagtggaatgtctctcagagtgacaatagaagtcacaccctcaaatttctacagtggaatatctagttgatcatttatatgtgtggtataatacaagttgagtatcccttacccaaaattgcttcaggccagaagtgttttggattttatattttttcagatttttaaatacttgtattatacttcttgagcattcctaattcgaaaatccaaaatctgaaatgctccattgagcatttcgtttgagtgtcatgttggtgctcagaaagctcaagactttggagcatttcagacttcaaattttcggatttagaatgctcaacctatatacatcaggaatagtggcacttcagatatacctgaaaccaaccataaattttattttactcagcatgtgcttcaacagacatcttgtgaatccattaacatatttccttagaattggacatgtggtaccataacaattacagccctgtaatgaaattatatctctttttaaggttttatgctgtgaaagagcataaaccatgagctatttattttgtcttagaatattgttttgtgtagacacttttgaaaccattggcacttcctactgtggattaaaattaatccacacaatggttatttctcccaaaatcacttgctagactttgtaataccttatataaactcgaatcacgtttcctgttcattaatctctttacccccaaaaaaggcaaaaggaggctgggcaccgtggctcatacctataatcctagcactttcggaggccaagcagaaagattgtttgagctcaggaatttgagaccagcctgggcaacatggcaagactctgtttctgcaaaaaaatacaaaaattagccaggtgtggcgtatatctgtggtcccagctacttggaaggctgaggtgggaagattgtactccagcctgggcaaaagagccagacctggtctgtctgaaaaacaaaaacaaaaacaaaacaaaaaacagcaaaaagtaggtctcctccaaccggattacttaaagtctaaaatttatgtagtagtaccatctagtggcaaaagaggacactgctttgctatttgattatatgtgtctttgtagcagccagggaaataagtgtttatgggttagggaaatgtgaacactgtatattaaggaaatatttatttttaagtataatgatattattgtgtttgtgtttagaaagaatccttgtttaaatatacatattgaaatatttacaaagaagttgtatgatgcctgagctttattttaaaaataagtctgaggcagaggggtggaaatagaggaagtggatatgggtgtagatgagataaaactgaccatgaattgataattattgatgtgggatatgaaggtacatggggctttgttataattttctgcatacttaggtatatgtttgaaattttttgtaatgaaaataaaatagagattacatggaatttagatgatatgaaatcagataaatgcagaattatagctaatcttaaaaaaagttgtgt

SEQ ID NO: 116949 - DNA, 1081 bp, Homo sapiens
gatgtttaaaagactgatcacaccaaatgtggagcattggaatgctcaggcattgctgagagaagtattaaaaaccattttggcagtttcctttaaaattaaaccctatgactcagtgtttgcactcctagaaatgtactcaagagaagtgagggcaagtgtccactaaacggtacaagaatgttcatagtgacattctaaataatagcctgcagactggtaacagcccagatgcccctttaagaggagaaaggatagataaattgggctgtatttatacagtggactgctacatactatacaacatttaaaaacaatgaactgataaggcaacagcatggacagatttcacagatactatgttgaacaaaaaaagtgagacacaaaatacttatgtactgtgtgattccatttatatgaaggtcaagagcatgccaaactcttctgataaagaagccagaatagtggttacctctaggaaatgaagattggtaaaaggagcttgagggaaccctctggggtgctagaaatgtattttcacctagatagtgattacatgggtgtgaaaattcactggatatttaggattagtgtattttacatatgtgtgttgtgcctcaataaaacaggaaaaaaattacttgaggtcagtttttattgtggaatagccataaactgttcacagcaaactagtaaataatgtaggtcatattggatggtatcatcttaaggcaaagtaactggatgtgactgtaaatttacacagattttgttgatgaggttcataactcaaagcacttacaaaagtaatttaacacatcattggagtaagttagtagctttccaaggtgactactttgggaatctttttaaaaattgtttgaccttaaatcttatttacctttatgcttatagctatcaatagatttctaacaatgtgtacagaaatttttaaaaatagaactttattacaagttgagtatattcactattttattaaattaggaagtgtggacaaaaaaaatcaaaatcaactatttttttttaaatttaaatcccatcaccagaggtaaaagtaacc

SEQ ID NO: 116950 - DNA, 1056 bp, Homo sapiens
aattagtatactagcagaatatacttaaatgtggtatataaaagcttgaatgttgaagttgttaaatagattatgtgttaatttggtgttttttatggtcatgttggtgcacgcttaagagacatggattctaaacacataagtagcttttgtaacttgagcaagtctctgggtctcacttgttttatctgaaaaatgagaataatttgcattgttggtttttaggtttgaaataatgaatgtatcttaaatgtgtttctaataccttgcacagagactccccataatcaccattatctcaaaatatcactattattatttggccatgatttatttattaataatgaataataggtaatatatataaggtgcgtgctttgagagtgatctgaatttttttctcagcatacttaaatgtcaagaaatacagaatcatgtcttgaagttatttagaatttcatgttaatatattgtgttctttttaacaggaagtacttaaacaactacaaggaagtattgaagatgaagctatggcttcttctggacagattgatttattagagcgtcttaaaggtagattttaaaaaggtgttttaaaataattttttaagctcaaattgtcatctttaggtgtgtagatccaagtacagcttctctcgatttgggtgttggtatcagttttcttggtatgttagccttaccctcaggatgtaattgttaaagtacaaataaataaaaaatgtatttgtgtgtcatttcttcagttaaacatttaactggctttgaatgaactattttaaatccctcccttaaataattttcggctctttgtaaagcttgttgctattctgccagtcactaaatagggctttagtattctatatgccatagacttgagcctactgtttcattggaagaagtattgtcttcttcattcaggatagaaatactttaaccttttcacatatataagttgattataattcatttttagcagttttaaaaggatatctttctcattctgttgcttgaaaattccagtgtcagaacagagaa

SEQ ID NO: 116951 - DNA, 1024 bp, Homo sapiens
tctttttaatactctaattttaatgactgtaatattctaagtcctacctttaaaaattgaaatcaatgtaaattttttgagtaattcattattagcactttaggtagagaagtttgcaataacaactgatgtaagtattgctcttctgcagtctttattagcattgtttaaacgtacctttttttaaaaaaaaaaaaataggtcattgcttcttgctgatcttgacaaagaagaaaaggaaaaagactggtattacgctcaacttcagaatctcactaaaagaatagatagtcttcctttaactgaaaatgtaagtaacttggcagtacaacttatttgaaactttaataacttgatattttaaagtacctaggtaatccattaaaattcaggataactgaatttatagttatttgtaaattgcaatatgttttacccaactttaggcctgaatatataatagttaatgaatttttgttggtaaagatgataaaactttattgtgctcaaatgttttatttaaagctcttatttagaaaatctataaagtttgaattctagaggacctcagggttcaactaggcaactagttttttaactccgtgtattgaattgccaaacatactctatagaaatatttatcaccatctgcctattttttgtactgtgttgcaggaatcatgccaaatagtttttgcaataaaaatatctctgaaaatattctagatataaatgccaatagctatagcacggatattagcatttttgcaagcactaaagctggtttgttttgtccaccagtattcacaataaattaacagtatgcagttgaataacattctgatttactacaaagggttatttttcttggcctctgctgaaccagtaaaacatatactgaaaagatcgaacctgcatataatgaatgtgttggagtaaagaaaaaacatgcaagtcaatagtttagattacagaagtttgttcaccgatttatgacagcaggtcctaaactgccaacatctct

SEQ ID NO: 116952 - DNA, 1023 bp, Homo sapiens
aaagttctctcaacttaatctgtatgtatatggtaatccttaccttaagttgaagtatgagcttaagaatgatggacttgtttcttgatatttctatgttgtccacgttaatatgctagtatttaataattaaaagtagtgcctcttcagtagagaagagtcataaggcaactgaatttaacctcactctaactggaccaattatatattttaagtgaaataggccaatctaattaaagccacttgtgactttggcaaataagtgtttgaattccacgtcacatcagggatccagattgagtctgacacctataatcaaatttaaacactccttggagtaaaaaataattttctcatgcaccatgactgacgtatttgcttattcattttctttattggttcttatatgcttttttgcttttactgattaacgtaaatacaagatattgatacttttttattatttgtggttttagttttccttacaaacagatatgaccagaaggcaattggaatatgaagcaaggcaaatcagagttgcgatggaagaacaactaggtacctgccaggatatggaaaaacgagcacaggtaagttacttgtttctaagtgataaaacagcgaagagctattaggaataaaatgaattacagctctgttaatattgattaaattttattaaagacataaggctgtgtttattttggctctatttcaaaataagatttatcatggctgctgagcaacataatcaatattcacatagttgtgtctttaccatattcatttcccctggtactgttctgttctgccttggaattataagggagagacagagttagatggtggtcttccggtagctaatgactagcttcagttctcctttgaaatttttacttcttgtaatcttagactgtataaaggcattcagaacatgtcactgctcttcaaattgtgcacttaaaaaaccctcattcaaggataataggaaggaaacaaagagaattttaggagagatgaagt

SEQ ID NO: 116953 - DNA, 1094 bp, Homo sapiens
taagaatatgcttctattagttcattaaaatgtaaagcttaaaatgtcttattaagtatttaaatttattttactgagttaaaacaaacatacttcattcagtattactagttagcattatattggaaaacaagtggtaaattaggacaaaggcaatcatgtttaaacagcacatttgagttatgtatctgtcttttgtttagggaattagttgcaacatttatatattcctacacatatgtagaaggaagaaaaatttaatcctatatgacagaaaaaaatatttacataggaatagatctactcgtagtgctttgggtcatcttccaattattatgtactttggaaaccttacctatccagtaagctggctatgataaattggatccatattacacttactacatcaaaataaattctaagtagattagatttaatgtcaaaatgaaaatcattaaaaatataaaaagattagaagaaaatgtgggtagcgtttttataatcatgatgtaggtgggagacccataaagaaaggattgatagatttcacgttacagcatgagacttcagtatgccaggaaatcatagcgagattccaaaacaaacaaccaagatcacattatttgcaaacatttatgacgtgtaaaaagttaaaattcaagatgcaaaaaacagtatttatataccagctatttaaagagtatcttaaaatggttccaagccatcgtagaagtaaaaaaataaataataattttaaaaataaaattaaaatgggcaaaggatatgaacaggaaataaaagaagaaattaaaatgacttgtaaacatggaaagatggtcaactttactaatcatgatatataaatacaaattaaaactaaagtcagatttcgtgggggggccatttagttggcaaaaatcaataacactcagtaatggtgagcaaacaggcattctcatatgttgcttttaattgtatgacatgaaacaggctttctggagagcaattttgtcaaatgcatctagcattatttataatgtgcctgttgtgaagctcatcactacaacatctaagattttttgctaatgagataa

SEQ ID NO: 116954 - DNA, 1040 bp, Homo sapiens
gcctcccaaattgctgggataacaggcgtgagccactgcgcccggccaattacaacttttttaatttaaaaatagcaagtatgctgggcatggtggctcacacctataatcccaacacttagggaggccaagcgggaaggattgcttcagggtagaagttcgagttcaacctgggcaacatagggagactttgcctctgcaaaaaaaaataaaaattagccgtgtgtggtagtcccagctacttgggaggccgtgtgggaggatcacttgagcctgggaggtcaaggctgcagtgggctatgatcatgccactgcattccagcctgggtaacaaggcaaaaaatattttttttaatttttattttttgtctaaaaaataaaaaaaaaaacttaaaagcaagtaagtatgatctcattatacatatgtataatgtgtgtatatgcatagagaaatgtgtgggagaatgttctttaaactgttatcaatagttatctctgagtgttgggatttttgtgggttttacttattcttttgtgtgtcgttttattttttgtaatgaacatgtattactataatttataacacccaaaacccattttcattttgggaaaatagaagaaagcactgtcttgatttccgttgtatggtagtttaggttgccatacttcagagtcctaccatgacatacatcatgtcatttatgtcagtatagggatggcagaggaaaagatctattgaaaatagtaaatcagggcccggtattcattcctcctttaagtgatgaactctgatagtgctgtgaattcagaggtaaacataagtatgtttgtttagcagtagcaatcatagacttgcccaccatattggtgtttgtatgacactaatgctgctaatactatctggttactttcagtcactgttttaaaacaatattgcagctattcccagatcctgatgtagatgtgtgacctgtatctgtgggactgtgatttgttattccaaaagtcctttcatctaaataggatctatacacatgatc

SEQ ID NO: 116955 - DNA, 1029 bp, Homo sapiens
ttgcagtgagttgagattgtaccactgcactctagcctgggtgacagagcaagactctatctcaaggaaaaaaaaaaaaaaaacgtaaaaccaaagtgctggaactacaggcgtgcaccaccatgcccagcctgtggaaagtgttgaccaaatatcttctgtatatcagagtgtttctatggcaattacagtttgacagtttactgtggtaattgtattttagggagttctgggtttttgtaatttgttatttggggaatttaagaaattagtttttccagtaccctttattctttttatacgttacattgttacttgtgaatcagccatatataatttttatataaacaatatttttatactatacaacttactcttgtcatttaataatactttgagatatcttttcctatctatatgtggtttatagatatggaagtttttaatccatttttctttcactattttttctttttttcaagcaacctaagcttttctatttgaaatttagaaccaggtctctggtaatagccagtatataataataaagctcaattaaaagtgggaaaaagatggaatgatagaaaaacccactctactgccactggtttttaaaactttttcttatggaaaattttaaacatttacaaagacaataatgtagtgattcatatcgacatgtaacctattcaccttaacctcccattttattttttaagaagattccaggcatcatcatcacttcttccctgtttcactgtgtatttacaaaagataaaagtacttattaaaaatacataactggccaggtgtggtggctcacacctgtaatctcagcatttccagaggccggggtgagcggatcacttgaggtcaggagttcaagaccagcctggccaacatggtgaaaccctgtctctactgaaaatacaaaaattagccagatgtggtggcgcacacgtgtagtcccagctactcgggaagctgaggcaggagaatcacttgaatccaggaggcagaggttgcagg

SEQ ID NO: 116956 - DNA, 1021 bp, Homo sapiens
agccctttctaaactgtgagatcttagagaacttggactgtagcaaattcatacttagttttctggcaatttggagcatttcagaatttgaacattccttcaatgcttttcatcaatgaacttatctgaatgtggttttatttatttagatctatgaaaaattactaccctagaatttcttcagtctttggttaagtccattctgcagtttaatgctcatatgcaagaaactctcttttctttagtttttctctaaaacatacttagtaagcgtataggtaaaaaatattttgaacagttataatggtcatacttttatgatgtatttaattgtttatcatacagacacttcatttggagtaccttaacatgatgttatctgtatttacctatagtctaaattataccatctataatgtgcttaatttttagggttcaactacacgaatggaccatgaaacagccagtgttttgagttctagtagcacacactctgcacctcgaaggctgacaagtcatctgggaaccaaggtaacagaagattacaaaccctggtcactaatgccatgactactttgctaagacattcttggccaggtgcagtggctcacacctgtaatcccagcattttgggaggccaaggcaggtggatcacttgaggccaggagttcaagaccagcctgggcaacgtggcaaaaccccatctctactaaaaatacaaaaatttagccagtgtggtggcacacacctgtggtcccagctactcaggaggctgaggcatgagaatagttggaacccaggaggcagaggttgcagtgagctgagattacaccgctttctagtggagaattctgattcacagtctcttgaagaaattacatatttttatacaacgaagcataaacaagggaaaaatcaggtttataaaaagtgccagattagctaatttttaattctttttcagtctttacatccacttttctgcaagaatactgagttccagccaaactggctcacttcc

SEQ ID NO: 116957 - DNA, 1277 bp, Homo sapiens
tctaatctgcttctaactaaatacgtagaatttattgtcagagagtaattagtacttaccagttgctttttaaaaaactgactacaaatcctggctctcactctgtatgatcatggcattttcctttttatgacaaaatgtttttaaatttataatcgtataattttaataatattatcatctgacgagaattaatgattgctgagaattagtacttaaaattgttgcagaaatgttttctgtttattgcttataggtatagattaaaagaaataagataaagttttaaattatgtaaagatttagataaactacattctctatgtgtgtgaaatccgttgtttttcactgattatagtcagtggattagcaccaacttatctaggcaaacagcactaacagtttgttagtgagtatgcaaaaacctacttttgcttttaatactgtatattaccactcatactatttactcacataaacaaattggtgatgatacatagattttgaaataacactgattacttcatcctggaaaggttttccggttttttgttttttttttggcggggggggttgttttgtttttttagagttatagtaaatatcccattcatcacttaattggtttttggcttttggatattaaagtcgtaattttgtttctaaactcatttggcccacaggtggaaatggtgtattcattgttgtcaatgcttggtactcatgataaggatgatatgtcgcgaactttgctagctatgtctagctcccaagacagctgtatatccatgcgacagtctggatgtcttcctctcctcatccagcttttacatggcaatgacaaagactctgtattgttgggaaattcccggggcagtaaagaggctcgggccagggccagtgcagcactccacaacatcattcactcacagcctgatgacaagagaggcaggcgtgaaatccgagtccttcatcttttggaacagatacgcgcttactgtgaaacctgttgggagtggcaggaagctcatgaaccaggcatggaccaggacaaaaatccaagtatgttctctatagtgtacatcgtagtgcatgtttcaaagcaaatgtgaaatttttaaacagaaaacatgtttagttaatatgctgtctttatgactaagaggagaaaattcatatcagccatttgtgctactcatatttaaaagattaagtctgtatttccctagaaaaatttagcaaaggaaaatgttatgtgcactactataagaacagta

SEQ ID NO: 116958 - DNA, 2383 bp, Homo sapiens
agcaagaaccatacgcttaattcccattttagtgtaattgtgcccttgctttttgtgccgtttatgttacattatgttccagccaccactttatattcctatcccctcatcgtttcattcgtcatttatcttaaaagtgatgaagtcatgagactcttacacagagaacctgaacagccaaaagtattgtctccttcagagtcatcactttgggaggctctgcaccttaagatttcaggcctgccctctggccatgctttccttcctagtggtgtagcaattggcctacctgattctctttcctccccctggtctcctgtggattctcagttaatcttatgaattctcccctcgttaatacaatctcagcatttgtgaacattttaaattttttaaaatgctaatcataacaggaaggggataaaaaataatgaataaacaggaaaacattcagttttaagatacctcaaaagttattctgtaaatgttcctgtattccaatggattgtagactaggactgagacattaatcatctggatttcaaaataaaacctagactcagtatttgttcctcttccttcttcaggtaggaaggctacccggggcatttcatcacaggagctagggcaggggctttcaggtgaggagcaggatggggcctctgggggtgtgactgctggggacatagccacaggggattaccttcttctcactcctcacctccagatttgcactggggcaaaaggaggattagggtgtgtggattgcggggagataatagtacaagacagcacaaggttttggcagtaagggataaggagaaaagaaatcccaaataggtaaaggggaattccttagttcagtcagctgggatggtcatttgtacatatatgaagattctacagctatcagtcatttaagtttgcacttattagtattagaagttttagaatataatttccatgatatatgtttattgattccctaatctaccccagaaactgtgctaggcactagatttttataatgattaagacctggtcctggctttcagggaactcacagtttatttgcattagtgtttcacaaaatacctaaatcataatgatcacccagaggcactcgtcaaactggattttctggcactgtagcaaacagaatctccaggggaagggcctaggaatcaatgtgataagtggcctggctgattcttatgttcgggaaattttgtgaaacaccagtagaatattcttgttgagcctgtgatatttattttagaacaaggcatttcatgctaatggtgactatctaaaccaaataaaacaaaagcaatatgctttttaaaattatcagtctttcttttgttcataagagtctaaattaaggattctgttgaatgtcacctgagtctgttggtgctctactatcggtagttttaccctattgggcaatagtccggtctatttagaccactgttttctaacaggcaccaagaaaattgtagaaggacatgttcatcatctttgcattaccatgaaacatcctgatttttcttagagcaaccagtttttaattgtatcaatccagtcatgaatttgcatattttagcaaatccatttataggtttaacctatgaattctattctgtgcctcaaaattctctgaaatcttttcatttgcctgaaatcaaaaagcacttcctcttttatctgatagtctaaatttttttgaatgttctttttttattagccatgttcttcctgaatctgttgatatctgccacattcttatttaatctttattttcagtatcaaatcctaagatttttagtttttccatacaagagtactcaactctttgatcatgtagtgccttcttggcatcttctttaggtgcattttatctttcttaagaaagtatcccagttattgtcacaccaggcaagattttatacagacaaaaggcatagtttgttttgttttggtattgatcctctgctttaaaatactcgacatcttggggatctcattagtataccaggccaagtcttaaggtcttccctgtcaatttcatgggtcaaaattctcagttcttttacaggctccttttcttttacccaagtgtaaaatggtggaattccttgaagctctgccctaggctcttttcctttctctctatgcttctgttatagtttttgtttttgttttcaaatttacagctcaatttgagttttttccctgagttttagacacattattgaactgactatgtgacatcttcccttaggtggtattttagacacttctaactcaactgtcacaaactgaattcgtaatctttcccatccctgaatctcttatcttttcccagtttccttttctc

SEQ ID NO: 116959 - DNA, 1144 bp, Homo sapiens
aaaaaaaacaaaactttttagtttttcttcatgcacagtttcatttaaaggcatccgtattcctaagggtaattatttgccaaaaaaaaaaaattaaagtagttaggccacagtgtatgacaataaagagtgtttataaagccctaataataataataagttacctttttctgcttatgttcacgaagaactagtgttagaaaatagccttcttcactgttggcaaggtgcagtgtatatgcagtaaatagaaaataattatttcgctcagcaagataaggggctgggggtggagaaactggcataaaatggaataattgtcagttgtactttataaatatattatacagaagttctttataacagtttttgtagcttataattctaaaggcaaatttaaaccatatattctcattgattgagtttttttttcctagtatttaagttaccaacttggtaccagtttgttttattttagatgattgtctttttcctcttgccctttttaaattagggggactacaggccattgcagaattattgcaagtggactgtgaaatgtatgggcttactaatgaccactacagtattacactaagacgatatgctggaatggctttgacaaacttgacttttggagatgtagccaacaaggtatgtttttataacatgtatttcttaagatagctcaggtatgagttaatttactttcatacaaatacattttactgattttcttttttttcactctcctcattaaacaatgactgataaaaacctgtgcttcacattcgcttatctttactcatttgtttgtcttatgcctaaacaaaggcaaaggtacatctacagatggaacacagtagtgaatttatgtaattgcattaaaaacaccattcataagaatatacttgtagggatcatttctgtgatccattactagagaagtttaactgtgtagaattaaaaaataaaagataaaacacttcctaggaatgggattaaaaatctaaaaattcttaagaccaaggcaagtgttacacacacattgattccatccaaataagaggctttactctaaaacctgttgcttatcatttctcaccacttattcactttatttctctagtttgacaaaggaaga

SEQ ID NO: 116960 - DNA, 1079 bp, Homo sapiens
attgtggttagactgtaggaaatctttttggcactgtagtagcatttaggaggaatttaaaaaaaaaaaaaaaaacaggatctccctctcttgcccaggctggagtgcagtggtgcgattatggctcacagtaacctcaagctcctgggatcctcctgcttcagcctcccaagtagctagaactactgcaggcgcatgccaccatgcccagctaatttttaaaaagttttcatagagacagggtctcactgtgttacccagaaggtcttgaactcctggtctcaggagatcctcctgcctcagcctcccaaagtgataggattacaggcgtgagtcaccacggctagccagaatttctttcttaatagatttctattcttactgctagcattaaaaacaaaaaagcaactagtatgattttatgtataaattaatctaaaattgattaatttgcaggttattgcgagtgttttgaggaatttgtcttggcgagcagatgtaaatagtaaaaagacgttgcgagaagttggaagtgtgaaagcattgatggaatgtgctttagaagttaaaaaggtacctttgaaaacatttagtactataatatgaatttcatgtttggcttttttttgctgccttcttttagccatgagatttcctaatttcttacctgtgtattattcagtactataatatgaatttcatgtttagctttttttgctgccttcttttagccatgagattccctaatttcttttttgagatggggtctctttctctcgcccaggctggagtgcagtggtctgatcttggctcactgcaacctccgtctcccatgttcaagtgattctcctgcctcagcctcctgagtagctgggattacagtgcacgccaccactcccggctatttgtatttttagtagagatggggtttcaccatgttggtaaggctggtctcgaactactcctgactttgtgatctgcccaactcggcctcccaaagtgctgggattataggcgcaagccatcacgcccagcctagattccctaatttcttacctgtttatctcaccagtccatag

SEQ ID NO: 116961 - DNA, 1190 bp, Homo sapiens
acccgcctgccttggccttccaaagtgctgggattacaggcatgatataatgcatggtcaatcttggaaaaactagctgtcagaaatttataatatccagttctgatttgggcctaattctggttagcagtattagaatttatttattttttccctctttttctacatttagtgcagcagtcatgaacattcttcttctctttttcattcaatatcaattccctctcaacttcagctactaatgagcaagagaatcagaactaccttctagctcccctgcatgttccacatcactttaactcactcagagctcttactctagagctttcctttaccagcactctgtactccgttcacttaaagctgttggtcccttactcttgtcttctacatattctctactggatccttcttttttatgtttcagttctctagaagaagcccaatgttttgaaaaacaaaaattttctgtggcttctattacagtgtttctcttttccagtaacaaccaaaaccctgaacaatggttttgaccaaatacctttgtgtatcagagtgtttctggggcagttacaatttgacagttgactttgacttgcttcatttctaaactggctgtactatcttgagttcctcctaattttgcttctgacacaacccttctccttgatcatagaatctagatttgtagatttatttaagtttttctattctaccttcacctgtattttatactttttggtcactcacttttgctgttactacttgtattaataacctctaattatttattttgtgtcttctaatttgaactataaaaacatttttgaaacaaaacctctggcccttgacatgtagccccacagagaggaacttttgtatttttctaccttcaactctcaactctgggccagttgcatcttaattcagtcctttaaattcttgctttttttgttctcaggatacttggagtgccccacctttatctcagtcacaatgtaattaaaattgggctcatcttgattgatgtgagaaggacaaaggcacttcttgcataaaagcactctatctgcctcctaccacttatgtgacaaattatgtctaaacctgctcctagattgttttgttcacttaatttcttgatgaagagagtaaagtagctatttattgggttagacccaaaatgtttg

SEQ ID NO: 116962 - DNA, 1179 bp, Homo sapiens
ccgtcagcctcccaaagtgctgggattacaggcatgagccactgtgcccggccacatgccgggccttaatccacttcctgttcacttttttttttcttttttcaagcaaccccagcctgagaataacccacattctattctgaaaatgttttcttttcataatgcacatcagttgtgcctcatattctaagatgtgtgtactatctaaacacttagaataaagtttataaaagtcattagttaaatattgtgttctgcttgttttatagagatatcactgatataaatactatttggtattttatgaacatttttctaaatggaaagttcttaatttaccagtgagggacgggcaataggatagattaaaaaatagcttttattcaatatcagtaacatagaagttaatgagagacaaattccaactctaattagatgacccatattctgtttcttactaggaatcaaccctcaaaagcgtattgagtgccttatggaatttgtcagcacattgcactgagaataaagctgatatatgtgctgtagatggtgcacttgcatttttggttggcactcttacttaccggagccagacaaacactttagccattattgaaagtggaggtgggatattacggaatgtgtccagcttgatagctacaaatgaggaccacaggtatatatagagttttatattacttttaaagtacagaattcatactctcaaaaagacctaattgtaagcaatgttttatataatcatgaaagttttaagccaaaatatatttattactgtgaaaagataactactaactcttagtttaactcattagtgtacttaatgtaataacagtttatagtattatagaggagactaaattaagcaaattatagttgagaggtgtagcccataggtggaggaaaaaatagtcacaaatattgtaacaaaataatccatttctattagtatagtataaaagagtatgaaaacaaaatttagaacaagacaaaaactatgagcgtgatccagagaatataaaggttcacatttttctaatgatgtcttagtatccataataataattttttttttttttttttgagacagggtctcactctgtctcccagactggagggcagtgttgtgatcttggctcactgcaacctccacctcctggg

SEQ ID NO: 116963 - DNA, 8473 bp, Homo sapiens
ccaaccatagattaaattaccacaaagttcctattcaacataggatttcatgatatagtttttaaattgggaaactgttatatgaatagagtaaatgtatgtgccccaccccctgcaaatgttttaagctattgggtcagaataggaaatgtagaattgacaaaaaataacacctttactttttttagtgtgacagattagtactttaaaacattaaacattacatgaaattagaacaaaaggagatgtggaatacttggaatttataggataattggtacaatcatattatgccttttgtcttctatccttttatttgttgttactgcatacacattgtgaccttaattttgtgatctcttgattttatttcaggcaaatcctaagagagaacaactgtctacaaactttattacaacacttaaaatctcatagtttgacaatagtcagtaatgcatgtggaactttgtggaatctctcagcaagaaatcctaaagaccaggaagcattatgggacatgggggcagttagcatgctcaagaacctcattcattcaaagcacaaaatgattgctatgggaagtgctgcagctttaaggaatctcatggcaaataggcctgcgaagtacaaggatgccaatattatgtctcctggctcaagcttgccatctcttcatgttaggaaacaaaaagccctagaagcagaattagatgctcagcacttatcagaaacttttgacaatatagacaatttaagtcccaaggcatctcatcgtagtaagcagagacacaagcaaagtctctatggtgattatgtttttgacaccaatcgacatgatgataataggtcagacaattttaatactggcaacatgactgtcctttcaccatatttgaatactacagtgttacccagctcctcttcatcaagaggaagcttagatagttctcgttctgaaaaagatagaagtttggagagagaacgcggaattggtctaggcaactaccatccagcaacagaaaatccaggaacttcttcaaagcgaggtttgcagatctccaccactgcagcccagattgccaaagtcatggaagaagtgtcagccattcatacctctcaggaagacagaagttctgggtctaccactgaattacattgtgtgacagatgagagaaatgcacttagaagaagctctgctgcccatacacattcaaacacttacaatttcactaagtcggaaaattcaaataggacatgttctatgccttatgccaaattagaatacaagagatcttcaaatgatagtttaaatagtgtcagtagtagtgatggttatggtaaaagaggtcaaatgaaaccctcgattgaatcctattctgaagatgatgaaagtaagttttgcagttatggtcaatacccagccgacctagcccataaaatacatagtgcaaatcatatggatgataatgatggagaactagatacaccaataaattatagtcttaaatattcagatgagcagttgaactctggaaggcaaagtccttcacagaatgaaagatgggcaagacccaaacacataatagaagatgaaataaaacaaagtgagcaaagacaatcaaggaatcaaagtacaacttatcctgtttatactgagagcactgatgataaacacctcaagttccaaccacattttggacagcaggaatgtgtttctccatacaggtcacggggagccaatggttcagaaacaaatcgagtgggttctaatcatggaattaatcaaaatgtaagccagtctttgtgtcaagaagatgactatgaagatgataagcctaccaattatagtgaacgttactctgaagaagaacagcatgaagaagaagagagaccaacaaattatagcataaaatataatgaagagaaacgtcatgtggatcagcctattgattatagtttaaaatatgccacagatattccttcatcacagaaacagtcattttcattctcaaagagttcatctggacaaagcagtaaaaccgaacatatgtcttcaagcagtgagaatacgtccacaccttcatctaatgccaagaggcagaatcagctccatccaagttctgcacagagtagaagtggtcagcctcaaaaggctgccacttgcaaagtttcttctattaaccaagaaacaatacagacttattgtgtagaagatactccaatatgtttttcaagatgtagttcattatcatctttgtcatcagctgaagatgaaataggatgtaatcagacgacacaggaagcagattctgctaataccctgcaaatagcagaaataaaagaaaagattggaactaggtcagctgaagatcctgtgagcgaagttccagcagtgtcacagcaccctagaaccaaatccagcagactgcagggttctagtttatcttcagaatcagccaggcacaaagctgttgaattttcttcaggagcgaaatctccctccaaaagtggtgctcagacacccaaaagtccacctgaacactatgttcaggagaccccactcatgtttagcagatgtacttctgtcagttcacttgatagttttgagagtcgttcgattgccagctccgttcagagtgaaccatgcagtggaatggtaagtggcattataagccccagtgatcttccagatagccctggacaaaccatgccaccaagcagaagtaaaacacctccaccacctcctcaaacagctcaaaccaagcgagaagtacctaaaaataaagcacctactgctgaaaagagagagagtggacctaagcaagctgcagtaaatgctgcagttcagagggtccaggttcttccagatgctgatactttattacattttgccacggaaagtactccagatggattttcttgttcatccagcctgagtgctctgagcctcgatgagccatttatacagaaagatgtggaattaagaataatgcctccagttcaggaaaatgacaatgggaatgaaacagaatcagagcagcctaaagaatcaaatgaaaaccaagagaaagaggcagaaaaaactattgattctgaaaaggacctattagatgattcagatgatgatgatattgaaatactagaagaatgtattatttctgccatgccaacaaagtcatcacgtaaagcaaaaaagccagcccagactgcttcaaaattacctccacctgtggcaaggaaaccaagtcagctgcctgtgtacaaacttctaccatcacaaaacaggttgcaaccccaaaagcatgttagttttacaccgggggatgatatgccacgggtgtattgtgttgaagggacacctataaacttttccacagctacatctctaagtgatctaacaatcgaatcccctccaaatgagttagctgctggagaaggagttagaggaggggcacagtcaggtgaatttgaaaaacgagataccattcctacagaaggcagaagtacagatgaggctcaaggaggaaaaacctcatctgtaaccatacctgaattggatgacaataaagcagaggaaggtgatattcttgcagaatgcattaattctgctatgcccaaagggaaaagtcacaagcctttccgtgtgaaaaagataatggaccaggtccagcaagcatctgcgtcttcttctgcacccaacaaaaatcagttagatggtaagaaaaagaaaccaacttcaccagtaaaacctataccacaaaatactgaatataggacacgtgtaagaaaaaatgcagactcaaaaaataatttaaatgctgagagagttttctcagacaacaaagattcaaagaaacagaatttgaaaaataattccaaggtcttcaatgataagctcccaaataatgaagatagagtcagaggaagttttgcttttgattcacctcatcattacacgcctattgaaggaactccttactgtttttcacgaaatgattctttgagttctctagattttgatgatgatgatgttgacctttccagggaaaaggctgaattaagaaaggcaaaagaaaataaggaatcagaggctaaagttaccagccacacagaactaacctccaaccaacaatcagctaataagacacaagctattgcaaagcagccaataaatcgaggtcagcctaaacccatacttcagaaacaatccacttttccccagtcatccaaagacataccagacagaggggcagcaactgatgaaaagttacagaattttgctattgaaaatactccggtttgcttttctcataattcctctctgagttctctcagtgacattgaccaagaaaacaacaataaagaaaatgaacctatcaaagagactgagccccctgactcacagggagaaccaagtaaacctcaagcatcaggctatgctcctaaatcatttcatgttgaagataccccagtttgtttctcaagaaacagttctctcagttctcttagtattgactctgaagatgacctgttgcaggaatgtataagctccgcaatgccaaaaaagaaaaagccttcaagactcaagggtgataatgaaaaacatagtcccagaaatatgggtggcatattaggtgaagatctgacacttgatttgaaagatatacagagaccagattcagaacatggtctatcccctgattcagaaaattttgattggaaagctattcaggaaggtgcaaattccatagtaagtagtttacatcaagctgctgctgctgcatgtttatctagacaagcttcgtctgattcagattccatcctttccctgaaatcaggaatctctctgggatcaccatttcatcttacacctgatcaagaagaaaaaccctttacaagtaataaaggcccacgaattctaaaaccaggggagaaaagtacattggaaactaaaaagatagaatctgaaagtaaaggaatcaaaggaggaaaaaaagtttataaaagtttgattactggaaaagttcgatctaattcagaaatttcaggccaaatgaaacagccccttcaagcaaacatgccttcaatctctcgaggcaggacaatgattcatattccaggagttcgaaatagctcctcaagtacaagtcctgtttctaaaaaaggcccaccccttaagactccagcctccaaaagccctagtgaaggtcaaacagccaccacttctcctagaggagccaagccatctgtgaaatcagaattaagccctgttgccaggcagacatcccaaataggtgggtcaagtaaagcaccttctagatcaggatctagagattcgaccccttcaagacctgcccagcaaccattaagtagacctatacagtctcctggccgaaactcaatttcccctggtagaaatggaataagtcctcctaacaaattatctcaacttccaaggacatcatcccctagtactgcttcaactaagtcctcaggttctggaaaaatgtcatatacatctccaggtagacagatgagccaacagaaccttaccaaacaaacaggtttatccaagaatgccagtagtattccaagaagtgagtctgcctccaaaggactaaatcagatgaataatggtaatggagccaataaaaaggtagaactttctagaatgtcttcaactaaatcaagtggaagtgaatctgatagatcagaaagacctgtattagtacgccagtcaactttcatcaaagaagctccaagcccaaccttaagaagaaaattggaggaatctgcttcatttgaatctctttctccatcatctagaccagcttctcccactaggtcccaggcacaaactccagttttaagtccttcccttcctgatatgtctctatccacacattcgtctgttcaggctggtggatggcgaaaactcccacctaatctcagtcccactatagagtataatgatggaagaccagcaaagcgccatgatattgcacggtctcattctgaaagtccttctagacttccaatcaataggtcaggaacctggaaacgtgagcacagcaaacattcatcatcccttcctcgagtaagcacttggagaagaactggaagttcatcttcaattctttctgcttcatcagaatccagtgaaaaagcaaaaagtgaggatgaaaaacatgtgaactctatttcaggaaccaaacaaagtaaagaaaaccaagtatccgcaaaaggaacatggagaaaaataaaagaaaatgaattttctcccacaaatagtacttctcagaccgtttcctcaggtgctacaaatggtgctgaatcaaagactctaatttatcaaatggcacctgctgtttctaaaacagaggatgtttgggtgagaattgaggactgtcccattaacaatcctagatctggaagatctcccacaggtaatactcccccggtgattgacagtgtttcagaaaaggcaaatccaaacattaaagattcaaaagataatcaggcaaaacaaaatgtgggtaatggcagtgttcccatgcgtaccgtgggtttggaaaatcgcctgaactcctttattcaggtggatgcccctgaccaaaaaggaactgagataaaaccaggacaaaataatcctgtccctgtatcagagactaatgaaagttctatagtggaacgtaccccattcagttctagcagctcaagcaaacacagttcacctagtgggactgttgctgccagagtgactccttttaattacaacccaagccctaggaaaagcagcgcagatagcacttcagctcggccatctcagatcccaactccagtgaataacaacacaaagaagcgagattccaaaactgacagcacagaatccagtggaacccaaagtcctaagcgccattctgggtcttaccttgtgacatctgtttaaaagagaggaagaatgaaactaagaaaattctatgttaattacaactgctatatagacattttgtttcaaatgaaactttaaaagactgaaaaattttgtaaataggtttgattcttgttagagggtttttgttctggaagccatatttgatagtatactttgtcttcactggtcttattttgggaggcactcttgatggttaggaaaaaaatagtaaagccaagtatgtttgtacagtatgttttacatgtatttaaagtagcatcccatcccaacttcctttaattattgcttgtcttaaaataatgaacactacagatagaaaatatgatatattgctgttatcaatcatttctagattataaactgactaaacttacatcagggaaaaattggtatttatgcaaaaaaaaatgtttttgtccttgtgagtccatctaacatcataattaatcatgtggctgtgaaattcacagtaatatggttcccgatgaacaagtttacccagcctgctttgctttactgcatgaatgaaactgatggttcaatttcagaagtaatgattaacagttatgtggtcacatgatgtgcatagagatagctacagtgtaataatttacactattttgtgctccaaacaaaacaaaaatctgtgtaactgtaaaacattgaatgaaactattttacctgaactagattttatctgaaagtaggtagaatttttgctatgctgtaatttgttgtatattctggtatttgaggtgagatggctgctcttttattaatgagacatgaattgtgtctcaacagaaactaaatgaacatttcagaataaattattgctgtatgtaaactgttactgaaattggtatttgtttgaagggtcttgtttcacatttgtattaataattgtttaaaatgcctcttttaaaagcttatataaatttttttcttcagcttctatgcattaagagtaaaattcctcttactgtaataaaaacaattgaagaagactgttgccacttaaccattccatgcgttggcacttatctattcctgaaatttcttttatgtgattagctcatcttgatttttaatatttttccacttaaacttttttttcttactccactggagctcagtaaaagtaaattcatgtaatagcaatgcaagcagcctagcacagactaagcattgagcataataggcccacataatttcctctttcttaatattatagaattctgtacttgaaattgattcttagacattgcagtctcttcgaggctttacagtgtaaactgtcttgccccttcatcttcttgttgcaactgggtctgacatgaacactttttatcaccctgtatgttagggcaagatctcagcagtgaagtataatcagcactttgccatgctcagaaaattcaaatcacatggaactttagaggtagatttaatacgattaagatattcagaagtatattttagaatccctgcctgttaaggaaactttatttgtggtag

SEQ ID NO: 116964 - DNA, 1176 bp, Homo sapiens
aggttgatttcagatgaaaatatccagttttttaatatacagtggaagtgatcaataattagcaaataagatatttgaggacaactttacagattaccagggtaatgaaaaggaagtaatcaaagataagccccataaggatcaaatagcactgtaagtacagtaaaatgtttcttgattaaaatatggatcatgttgccacaggttaattacatgaaagaatgaatctcttgcagaggatgggagccagttgcacaatatctgaatatatgttatcccagggtttcttggaatctaaggaaaaaagcagagcaccagaaatgcaaaaagtaaattgcccatagttaaaggaacatctgagtagtcagatcattaaaatttatgaaacaattatttttcacaagtcatggtggctgaaatagagtgtataatttttttcctttcaaataagcgtattttcctcatattacactgacttaaaatttaaaaattactttgtaatgttgaaacctatagactgtggctcctgtaaaccccaggtcattttcctgccattcttacaactctgtctaagatctataaaagtatattctgctttttgttaggccattcatgcttttttcaacctgtacattctatgtatataatattgttcttggtgctaaatacactttcttttatctgatattcaggataattctttctctacatttgtgactatccacttattttctcgaataattaaaaatattcaacataatgtatgttagtgaaggtgaccaatgaatataaagcagcattagtgaaaaataactattgaaaaaaatgccaaacattaacttccctacctacaccaccttttggaatccagacccttagcctcattcactggtcactgaactacgtacccagtctttctccctgaccttggctatttgtaccagagttgtatctgacctagaggagactcatcatcagctggtcagtgaccagagacttgtatagcactgcttggaaataaaaaaatgatcaggccaatcaatttgaaatagtaacaaaggacatttctggccgggtcttgagtgctggaactgaaagagcacgcacacagttaaggctcaaattactatgactggcatcatgaagcttaaactaagaggaagccacctagtggag

SEQ ID NO: 116965 - DNA, 1024 bp, Homo sapiens
tgttatctgttgagtgtagttgtccaggttcttggcgttttgaataaggaattgaacaaaacacacaaagcaaggcagcgaaagcagatttattttaaacaaaagtacactccacagggtgggagccggctccagcaagctacccaagagctgttggttacagaattttctagggtttaaataccctctagacgtttcccattgacctgtgccagtctgattggttgagggagggggatcaatcagaaagaggagtaggcccgcggccagtctgattagttgctcgaggggaccactccgaggtactttgatttttcaactgccacgcagaaaaaggaggggttgaaaagggagtacccatctgatatctaggcagcatgaattggcctttggttccctgccacccgacccttttctcctgcctcttactgctctagtgataccacttatgctattgtctatggcaggtttatttgtatctatcctgcttatttaaataataagaagaccatcgcagagggaaggcgaatccccataagtaaggtaagcaagatggctggcaccttgatcctcgagggaatggggggtgtcatcctggtcgggccacgtaatcttgttagagccgcagggggttctcttcactgcatttatttagggcttgagaacacagccaagaattggggtgcgttcctcagtgttggtgaaaccagaaaggcattaattcatagctgaagggatatttttttaacgtctcttaatgagcctttgtttgtaaaggagtgggggcagagtgtagagttcacatgtttttaaaacaaaggttatgacggtgtttcccttgatataggaaatcaaaattatgacattgtacgatacattaataatgttcagaatgtagttgagatttttttaagtgtgtgaagaagacatgcagaaagttcagccctgttgagttttattaaagtgtcatttgtattttgtaatatgacagatttaagacacctaggtttgatgcagtgaattc

SEQ ID NO: 116966 - DNA, 1051 bp, Homo sapiens
ttctattaatagtttgaggctattataaatagatgttttttagagaacatatttttgcttttttgtagaacgcatctgggaatggaattgcagggccatagagaatgcatatattcagctttagtagatactagcagttttctaaagtgtttgtatgtgtaattgtttaagcagtcaataatcattgagcacctactatgttgagagtaccatgctaggtgctggggaatacactggttaacaaaacaaagcccctgccctcagaagtttatgttctgttggaggggagatgggcacacagttacgcattagtgttattcctaggaatttttaaaattacaatagaagcatctgtacttaatgaaaaaggaaacctagggttttggtacttgtttgattatagtatttgaaattatttacccaacactatggcagtgtccacttaaagcacatatatttagtgtttatgtttttaactgttcaggctgttgaaaatcctacagctacagagattcaagatgtatgttcagcagttggacttaacgtatttcttgaggtatgacgtggttcttcactattttccatactcatctaattgatgtaataactttcttaagtcctgtttttcttttgtttcgtttatgttagaaaaataaaatgtactctagagaatggaatcgtgatgtccaatacagaggcagagtccgggtccagctcaaacaggaagatgggagcctctgccttgtacagttcccatcacgtaagcttgtttaaatgaatcagtggggctcagggataggtttctcctacacaacacaaaaaaggttctaaaactgaaaggtaaaagtcagaatttgcattctgaagattaatttaaagacaggactactgctcatggagagaagcagtagttctaatttctttgaggtgaatgacctctttgaaaatgtaatgagacccactaaacatttttcaaaaaaattgttgtgtgaacattttataaacctctggaagtctgtcattgctcccaggttaagaatataaaattatt

SEQ ID NO: 116967 - DNA, 1022 bp, Homo sapiens
aaaccctgtatttcagtgtcttaagatacagtgatattctgactctgtttctacctgaggtatatttggatacatactccttagatcttcaagctgattactaggaccaaaccaaaatttttgtttcatacttagtgttttgccttttgattttattcatttaaatattttcagcattattctcactctcagtacatttcccccgacttgagctagtcagtgtcttcagtcatttgatttttgattttttaaaaaagttattttccattttcttgatgtgatagtttcttacactttgtgatattcaatttgatgactttttatgtcttatttctcagattatacactaagcctaacttctggttcctaggtaagtcagtaatgttgtatgcagcagaaatgatacctaaactaaaaacaaggacacaaaaaacaggaggtgctgaccaaagtcttcaacaaggagagggaagtaaaaaagggaaaggaaagaaaaagaagtaacctagtatcagcatcaagtatgtggtactactgtaagagacatgaatggagacttctaatttgtatcggagggaaacagaagctttttgtttgcatcatttaactgaactgtgaacccttgtgcctctcatctttatcatcggagttgacagtgaaacaaatttacatcagaagtttgcatctcgcgtatatgccgtataaaagaatttttttgtctttcaatgcagttttttggaagaaaatatttttaaatggacaatggactgtacaataagttacttgaaataagttgtttcagataaatttcaattagatttaaaataaacattttgtccaccttttaagttaatgaaataaaatttgaaactgacttttgcagcttttgcttatatactaatgctaggagaggagggataattaagaataaaatatgtagtgaaagtttccatagtgtgaggctaaaactagaagaaactgtggtaggtccttttgtgggtgggggacaggggagtctgtaa

SEQ ID NO: 116968 - DNA, 1060 bp, Homo sapiens
tgatgacctagttgtcatcagattgataatatattgataagtgaaatcttacaggcaagcacacagatacaaatagaatttgaacactactcttaaggaatctctgcttctttcaatgcttaaaggagaatagagggcagacagtttcggtgacactgtcacaacaaggggctaggctagatgaccttcaagtattttgctcaagtatttaggatttgtgctctaagaggtaccttctccatttcctggaaaccctcttagcccagaccacaaaccccaacatgatcgcacctgaacatgagtcatccaagttttgttatctagtagctacattaggcacaaagcttgcaagcttgcattccaaagaaagagctttgatatatttttctttccctcctaacaaacaaacagcgaagaaagctaccgtgaatttactgggtgaagaaaagaagagcacctaaaccagactggatggaaacttcctgccctctctgtaccttcctactggagcttgatgttatattagggactgtggtataattattttaataatgttgccttggaaacatttttgagatattaaagattggaatgtgttgtaagtttctttgcttacttttactgtctatatatatagggagcactttaaacttaatgcagtgggcagtgtccacgtttttggaaaatgtattttgcctctgggtaggaaaagatgtatgttgctatcctgcaggaaatataaacttaaaataaaattatataccccacaggctgtgtactttactgggctctccctgcacgcattttctctgtagttacatttaggataatctttatggttctacttcctgtaatgtacaattttatataattctgaaatgtttttaatgtatttgtgcacatgtacatatggaaatgttactgtctgactacaacatgcatcatgctcatggggagggagcaggggaaggttgtatgtgtcatttataacttctgtacagtaagaccacctgccaaaagctggaggaaccattgtgctggtgtggtctactaaataata

SEQ ID NO: 116969 - DNA, 1088 bp, Homo sapiens
aacttaccaagataagcctaccaagcacaggcctcctagatattaggcttatctgtacagggctttatacatgcagataagtactatattttcttaaattgatttctaagagttatgattaataaaagcctcttacagctatatactaaaacgtggtccaagttaggaagatagttaagctcctggacctggtgtgttttaccttttgttttttagtctcagcttttccttaccagctcattactcatcatgttttttccatctaaagaaagcccacctttaacctgcagaaaacactggtaatgcctttggggaaaataacagaggcatctcccatccccagagtagtgaaagacagtgtgtattctcagaatgtgccccctccaccctcctgttacccatgctggctctttttctgtgcagtgtggcttcctgttgtggtgcatggccccgagcccttctaatggggctgaactgctctacaagcgcatcatccgtcctttcttcctgaagcacgagtcccagatggacagtgtggtcaaggaccttaaagacaaggccaaagagactgcagatgccatcactaaagaaggtaagactcaggaacaagatggccccacatgtgagaggagatgtgacacactgggctcaaataacaggcttcctggccttcttgtcttatcaccacccctcagccaaatgccaacattactctgggatttctttacaaagtctttgcctattgagaacacttacagttctcgacttttcccaagactcttcctccatgccacatttaatgtagccttcagtcagaacattaggaaaaatgactttccttggtaggcagcgattttagagaatcatctatattgatatgcaagtccatctcttctaattgtttatttaatttttttgtattatacttaattacataggtagttttaaataaatggagaaagcacctttcaaaagctatactagcaggaaaaattccatcaagcatttacgtagtaaatttctataattttacaaaaaattcttgatctttacttgaactgtacatgaggggaaaagagccccctcag

SEQ ID NO: 116970 - DNA, 2000 bp, Homo sapiens
tggccataagtaaatattttagaactctccttttagtacatgaaatgaaattcaaatttatgatatacttaattacaaaaaaagtctaactgcaatataaaggagaaacaaaatgaaagtaatttgtaatatatataagtatgcaaacaaaacaatactagaaaacataaaatattcataagtagaatcactgacagtggcagctatgaacaaaatcttccatatattcccataggttaagaatgtctgaggggtcaggcggtgctggcaagatggctgcacttgagaagatgacgtttcccaagaagatgacatttccagagaaaccaagccacaaaaagtacagggccgccctgaagaaggagaaacgaaagaaacgtcggcaggaacttgctcgactgagagactcaggactctcacaggaggaggaagaggacacttttattgaagaacaacaactagaagaagagaagctattggaaagagagagggaaagattacatgaggagtggttgctgagggagcagaaggcacaagaagaattcagaataaagaaggaaaaggaagaggcggctaaaaaatggctagaagaacaagagagaaagttaaaggaacaatggaaagaacagcagaggaaagagagagaagaggaggagcagaaacaacaggagaagaaagaaaaagaggaagctgtgcagaagatgctggatcaggctgaaaatgatttagaaaatagtaccacatggcaaaacccagaaccacccgtggatttcagagtaatggagaaggatcgagctaattgtcccttctacagtaaaacaggagcttgcagatttggagacagatgttcacgtaaacataatttcccaacatctagtcctacccttcttattaagagcatgtttacaacgtttggaatggagcagtgcaggagggatgactatgaccctgacgcaagcctggagtacagcgaggaagaaacctaccaacagttcctagatttctatgaggatgtgttgcccgagttcaagaacgtggggaaagtgattcagttcaaggtcagctgcaatttggaacctcacctgaggggcaatgtatatgttcagtaccagtcggaagaagaatgccaagcagccctttctctgtttaacggacgatggtatgcaggacgacagctgcaatgtgaattctgcccagtgacccggtggaaaatggcgatttgtggtttatttgaaatacaacaatgtccaagaggaaaacactgcaactttcttcatgtgttcagaaatcccaacaatgaattctgggaagctaatagagacatctacttgtcttcagatcagactggctcctcctttggcaagaactccgagaggagggagaagatgggccaccacgaccactactacagcaggcagcggggaaggagaaaccctagtccagaccacacctacaaaagaaatggggaatccgagagaaaaaagagtagtcatagggggaagaaatctcacaaacgcacatcaaagagtcgggagaggcacaattcaccaagcagaggaagaaataggcaccgcagctgggaccagggccgccggagccagagccgcaggagccaccgcagccggagccaaagttcctctaggtgccgaagtcgtgggaggaggaagtcgggtaatagagacagaactgttcagagtccccaatccaaataaactagttttgttcttaaaaaaaaaaaaaaaaaaaaaaagaatggaccaggccaggtatagtggctcacacctgtaatcccagcactttaggaggctgaggtgggtggatcacttgaggtcaggagtttgaggccagcctggccaacatggcaaaaccccatttctactaaaaatacaaaaattagccaggtgtggtggcaggcgtctgtaatccaagctacttgggaagctgaggcaggagaatcgcttgaatctggaaggcggaggttgcagtgagtcgacatcatg

SEQ ID NO: 116971 - DNA, 1028 bp, Homo sapiens
ccactagtccaaaaattctattttttgagacacagtctcgctctgtcacccaggctggagtgaagtggcatgatgtcgactcactgcaacctccgccttccagattcaagcgattctcctgcctcagcttcccaagtagcttggattacagacgcctgccaccacacctggctaatttttgtatttttagtagaaatggggttttgccatgttggccaggctggcctcaaactcctgacctcaagtgatccacccacctcagcctcctaaagtgctgggattacaggtgtgagccactatacctggcctggtccattctttttttttttttttttttttttaagaacaaaactagtttatttggattggggactctgaacagttctgtctctattacccgacttcctcctcccacgacttcggcacctagaggaactttggctccggctgcggtggctcctgcggctctggctccggcggccctggtcccagctgcggtgcctatttcttcctctgcttggtgaattgtgcctctcccgactctttgatgtgcgtttgtgagatttcttccccctatgactactcttttttctctcggattccccatttcttttgtaggtgtggtctggactagggtttctccttccccgctgcctgctgtagtagtggtcgtggtggcccatcttctccctcctctcggagttcttgccaaaggaggagccagtctgatctgaagacaagtagatgtctctattagcttcccagaattcattgttgggatttctgaacacatgaagaaagttgcagtgttttcctcttggacattgttgtatttcaaataaaccacaaatcgccattttccaccgggtcactgggcagaattcacattgcagctgtcgtcctgcataccatcgtccgttaaacagagaaagggctgcttggcattcttcttccgactggtactgaacatatacattgcccctcaggtgaggttccaaattgcagctgaccttgaactgaatcacttt

SEQ ID NO: 116972 - DNA, 1050 bp, Homo sapiens
gtcaccttcattttaactattctccatacctcttgtaactcttatgctccctagccagagttattttttaaaatacaggttcatctatttagcaaaaatcaaatgccagtcacatgtgtggcactgtggtagcactttagatatggcaagaaataaggtagtcatactctctgtccttgttgaatgagcagtctacccaggcaagaaataggcaaagtagtgaccgtgtggtaagccctctaaagtaaataaacagttctggtagagaagacctgaggaatgagaaggggccagccaagagcagagccagggagagggagaagagtgtgtcaggccctgaggcagcacacagcttagctctgtgtgagcaaagagtggtgggggaggcaccagagaggtgcaggtgccagcaggtagggtcagtggtagaagtgtgcatttcattccagatggtggtagggagtttgcattttctgattgccttggatgggttttaaatagggggtgacatgatacgatttatattttaaggtcactttggctgctgtgacctctgtaaggagttcgcgatcttgccaaactattgccagtaatttacttccttcctttctcacctttcagcctttctcttgctgtttcctctccttgggccatcacaagaaggggagtagtgtcagtattgggtcaagagactgcaggatgcaaagatgaaattgggaaaagctcacttggcttcctagcttttctccctttggactccctttggaagtctgtgagtgaagctcaggtgcacctggctcctggtcagggtctgctgcacgttggagcatgtagatggttgaagacttgcccagtgctcactggggagcaaccagtaccttattgtatacccctcttcctactggttgttctttccgtgtgcataatttccctttgagctctttgagaacagggtctttcatctctgacttctagtttctagaatttttggccatcttatataggcaattcggaatctaattccagccttcctttcatcaagaactgttg

SEQ ID NO: 116973 - DNA, 1861 bp, Homo sapiens
tgcaggcgggagcaacaaggacgcctgcctcctttctgcctgctttttgcaatagtccgatttgagaaggggacccacgagagacacaaaatgcacgcccccacgccacatcctttttaccccgcaatgggttaagactgtcaacaggcaggccacctcgcagcgtccgcggagttgcaggcccgcccccgccagggtgtggcgctgtccccctggcgctgggcgggggaggaggggcgcgcggcggccgaggaggggcgcgcggcggccgggcggggcgagcggaggcgagtggaggacgcgtagacgcgccgcggtccccgcctgccgctgctccgccgcagtcgccgctccagtctatccggcactaggaacagccccgagcggcgagacggtccccgccatgtctgcggccatgagggagaggttcgaccggttcctgcacgagaagaactgcatgactgaccttctggccaagctcgaggccaaaaccggcgtgaacaggagcttcatcgctcttggtgggtggccgggggtcgccgccgctggtagggccacgggagccgccgctgccccagctgctggggaaggaagcagggagaggactcgggaaaggtggagtcggagacagacgggacaagcagcatattcagggatcaggctggcctcccggaaagcgtgggcatcggaggaccccgcgggggctgcccaggctgagggtcgcggggctggagggcagctgcggcgccgggcgctggcagctggaagggccagcgctgacgtatgtctgccccgcggcccggcgccctattcctgctgtcctgcgcggtgggcgcggacggcggggcccctgcgggcgggcgcgttgacggaggtacccggtcctacccgaccctccgtggagctccgcccggagagggcgcctctcgggtgggcgggggctgctactgcagcgtgtgcgggagtccgggcctctcgggacgctccccgctgagcgcagcttcccaggctggagcgctgcccagcaggccctgcgagagggcggaagcgggtgcctgggaccgtcccgggcgccgggggttgctgcgcaaagcgccggggccccctgcgggaggtaggagaggcacaatggtggggctgcctggtatccccagacttcaaggcatagcccagcggacgcgcaggcccagctttcgtgtggtttgtttttctcgctcctttaatcgagtcgagaggaaaactcctacaacaggcccagcctcgcggtgtgggcggcggctgtcccgcgtgaacggctctcatgctgcccgacccacttctctccttgtggtccccaggtgtcatcggactggtggccttgtacctggtgttcggttatggagcctctctcctctgcaacctgataggatttggctacccagcctacatctcgtaagtgacacaccctgcagccgtccccttcccttcctccattcctccccgcagggctgctgcagtagactgcacatccgcaattcccgggagaaaagtgaaagctcggcggggagggatgaggttggacataaggggtggggatagtattcaccattttggaaccttaacttaatccctatctcttgacgattagcccagaggtattttcattagattatcctggtgaccagtgtcccctctctttggcacactaacaggaaagcgctaccactctgtcgtcctccctttactggtgggaggatctcagaaggtacagggagctgagcacttctgtctagtaattattttaatgagtatttcaccatatatttatgcacctagagagtaaaaccctatcaattaggtcttccttaattcataattacgt

SEQ ID NO: 116974 - DNA, 1076 bp, Homo sapiens
tcaaaagtgttcttaattccaacttgcaattttgatattgagaagatcgaagccattcagattttttttctttttacttctaatttgtgccaaggacaaaagccattcagattcttaatgttttgtatatgacctttttttttccccagtctggatgcttctaatatcttccttccatccccagtgttgtgaaattttgcagtgtctatttttgatccactacactgtcattccatagactatacatacttggaaactcatatccttcagtgctgaaaggtctcgtaagtcaatcctactgtgagtctttatgtttctatactgccttgccaggcatggtagtacatgcctgaaattccagctactaaagccaaggagttcaaattcagcctggtcaacaatgtgagaccccgtctctatttttttaaaaaaataccccccatatcaattacattaattttgcttttcatttttcccagttctcctcagcccgctctgttgaaatgctgaaattttaactgtcagaggcaaccgtaatattgccttagggacttgtggggaaggggaggggaattattcagcgtagtgttttaactttcagaaccaagtagtctattttctctatgtaagaaatgtgtttgtcttacttgaagagaaacccagacttcatcagtttttgataacatcttggtttctgaaggaacttcaatctgtaattggcattcagaatgcccttggcatggcagtctgtgtgatggcatttaagacctgtgaaatccttgagcccaacttgattaatcaacactgataaccaccacctttatcctttaaagtctgctttatctgtattttaaaaaatgaaaaaccctcaagtgtaagagccagctccctatctactcacataaaggagaagcgtattaatgaataaacctcccaaatgtctcatcattaatataaaaaggcatccaaaaatcacctaccatctaaggaaaatgtgaagcatgacaagaaagttttttaactgacgctgaagaaaacataattgaggaaccagaagaaaacaggagtgagggttg

SEQ ID NO: 116975 - DNA, 1019 bp, Homo sapiens
tgaaagtttgaactgaggctgtgcaggtgaggctttttgggaagtcctagtatattaatgagcaacagaatattggtttcttttccaatatttcttggtaatattttgtatgtgaagattatgtaatagcaaacattttaaaattgtatgaatatatttacctgtattcttggaaatgttgccagacatgggaggaagcggaggttttcttgctcacttttgttgttagtgagctcttaagctgatctctgtacttgtgaacagagggtacacaggctcagaacaaactgtattaaaagtgagatacatgtggtgtctcctctctaagactcatcttccctatagtatttctctcaaatattaattgcttccttgaacagtactgctcttggtcccttttctcagttggtgggtcaggtatgaagcacttaaatagcttaagataaatcgttatagtttgtaaatgtaatttttgtatgtgttttgtttttgacagccgatttattttgcatattcccagcgaggaaagagacaatgcaatccgagtgtgttttcagattgaacttgcccattggttttacttggatttctacatgcagaacacaccaggattacctcagtgtgggataagagactttgctaaagctgatatcctttttattactataatgactgactttcttgttagcaatatattttagcacaaatttctttttgcttgccttttcagattttaaaactattagagaaaaacatacttgattgctaaaatttgtcaaacataaatagtagacacaatttagtaataatcatattaataatcataatcattaatactcataataatcatacagaggacgccctaaaatgtacactgattaaattttatttttttcccatgcatagctagcctgtttgtacaactttactcttgctgctgcatgtaaccagatgatcttttaatcagattactgcctttctgatttatttagaattttttttcttttttttttttaaga

SEQ ID NO: 116976 - DNA, 1049 bp, Homo sapiens
gaatagctacatggagaaggaatgtttaatgtggtacacttcattaagtaacttcatggttactctgtgccaggccttatgcagtgaagagagtagactcagtatcttcaagaagatgagaaaagacaggaaaggaaatgattacagtgcagtgtggtaggatgtgatacagaagcacagtgttcagtgggaacagaagagggatacccacttacgatttggaggctgtgagtttgattcccatcttggccactcgaaaatcttgggtaggttatttaaatcatcttagatgaggatcccagtttcttcctgacaaagttattaatagtgcctaattcaaagggtaagtttaagaaacacatatatttgtacatgtaagtcgtttacttggcacagtgatcaataaatgttaatgtaataaatgttaactattactccaaaaaaaaaaaaagatttgggagctaaatagaagccttctctgagatagtgatttatgtgaggaaaatcggaggaaatgaaaaaagttactgtattttagactaaatgggaaagataagagatgatgctacagagtaattcagaggctaaaacatgtaggggtcttgtaggccatatttctttaaaaaacagattaaaaaaacttattttgggaaaaaactttcggagatggccaaagaacatgacaactgccatcatacccttcatctgtattcattcattattaacgttttcctacatttgcttatttctccgtataggggtatttttcaagactgctgtgaaatagtgtgaacagtgaactgggggaaggcaagattggattctgagaatccagttaacatgctattttattaatttactagagagagaaaacctgtggtagtagaaatgaatagaagagatcaaatttgagagctatttaggaggtaagattggtgatgatttggatatctgaggagaagtagaagaaaggatggtacccaggtttctagtatgagcagttgaggatcccagtttcttcctgaaaaataaggttactaatagtgcct

SEQ ID NO: 116977 - DNA, 1404 bp, Homo sapiens
cttctgtttcttgctatcactttatatatgtaattctatttcttgttattacgctaatatatataactacctggcattatgaatttgactcacttaacgagaaatgttctaggtgtttacatggtccagaattagtttgtgttagggatccaggactgtgagtactaaaaacttgatttgtgtgtaggctacaaatgaaaaagttaacaatgactttttaagagaaaacaaatgtagaaaaaacaaaaacacagtctgcctcggcctcccaaagtgctggggttacaggtgtgagccatggtgcctggccaaaatgctacacttaaatgagggaagatttgaataatttcacatgaaatacactattgatttaaatgggtctctttctgtatataatttctcaagccatattaaaggagaaagtaacttccttgacactatttatactcttcagtcattgtccgtttttgctgcctcaaggtgaagatgtggaaaaagttttggatgaatggaaggaatataaaatgggagtaccaacatatggtgcaattattcttgatgagacacttgaaaatgtgagtgtaatgaaataaagatttttagtgaaatggtgatcgttaatctgttaacaaaatttgttattgatgtagtgtttctaaattgaggttttaaaatatacttagatttttagtgctaaaaggccaagctttgtatattttatccgcatgctatgtctgcagattttttacttgttgcagttacggtgtggtacaaaaaagtgtcgcttaattgttgaagactttttttttttaaatgggcagaatgctttcacactggtggtgatgtattcagactcactgaagatactttaagaaaatactctgtaaaattattggcgataacagttacctcaagtaaggagaaaaatgcctttgatttttagaaaggagcatggaaaaggagggcaagtttgatttttacttctgcttgttttgtaggtactactagttcaggggtacctagcaaaatcaggctggggatttccaaaaggaaaagtaaataaagaagaagctcctcatgattgtgctgctagagaggtaagttattccattttgatacacagtaaatttggctattagggtctgaatgtattttttttagccatatagacttacttctttggactgtcttaaccctttccagaacttgagtgcatgaagtaacttactttttttttttttaaatcactgttgattgttttatccacatctcttttcatttattcttatctgttcccattttttttaatggtccattttgtattatctcttgttcctttctttgatgatatttttcccacctttccctttagaattagatttcctattggtaaaacattttggc

SEQ ID NO: 116978 - DNA, 1051 bp, Homo sapiens
taaggatgattacattgaacttcgaatcaatgaccagcttgctcgtttgtacatcattccaggaattccaaaagacacaaaatttaacccaaaaactagaagagaaattcgggtatgtaacaagagtattttcaggttactggacagtatcccaaatgaataagtagggaaatccttttataagctccttgataaaaattaactaaatgaattattttcttctgtgtttcagaacattgagtggttctctattgagaaattgccttgtcatagaaatgatatgacccccaaatccaaacttggtttggcacctaacaaattttttatggccattccctttatcaggtgtgttcatatttcttgaaatgtaactttcatgattgggatagtcatcttctgtctgtagccatattttgaaagtgaattcttaatgtttctgcagaccattaagggactggctttctcgaagatttggcgattcctcagacagtgacaatggattttcctcaactggtagcacgccggctaaacccactgtggaaaaattgaggtaaagaaatacattcatggaatcctgattttctaatagtttttaaaagtggaataatagtattttgcttctaaaatttgcagaggatgtaagatttctttttatagatactctttgttactggtctcacagataatagaagatttttttaaagggtttctgatgagatgaaaaaggttaattggagttggaaaggagcttcaggcaccttttaaaatagtatactcaagaggataccaactttttagatagaacactaggaaaggaaaaaaaatcttgtgtcgtgtgttcttagtgttacttctctgttgtcatatcctacttttaagataattgagtttctaaagacgtttggatggaggatatgttgaggtttgttttcttgtaggggagaggaaggatgctaatgtagtttgttaaattggagatagaacagtgaagacttgggcttttaaaaaaatttcccagcaagggacagtggctcacgcctgtaattccagc

SEQ ID NO: 116979 - DNA, 1120 bp, Homo sapiens
ttctcagatcatctttcagctaggatgtggtctgtaactgacttgtgcagggtcaaaaaattagcagggcatggtggcgtgtgtctgtagtctcagcaacttgggaggctgaggtgagaggatggctcgagcctgagaggttgaggccacggtgagctgtgatcctgccactgcactccagcctggatgacagagggaaacccagtctcaaaaagcaggaaaatgtacattcgtttcatctaaatttagatttatagtctgcatattttttaagagtacactataatcacttatagggaggagatggcctggataatttttttaagtctaggatgaaaaaaaatagtagtgtattaattcattcaagaaatatttattgaataccaggcactcatctgggtgatgaggataaagcagtgcagattaaaatctctgctctcatagaacttacattccagtggggaagatagacagtaaataagaaaatatgtagtctataaatttaactattaaggtgttaaaagaactataagtgaacattttctgatttgattattttttaaatcttggtgtagtcgaaccaaattccgccacagtcagcagttatttcctgacggttctcctggtgaccagtgggtaaagcacaggcaaccactgcagcaaaagccatataataatcattctgaaatgtctgaccttttaaaaggaaaggtgagtgatacacaattacagtcttttcagaaatttagatcatttggctttgaaatttttctcaattggagaattacatcttaatagttacagagagctctgagttactgatcaaagcctgtatgttccttacttatgatttgaagcagggctgaggcttcttaatgtttacagttccggtgtaaatccagttaataataagaattagcatctgacttttgtgtatatgctgccaatgaaaggttcatttaaaaataagtcataaggaaaatattttccaaattaacacaagtgggatctattggcttttgttcaggaagaaaaagtaacagcgtattgtaaacttcgattttcattgttgtattcgagtgtataattacactgctattaatacttgttttcctttttt

SEQ ID NO: 116980 - DNA, 1022 bp, Homo sapiens
aactggctgaaacaaattcatttagataaaattacttgccttcagactgtgccgtttcttttatgaatgttaagccttagtgctatgcgtgaatattttaaatacgtaaataattgcataaggatttggggagagtagaaagaatccagtattgtaaaggctaggaaacctcactctcagatctatataaggggtgcactgactttagaaggggaacattttggggaggtaatcactgtggttcttcccatacacacgttagtaaatttgtatgccttttttccaattaaaaggaacatttttccctcttttggaggcagtgttcaactttttaaggtgatactaagtatgagttttattaaagatacttgcaatttctccttcctcggttatgaaaactaggtgtgttgtctgattcggaaagtaatcctggtgaatgtagaaagctctttgttaaatactgatttagtagatgatacttggaagtgcagtagacttttttcttaggtgctattttgaattgtatgaaatttcctgtgcagtagatactcatttattcaccatctaaatttaaggctttcatatagaaaagcctaagaaatgaaaaagcattatcatattctttttctgtaatactgtctgtgatttaagcaagataatgctattttgaaagagatgccttaaccctattatggaaagttactgttaactgtgaagaaaggaactatcattagaatttagtttgatacagtcccacttgtttatttttgtttttgttacctgtgcttttgcggtcatatccaaaaaaaagtcattgtgaagatgggcatcagagagcttttttccctgttttcttctaggaatgctacagtttcgggtcttacatttaagtctttcatccatttcaagttcatttttatgtctggtatatgataaggatccagttcttttgcatgtggatatccagttttcccagcaccatttattgaagggtctattatttctcctcattagagttagta

SEQ ID NO: 116981 - DNA, 9385 bp, Homo sapiens
acagaatgcacataaaataggtaaagcacatacaggaggtaaagttacgctcattttgaaagcaaaggaatgtcaagggtcttaatggctgagattaagattttgaatatgtggaaataataatagattgaaaatgcagttgaccaccagtttatggaaaggaaaatacatattttggtggttctgtttagggttagagtctgggaagataaatatatactcaaaactaattgttttgtaacaaaaggcaaagggcagtatttgatttcttactaaggttactgagcttatttattttgttttttctttaaacagatgctgtatatgacttgcctagctccagtgaagaccagttgctagaacatgctgagggacagcccgtggcatgtaatggacattgcaagttccccttttcatccagagcctttttgagtttcaagtttgaccataatgctataatgaaaatcttggacctttgatagcagcacatgtattgtaaatgtcccaggatcagagacctgttgaatttgagtgggtgtctcctcaagccttacctttctcaggtgttttaaagaaatgcagggaggcaatgtttctgaagacattttctgtttataagagagtagaaagaaacacgagtttgcactgtaaatgcagttataaccttttatacagatttaccttttcagtgttcagtacaagtttaagttgctttctttgagggcatttattctgtgtgactgtgggttttattttgtattctggttaagaaaataatgtattgagttactgtcaagtagccaagttaatgggaatgctccatctacctgttacagtgattgcaataatagtatattggagtttttcaaagaaacttaaagtaatgcccaattattaaatgaacacaagagctgagatgtcacattcgtcagcattacaggtgatctattttggtggcattttgtacttctctctgcttctaaccactgaggctctctaatcttcctctggagttttagtgaaaggatttattgagcagcttctggaatataatgtgcatgtccaaaatgaactcagcgcttcaaaaggacaaagtctgtagcctggaggggcttgagtggatgggagctgatgctgtgattttgagctgtggttacatgcagtcagtaaacctgtgagactgctggaggaaatgtagcagacagcatggaggctgggacccagcagctactttgggtcatgtctttactgtcctgcctccaaccctttagtctcgtagacttttgttcttgtggaaatttcttctgtattccagttgtgtaaatatgtatggaaaactgatattactaggttttacgttgcatctccagtattgatctttggaaactgatgttacattaggttccaattcgcaatagtagcagagactgacatgcttttattgacctgctaagcccctggatgatggagcgagaagggaaggggtatgcagtttacccaagtccaaataaagcatttcactaggttacacgttatgtatatgtgttacataacagtaacatacataactcactcctaggaatgtattttgcttcaggatttttaaattcaaataaggatggcagtgcccattttaaggaggatttcagctataactgaggacaatcaccagggcgttaagggggctttagtgttttggctgcatctgacctcattgaaggaatttcttgggagtcgggggtgtttgagtatatgtgtgtgtgtgtaactatcatgtgggttttaaaaatccttttttacagtggtatccacaaaatacttctctgcttataaatgttattgtagaaatctttattctgtgtaggtagcctatttaattgggttccactgaacctcatgggacttttaaaagaagggctatttaaggaattcacttggtagtactttgctttagcttttaaatggcttgattttaaaggagaaattctatttattaatgaaagtgtcacccttttggtgctaagcaggagaattcacaattaaagcagtgtgtatagaattatgatattcagaatcctgcatcttttaatgtgacaaatttttgaatcctgtgacttttgctttttaatgcattatatgattgtgtttggaagcttttactgttcttttcagaaatacggctgctttgcttgggtctcttcgagccatatttatagttggtcccagcattccagacttctggtaaattgttaaaggagtgaaaatgtagtttgcctggcagatgaataattttcactcatttattgtcttctggaaaccatttaacttttactgttttttatttttttggtatgtgtttttttttttctttttaagtgcatactttggccagtcttcctggtgcctgtagagttggatttttcagctctcaatactgaagcaaaagagattatagttaccagaagtatggcctctaatggtgttgagccttttcaagaaccaacaaattatctttgtgattacagtagtttaactatggttaaatgttactgctgttgcgctgctttatttaatgcactgtggaacaaaatataagggtactgttggggtgtgattatgataacttcaggcttttagctctcctcaaagtttgaggttaaaaaaatgttaaaagatgtgagttaaagtttatgtgtgtgatgtgacttaactatgcagaaaatatttaagttggatgtacttgttttaggtacatctactatacttattctctcaaacctgggtaatagtttctcagtgttcaggttaccttgagaaaggccatgcttagcgaactggatttctcctttgagaaattttagtatggtttgaggaaatcaagtgataaaggagtatgctgaatatgcaatcatttacttctactgagtgctgcattttaagatgctagatgagaagagtagttggttttgcttcattatgttttatgtctttgagagagatacaggtcttggaattcactttttaaatgttacgttccaaccttatatgttccaaggtgcagtgcactgtgaatcttttatttttaaaaaaatttgtaggtgcttttatgtataactttaatgatttataagatgctaaatgaattgtttttgtacctaaccattgtaatccaaaagataagggtgtggtttacatgcttttcaaaaatttttgttaagaagtagcaaatgaatggtttaggatttcaaatagtgataccctcctgagacatgagcatttggagaggcctgagaacctaatagaactcatatagtgtgagtgaaatttgattaaagatgttggaaaatgaagttggatttttgtattcatgtataaaggaaagtctcccagtgctgtcaaaggaattgtggttactacttgctgttctgagctttgaatatcgttatttttctattaaatatcaattagtaagtatagctaatgaagacatataatgaaagtaattttatgctgtaagattgaattggtacttttccttattaaggctttagtaatttgtatgtaatgtcaaataaaaggaattcaaatctgagtaaataacagcctcctactataggaattagattcttctataaaagtcaccatattgtatcctatagaaaagttaaggtctgagtgcatgtgtgcattaaaaacatttcactacctattctctcatggacttctcatcctttcttttttcatctccaacagttaaatggtaaggagagcaaagttaattataaaaattagacattttgccaagttagttttcttaccacaataccctcttggcttttttttttttttttttgagatggagtttcactcctgttgcccaggctggagtgcaatggtgcaatttcggctcaccgcaacctacgcctcccgggttcaagtgattctcctgcctcagcctcccaagtagctgggattacaggcatgcgccaccacgccctgctaattctgtctttttagtagagacggggtttctccatgttggtcagggtggtctctcttggctttttatctttatttttgtaccagtggaccttcctgctccctgagactgttttgattgacatcttttgtgtttctatattttccgaggcagtattttctttgtatgttaatcatagttatagtaaagtcagactcattaacttttcttcctagtaattttgacttggattattttctagcctgggggatggggttcatatgtgttgttgtaactttagattactaaacaaaacaaactgtttttttgtttgaaggtatcctttacatacctgtctgtaggtaagcaagtgttagtaaaaacaattttgtcaaacagtactcctgacagcttggtaaagtctaggtagagtttctgattttgtattatgtcctaagacttgaaagtgcatttgtctagttgccaaaagttctaaaaatgagatggtgggctttctcagcatctttttgcttcctagaattgagttgctcttgaagtctgtactcctgtgtcagaaagatggcagactgcaaatgggcagtacaggctttgccccatgctttcaaagtaggattctggattgcagtttcaaaaaaatatgatagattattgttatagaatcaaagtgtcctgaagggagaagaatagctatagttgctgggcaaagagtgtaagaaagaaactttagagcatttatcaatacttgagtgctttattatgttccaggctagaaatgtgatcattgcatggcctaagtgtagtcattcatatatatatgaatatctatatctatatctatacatatatatgtatcgccattatcgagtgttttctagccctggataaagttaatttttttgaagtttgattgccaagcaatccagtgaatctaaagtaatttttctcactttaaagaccagtgatgaggagtctggtccttcctgtactgatactgtagaactccagtcaaacttcagtgcactgctttcttacaggaagacaactcagaacacacagccataatctgctttggtgtcagtcacatcacagtggttatacatttgtcctgaatggtgattcattcctttccatctaacttccttgtgacaaatagcatttactattgaaatagtcttaaaatagggaaaagagtgaaagttactcttatgcatgggagtgggcttaaagggttgacttccaccagctgagtacaaacaagtgtaaagaaaaactatgataaagtatggaggtcttgagaattgttcataatgaaatctttaatctgggttatcagagtaatgaaatcaccaataaaaacattccatttatcttggatcttctgtggttagcagaggagtatggtctagctatgttagcagcttgaaggcacaacgtaaaaggaatgagctttcacaaggtgcttacgttagctgggtagtattggtcaaaggtactctgaagagtgaatgcagaaatcagttggctgtgtttgtaatcttgtcccacatggaccctaacctttagtagacttcagtcttttagtccagtagaagacaatggccctgaatatgtgttttctgctttttggtggaaggtttcctgcaggtggttgggtggtttttgggttattggctactgttcgttcagtgccatttgaagacctgttgtttcttaatcctttttcttggtgtgactggccaggaaaaagtccattgagtcctttttttctccctggtgtcttaccccttctgtagaataatccatattttaaaatttgtttcacatctttatagcaaacctgccacagacttgcaagcagtgattttatctttccttcctgagaaggtgatctcacttttgatgtttgggtcacctgtggacacctgtgctcttttgagtctcaaggcttatagctttcacattggcttgggaacaacagacttgtgtgtggttctagagtgaaatgggcagtgttctgctggtcctcagtctttgagaggtcttaggcaacatccttagtatagtggaatttctgaggtcaaatttaacatttaatatattctccttttagttcattgaatctgaggttctaaatctgtagcttcattttgagcacaagtctgcattgtcattttttaagagattggcaggcatatccttttgtgatacttaggaaaagactatggatggcagcaaatgaaagtaaaggttctcaactgtgaatgaaatttagaaagataattcttcagcagttggttgattagatgggttagtgcttttggaatatataacagtagacttgtattctttatgcactatacatatgatacgcactgacagaaaagcacagaagacatactgctaagagtttctttgtgcatttcactactgttctaggggactgctgtctctttggttccttttaggtttgtgttaggatgttgcacaagtaatcatttaatgttaaatgcaagtgtccaaagaaatgagtcttaaagttctttggtcatatttcactttagagttaggacaggagacagctaacctgacttccattttacaaatattagaaactttttcttcagtaacaaaaacagggaaggacaataaaaccatgaactattttgctttatgtctgtttttaaaaaataattgttttgaagtttgcttattagcttaataccttatagtacttttaaaaaatcatccttggtaattattgacttatcctagatccatgtacaattcagacttttatctgttagctttaataaaaatttaaaaccatctcatttcagaataaaataaacggaattacagttcatgcattagcatttttaagtgaagttctcttaataagattgccttttgtctaaccgaaatagggcatacagattagtttggatgggaaagtggtaagacttgactttttaatactgtgcctatttccaaaagaagacttgatgtggctttttacattatgctttaaagatgttaatggaggatacatagtcttaaaacaatttgtttgggagtaagttttagtcggaaaaaggtgaagatatttatgctgagttatgttaagcaaattattttgagaccttttgctggtagacaaaaactgaggaaatgtttcactaaatatattatggtcaatgaaaaaaccagactttagagtaaatgtgataaccaagtagatttgtgaactttatttctttagtaattatttttatcttatgtgaaatgattcaacctttaatttttgcctagattatagcaatgttttgttttaccttatagggcattttaatgcttggagaaagactataagtgaatctacttcaagggattctgttcatggtggtatacagttcttggtgctcttttggaaattgtcaaacatttactgatagcagaaaaggaaccccaaaacacctgtagtgttcaccttgttataagaacagaaacatttggaacaggtttcattctgtttctagatttatgttgttgtagttgaacagcaactgtttttttccctcagtgttaacgaaaggataaagactacctgtattgttgggtatgactatcaaaggatttccggtgattcatgtttgtgaattggagtttaaatgtttgcaggattactgtacttccaaagacccactagaatgtcagctgtactctgtactctccactgagaaaatgaacaaaatcctatgtcttaacagttatgctctaactttttgaaagctttttgatgtaaataataggttagaaactaaaagccttttaatcttacaaaatacaatttgaacgatggaaggttgttcagatactggctttctgtaaaaacatcattgtgttagattgtttgtaatgtactatcaataaaattggctgcttgggcggttttagttaccaccttagcctggttttctgctactgttatttatcatcgtaggttctgagttgctcattgtggttgctctttggaccaataaaaatggcaagtatgagatgaacatgataaaagtatgtttatataacaggaagaagctgggcgcggtgctcatacctgtaatcccagcactttgggaggctgagttgggtggatcacgaggtcaggagttcgagaccagcctgaccaacatggtgaaactaaaaattcaaaaattagctgggcgtggtggtgcgtgtctgtagtcccagctacttgggaggctgaggcaggagaatctcttgaccccgggaggcagaggtcgcagtgagctgagatcacaccactgcactccagcctgggtgaacagagcaagactctgtctggaaaaaacaaaaaacaaccaaaaaaaaaaaaaaaaaacccccaggaagaaatattgtcgagagtctctgcaaaaatgaaaatacctcaaacaattaagtttgttgctttaaagcaagattatagtgtagggcttgagatgtgaattcattagatatttaaaatccagcaattcttaagtttgtgctagaatcaggttttgcaataggaatacttaactttggatctcaagggggaaagaaatacattcttttccattagagacctcagctatatgatagtaacttttattttaaattctcaaaaggagagtgactaaggtgttatacttactgtcaaagttactttgcttccatagtgaaaacttgagaacattgtaatctttctctaacagatgtgttgcaaagctgcttgccatcttgttgtcctatatgacttccttgcatttccagtccttgattacattccattttaatgatctttctttaagaggggaaaagactctcttcaatagataacttcctatttatgccaaattttaaaaagccaactaaaaatgggctataaatgagggttctttggccattttgatctaataatagtcttacttctagacccctgctttgactagggctcttgatttcatgtaagcatcatggatttgatatttgcctgcatgtatatcacagttctacagaaggatagccttaccctttaaataacacagttaaggtacactgtggaattagaaatatttattcagaatataagaatgtttgtaaaatattataaatgtctctgtataaataaatggagtttttaaaaaacaattctatatcaaataacgcaaagtagctattttacagcagctaaaactaaaggcatctggaaacatttaaagaatacaagtggagaatctaaaaaattacaaggtatagtacagtgttaagtagcaattttaaaatgagactttcagtacaaacagtagaacaatactgacaaatgcaaacttagtcacatgtgct

SEQ ID NO: 116982 - DNA, 1050 bp, Homo sapiens
aagaaaactaacttggcaaaatgtctaatttttataattaactttgctctccttaccatttaactgttggagatgaaaaaagaaaggatgagaagtccatgagagaataggtagtgaaatgtttttaatgcacacatgcactcagaccttaacttttctataggatacaatatggtgacttttatagaagaatctaattcctatagtaggaggctgttatttactcagatttgaattccttttatttgacattacatacaaattactaaagccttaataaggaaaagtaccaattcaatcttacagcataaaattactttcattatatgtcttcattagctatacttactaattgatatttaatagaaaaataacgatattcaaagctcagaacagcaagtagtaaccacaattcctttgacagcactgggagactttcctttatacatgaatacaaaaatccaacttcattttccaacatctttaatcaaatttcactcacactatatgagttctattaggttctcaggcctctccaaatgctcatgtctcaggagggtatcactatttgaaatcctaaaccattcatttgctacttcttaacaaaaatttttgaaaagcatgtaaaccacacccttatcttttggattacaatggttaggtacaaaaacaattcatttagcatcttataaatcattaaagttatacataaaagcacctacaaatttttttaaaaataaaagattcacagtgcactgcaccttggaacatataaggttggaacgtaacatttaaaaagtgaattccaagacctgtatctctctcaaagacataaaacataatgaagcaaaaccaactactcttctcatctagcatcttaaaatgcagcactcagtagaagtaaatgattgcatattcagcatactcctttatcacttgatttcctcaaaccatactaaaatttctcaaaggagaaatccagttcgctaagcatggcctttctcaaggtaacctgaacactgagaaactattacccaggtttgagagaat

SEQ ID NO: 116983 - DNA, 1068 bp, Homo sapiens
tcaggactcttctctataaaaaacggaggacctcagagagcttttgttcctgtaagttgtatttattgatacttctcatgttagaactaaaaccaagataaattatttaaagtttttattatttcatttacaaaaaaaaaaatggcatttttatgaaaaactattttccaagaaataattagaaaagtggcactggtcttacaattctgcaaatctttaatgtctggcttaatagaagacagctaggttctcacatttgcttctgtagtcaacattatgtggatgtatattgagaacacctggcatcatccagctctatagttggaaataaaagctcaagacctcacagacctcctgaatgggttttacaaatctctggggtgagtcctcagactatctgggagaactgcagctgtaagggtaatgactgtacatggaatggacctacctgggctcactgtataccctaccaccaggctctggtgggaacagttcaaaggcctgtatattccatgtttggctttgcagcattggcttatggcctaatttaatattccgagtcccaccagcccaaagcataaagggaaggtggaacaagaacaacctctctgctctcgtcccaggtatggtcactttgattgcagtgccttaggagtactctcctgtaagatacacttgactatgttgcaagcaaccatggagcaacaaatagacccactatttgtatttatccgttttggactgggccaatttggattgctggtttgactcttagaaccccttctaatatgtgagagtgaccagcctctagcaatccggctggattcatcagggttaagccagtaggtgactggccgttgagtgttgacatcctggtgctgtccctcctctgaccactagatttcagattcttaccgaagaggatgagtgatctttcttcagagcagtgctcactagatctggttatccagtggacaggatggtgtcacgatgctacttaggatgaatcttaataccaatttcccttcattcccacctagcaacctggtggctgcctatgagaaagca

SEQ ID NO: 116984 - DNA, 1042 bp, Homo sapiens
ctggaaaacgcagtgcttatgcaggagctcatggccatgaaggtatgtggtgggtgggtcccatgtgctaggctgccaccaggaggaaatctaaacaacctctgaaagcaggtccagcagataaggaggaatcaacccctcctgcccagagaagagctagacccttgtttatagacagagctggtttcactatgtctgggggtcacttgggctgcgtgtttctggacaggggagttgaatttctaagggatttctcagggtgtcccagcccaactttggagcccttcatcctctaagagaagccaggtcagacctctgcagggtggagcctctgtccatctaaattgacccctaatctcaagaatgcttggaaatatgtcttgggttgctgatgctgatgttaactccggcagggggagaacagggtgaggccagttgtagagtttggccgagagccctagtttcctgacaccctgtacctttggtgcaatgtcgagcctgctcagaccatagtgccctccagtgaaggtgtacagtgctgttgaggtcagtgtttcagtggatctgaaacactgggcccttcagctgctagtggagatacctacctgctggtatttctacagaagggagctttcttggaaagctggtgtcccctactgggaagtagttaaaccgccatacctacaacaagacatcactttgcctgtttctggtgtggaatgccaggcaccagcccttcacctggtacctgctcttacaaggcagctgtggtataaataagaccatatctgatatttgtccttggttttgggacagagtttgagaaacccttggagtttcttgctgagctaggggtgtctttgtgatgctgatgaggtgacttatggtgggccctagacagcttcagaatgtgggctggtcaccagaaggaccaggcgtgtgttggaggattgggactttcagccacctgacctccggggaggggaagagagccagagattgagtttaggaccggtcaggaactggagtctagcaagccaga

SEQ ID NO: 116985 - DNA, 1049 bp, Homo sapiens
cggtaaatggcccatccgtcagcagccctgtggtgaggcaagacaagccagggcctgcctgggccttccctgaaacggagcatgccgtggcatcaagcattttaaaactgattttctttaaatgaaataatgcatattaaagtatcttttaaaagatgggaatgcatttaaaaatgattgtattgaatatctaaatagctgacatcttggataactcttacactttaattagaagtctggaagcatgtgccttgagttttatatatactctgtatgtgtatatgttggtaattgcatgtctgtgtgtatgggtatgtgtagacacacacacacacacacacacacacacacacacacacacacacacacacataaatctaaacctccatttgctttcccaaacaaaaagtattgtccttaatccattaaaatctagggtctcttcaaagcacttcaaccattgctgtaaaaatactttggcctttcctgatctgtggagtttattgactgtttcaccactaaaggtacttggtttctctagaatggggaattcaatacctgctaaattggatcaatataaaaatttatgaacaattcagaccttgtcagagaacccttttattcatgttcatagaattctctgtgggagtttccgcctggggaatcacatcagtatttagcgtgcactgaaatattcatgtcccctgattagctggatttaattgttacatcttcatctcctccatgatgtgtcattaggatgcagcccccttgaaatttaagttggtgcagccagcttagtgcagtgtctttattttgtctgtgtttctttccaaaaacccttgtataaccacataattttcgtttcccttgaaaataaatattactacaagttaggattttttagtggaaaataataacttatttttaatagctactattgtcttacaatatttgtataggaaatttttacaaaatatataaaatattcttctgtttagatttttaatttttaaagatcacatcagttgaaggtaataacctttcct

SEQ ID NO: 116986 - DNA, 1053 bp, Homo sapiens
gagaaatggtgcccagtccagaaatcttctttacaccttaagtgaaggaatactttccaagtactgaatctccttgtgtagttttatcataaagggacatgggccaggagagagttgcgaagcactgtgccctcaaatggcaggattgttaaatccacattcaccattttatttgtgtttccccactcagttcctgtatgcatgatagagttggatctttttcattcccaagtgctaaattccacttaaattgatgttttcctctgaggattatttacctctctcttgtttagtggaatgaagaaactaatgcactaacatagtctaatcagatataaaaattatttggagattcctttggggaagtaatatggaatgtatgtgtgtttgataattggaatctaagttaacaaagaggctagtgtttttatttagagaaaaattcctctttgattcatttctcaagtgcattgaagtcagacttttgaagaacccagaatatgaagtgaaaaaggatgaggagagttttgtggtgttctctcaattgattttttaaaaagcccatttttattgtggagcagtttaaagttttatatggcacctttcacctcgggcagctttaggaacagaatcagctcactcaaacaattccagaaaatctgctgggcacagcctaggaaaagcagaacttacaaggaacattttaggagcatcactggtaatcgcatgctcttggaagtttgccagaagactgaggttaccacctgaatttctggcagcgaactcaagaatcctaattggatcaagccttggttttatctcctttcataagatatttttgtctctttcatctacctttggactgaattgctagaacccaagagttcataatttaacaaggaacctgccactgcttttagtagcttgtgttctatttgtcatctgcatatctggggcctgtgaagaagtatagtattatgcacaaggctgggtggagcactgagtttccttgaggaaatgggcaggaagaagagtcctgttttaactctagtt

SEQ ID NO: 116987 - DNA, 1063 bp, Homo sapiens
ggtttatcaaattctctgctagtaagccatcttttataactaaatctaaatgtctctcttttctaccaagagtttattcttttttgttccccatcttcccctcgggaaatatttttggcagggaccttatctcaaaagcctttataacaagatctttttctgaaacctctgaagtaatactgttctccttggcctcagtgtcatgagaagcccagacttccatacactttctgatcccattagatgttgattacattgttggcccctactcctggtgacttttttcctttcaaagtggcagttgctgtgattgaatgggttttaaattgtcacagtatgagttctttatggctaggattcctttggattttccatcatttgtggggaagggatgaaaaacggagaaaataaaagtatgaggctttgtcagacatttattactgaaactgagaagctgaaactgagaagccttatattctctaggaaggttacagggtggtagcacagtttcaaaattaatcaccaggagttttgtttctcacagtggattccaaacctgctattatcctggtggcatacctcttcttggccttatgtccttggttgcttcaaggacataaggcttggttgtggcaaggactaaattctactttgcttacctttttccctgaccagttaggttgtttatggcttgtggagatatttaaaatatttcattgggttaaaaaaaaacagatgacttggagaacacaagagagaggacataagatatttctttggtttgtccctcaaggttgggttgaaccttagtgggaaaaaagtattacttttttttttttttttttgagatggagtttctctcgttgcctaggctggaatgcagtggtgcgatcttggcttactgcaacttctgcctccctggttcaagccgttctcctgcctcggcctcctggtgaatagctgggattacaggcacatgccaccacgcccggctaattttatttttagcagagacggggtttcatcatattggtcgggctggtctcaaactcctgacctcagg

SEQ ID NO: 116988 - DNA, 1005 bp, Homo sapiens
ttcctggatttactcttaaattgtcctaccaaacttttttgttttcctccttccactcacccagttttctggggatttcatcattcttttatcatttcatcctttctaatgaatttttaacttcaatatgcaatcttttctatatggatgtttttgttttatatatgtattttgtgttttctaatatctttgaccacactcagatgtttttccccctaaaattctcttctgctttagctccatgagttatgatctctgtcttctctgggatcggtttcattttttccgtatttatcttttttccccagctttcttcatatgtagtcatccttgcttacctatccatatggatgcctgaaggatgtgtagcagctgacttagcttccctcctccttgtgctcatctgctgcccctgttggccttttctttcactaggagtatgggttgtgagctctgaaattgagggcatagtatgtcaaagagcaggtttcactttagggtgtgtcaaggtgaagcaagcaggatggggagaggttcccacaatgccagaggagagatccccaccagggtctgcaagtccctcctggcagatcacttgctccctttggagagtaggtagatgtttgacttcagactaggggccaaccgtgccaccaccctgataggctggtgaaaaggaggccatgctaagctaccatcctgcaggcagttttgcagatgtaccctcctttcagtttctgtacgtctaatctcagatgctgccaacttccacctccattcttgccttccacctgcatgtgtcccaagctctgctgtggtttacttctcagtatgctctcatctgacctatacgaatctttagtccatttatgtgccccagtgggttggggtagggagatgtcttgcttcttaatctagaagccctggggtattacatattttaaaattacatttttgagaaattaattctcacataataaaaattcaagaagtacagaagggcat

SEQ ID NO: 116989 - DNA, 1010 bp, Homo sapiens
aggaaggagaaaaagagagtcatgataaagtgccatatgttaacttcctgtcattcttcttgcttcctttttcctcagttgggagaaagaatgaccagtgctaaggctaatgtagtagccctgtgcaaatcacagatgtgactctgatctggattccctttacttggctctccagtgctttttttgctaagcatttctgtttagggagcacatattcatgggacagttgtttttgaatgctttgcctgaaattgcttttatctccaggctccccatgtgtcagtttgaaagagaaagcgcttagcatgcagcctgggcatcacatgtgttctgagatgctggcacatggaaggcttaggaggttccaaatcattgcctattggccacccacaggctaatgaaggaaatgtcttttcattttctctgcttctctcggacttaggtgccttatcagcagccagggagagctgggaatacgactctggtgccagggacctccagagcccggatgtgcagagccagtcagccctccagaagctgctcgagtatggcggaagctctttgcatcagcaggctgctctccacaaactgctcacacagtccccgcacattggcaactctgtaggaggaagctatctagagctggccaacacagtgagtactttttggttcatggaatacatatttcggcctgtctgtattccaatacaaatattttaattttgtgctccaggggacatatcgggtattgtcttctttattgcggtaaatattgtaccatttccagcattgccagtaatgtttagtgttccaaagttgccagcacttagggacttcactctcatggagaccagagtagactcctaaaaggtgttttgattaaggctgtaacttgcacaggtttaattactagaagatgcacaacagctcttccataactagactacttctatggttctagacattacaaattaataggatatacttgcttctgtttcctaatttggact

SEQ ID NO: 116990 - DNA, 1053 bp, Homo sapiens
tactgatgtgaaaactcacagaagaagatgtattaatccaaatattagttgaataaaagagcaaagtcacatccaaacagagagctgctggacctcttcctgagagaaatccccaccgaaaaggtgcctcagatgatgtgtcacatgcctcaggcttcaccctttttcttgtgtccacaaattgtcaaaatttcccatggaaagaggattcccttcatgtatgatattccccaaagctacccatgacagtcatgaaaagctggaaatgacttcagctgcaaacacttgggaggttttgggttttttatagtttaggtattaacactttatatgtttaggtataaacatctgttttcatacaagggactcttcttaggcaacctctttacttcatgttgcttcagtttattttccctttttctcagctttcactgaatgtcatgtggatgaagcaagtttccagcttgattccttgccctaggatgtttacttgtcctttctttaagtatctattaaatatctatctaaatatccacagaatacaactaaggtgtgcacatatgtatgcatgcctgtgtgtgtgtgtgtgtgtgtgtgtgtgtgtgttttccatagcgattctaggactcctttttgcaagggatatctgttatctagttttatttgaagcatttgtctgccctttgacttttaagtcagtgatcacattggagagctaaaggtagaatgggcgagcagcgacagaggtttctgaggtggcacatgaatatggctccttctggtcctgtaggtccttccatcaggattgccactccaccaccagtcagggaataacagtgttcagaggcaaaataagattctgtgaacacagaattctggctttttcttttttttgagatggagtctcactctgttgcccaagctggagtgcagtggtgggatctcggctcactgcaagctctacctcctgggttcatgccattgtcctgtctcagcctctcgagtagctgggactacaggcacccacaaccacgcccggccaatttttttgta

SEQ ID NO: 116991 - DNA, 1037 bp, Homo sapiens
ttattattgtctattggaatagatcagcagaatatagaaaatatgtggtcctagatatcaaagaactttcactttaaatataggcacacaaacatattttgagctacatgaatataaaacatttcatacctcttctttattcctatctgtttagttaaatgtggatgttggctaaaatacgccattaggaaatttgttaacattaggacctttatatttaacacataattattctatttgatcacttaatcttacatgtatagcattaaacatatatgggatattttcttttttttgtaatatgttttcgtaatgtacgtgacagatcttataagtataatgtacattatttcctactacaaaaatttaattttccatgaaattattgatagaaatttataacaagcctaaaaatcatctagattatcaagattgttttatttttaatggttattgaatgatttatttttatcaatttttaaacattatgtaccagaaatatgtctgaggttcactttctaattgatattgaaattttgtaacatgttcaatgagaatattatgtgtaagagtacaattgagatattgcttgacaactttatgtagactgagtagagaagaaaacatttgaaaggaattatgttagaaattatgtcttttggcatgtttttctaggtttggcaaaaaaaattacttatttttaacacttctttttccgtgttgatcatacattttttgttcttttattcattttcaaagaaaaccgggaaatgagcaagacaagtgggcgactcaacaatggcatacctcagattccagtgaaaagaggagaatccgaatttgattcttttaggcagtctttaccagtgtttgagaaacaggaagaaattgttaaaataattaaggaaaataaagtagttttgattgtaggagaaactgggtctggaaagaccacacaggtttgtttcttttttgttgtttatagaaaaaaaaaaaaaaaatatatatatatatatatatatagtcccatattataa

SEQ ID NO: 116992 - DNA, 1094 bp, Homo sapiens
taactccttgtaataatcttgggtgatcagggacatcagatctgtacatatgctaatcgaaagctcatttttcattttacatgcctaaaaccaaaccccatttcccaccagcaaacctgttcttttcaggtttctttgttacctcagagaatgacattatcattcagatttgcaagccagacatcaaaggactatatttgacactttattttttttccatatccaatataatgctgagttctacggattttacctcccgcctagctctagaatttgtctgcttcttttttggttttcactattattaatctcattcaggttaacctgaactattgcagtagctgctacttggcttgacgtagcattctgctgtctttaaatccattctccatattgcagtcagagtggtcttctttgaagtagaattctgatgatgtcaagcactttactgagcttaaatctttgaatgacttttacctcaggataaagacataaacccttagtaagacttatcttttcctcttacctcatcttgaacgatatccctctccattcccacactcccaccatttttcaagtaagttagccttttagttccttgaaacacctttaggtccttgaaactcctttctagcacagggactttgcacatgctgtttttcatcatcattatacactttttattcttttcatatggctttgttattttgtttatcttcttgtttctcattttcttagtgaggatactttcttgatgttgtcaaatcccccgttacatactgtcatggtgtcttgtacttgtatctcaggactcttcacaactctatatttaccttcatattctggatttttggattgatttctgtctcttccactagcttgcctccagggaacaggaaatagctctgtttcctcttacaatttctacttataatacaaatgatattgatgccagacacatgataagtaggtagtaaacactagaggaaaaaacccaagcacacaaacagttgtctaatagttgtttgtaagtcaaagttatagttaaaggacaatattataagagtcacttgaactatgaaattgcttttgga

SEQ ID NO: 116993 - DNA, 1012 bp, Homo sapiens
ctgaacaaagatttgtgttctgttcctttttgatagcacactttttattgcatgaatgcaatatcttttattatagttttgtattctaagttttctctttgataactaactctttttttactgcttcactcaaaggccactgaacaagcctctaaggagtttcaaagctaaaatgagtgtttctcattggcactgtgagttttcttagttctgctaagtcaatcaatcagctatctatcatcccaaaattaacatcttctatcagttgccctgtcctcttccattctctttgactttggtttacaccttttaaatttctttatattgcttcattgtcattttagtgaggttttgagaaatgtaaaaggtttgagaaaatgcagagatacttatgttgtacctaccatgtttaattggaaatccctctactgatttcttaaaataagacaaatattataccatggtagatcagacagaaaatttccttagaatcacaaaaaaaaatctctggataaaagactataaatggtctacatttgaatagcccataatttatatggtgaagctcttttttaagagacggtagaattaatttaaaatagtacaaagttttacctgtaagattctagaagatccacaatttcagtctgcccaaagtgtttagcccaatccaatgccatcctgccaaaattcaaaggatatataagatgtcatcaaaattgtaaaactagttcatgatgagcctgggcaacatcaagaccctgtcttttcaaaaaaatttttaaataaaaaataagataaattatagttaaaaaacaagtcattcaaaattattaacccattaaaacagaaattcaccagcaattattacacaatagtttttaatataaagacaaacataagaaaacaaaaaaagatatgtgtagctatacaaagatatatgaagaatcaacgtagtttaaaattaccagccatttgatgctttactatggacattggctcccatactgat

SEQ ID NO: 116994 - DNA, 1548 bp, Homo sapiens
tgtgatatgtggtttttgtgattggcttttttcagttagcataaaatatccatgttgtagcactatttttatgactaatacatattctatggatataccaaggtttgtttgtatatttgtcaattgatgaacacttaggttgtttccactttctgactatgaataatactggtatgaatatttgtgtacagatttttatgtggatatatttttttcatttctcttatatatacacctaggagtggaattgctggggcatatggtaactctatgtttaaccttttgaagaactgccacattgttttccaaagcagctttaccattttacatttccaccagcaatgcatgagggtttaaatttctccacaccctctccaacacttgttattgtctgtctttttgattgtagtcatcctagttggtgtgaagtggtatttcattgtggttttgatttgcatttccctgatagctaatgatgttgaacatcttttcatgtgcttataggccatttgtatatttactttggagaaatgccttcagattgtgcttttctaaaagcattcattgccaaattttactttgaataatgtgcttgaaatcaaaacatgaatcatattatagctaggacattaagtgtcacttaccttaccttccttagggaatattggaaatttgaaggacataaggattacttttgttaatggaaattgactttgtcttttttttttttttttttttcagtgctacactggaatttggaaatctagatgaaagttctctggttcaaacaaatggaagtgacctcagtgctgaagacagagagctcctgaaagcttatcatcatagtttcgatgatgaaaaagtagacttggatttgatcatgcatcttctatacaatatctgccatagttgtgatgctggtaaatacgtgttgtctaaaagaactggagcaaaatatatactttaagaattaatattttaagtgtacaaatttttatataattgcactgatagtagtaagtgaataatctcctgtcatcttatgatagtttaccagtacttgaaaacatgtgatacagatttttataattctgttgattgcctctgattcacaatgagatttaatattaaaaagtcattcttctccaaggtgcagtactaatttttctgcctggatatgacgaaattgttggactgagagatcgcatcctgtttgatgacaagcggtttgctgacagtacacataggtaagggctaaagccttatatctgttgcttaaaataacggacaggtcttatagtatgttttctctttcaattgtctgcagataccaagtctttatgcttcattcaaatatgcaaacatccgatcaaaagaaagtattaaaaaacccacctgcaggtgttcgaaaaatagtaagcttcataaaatcttctttttaacactttcattagttattttttctgtttttttattaactttaaagtaatatcttgttgcagattctttccaccaatattgctgaaaccagcatcacagtcaatgatg

SEQ ID NO: 116995 - DNA, 1030 bp, Homo sapiens
attatataattaattatttaaagtctgcttattcatattacagtgtaaactcaatgagaatggacacttccttctgtccccttctttttctccaatttgcacagggccttgcacttagaaagcacttaaatatttgctgagtagataaaatattctagaatgtagtaagtataaaggggggaaaagatttttttttttttggacagtgactatgaatgttatgtatacgaacagtgtgaggagatgttgccaatgggagcaatggcaatcttggtataagttgattgaagagggtatttattaaggttctggcatctagggcaaagtatgagctcatcttttacagaaagacattgttccttctactgttcattctaatcagagactctactagtctgtgtttgggaactgtagttcccatgatttctttaaatgtgtaggttagtattctttttaattttaaaaaattatttactgttttggtttataggaactttgcttacataccaagctgttagccccagttaattgtcccattgctgattttcttatgaaagctcctgaacctccaccagctttaattgtaagaaatgctgtacaaatgcttaaggttggtgtcttcatagttttattttacatgacatttttacttgaaattttaaactaaaaggaaatatgtcttaactaattttgtataattattttttatttttgtcctcctgcatgtgtccagataaactaattttgtacttttaaacaattatcttaaatgatcatgtactttaaataatattgtcatgtatgaaacagtagatatagttcttttatatagtataatagaaacgaaatatatttttatgagatgtagtagcaaaagaaaatctatattcttatttctcatttaggggtttttaattatgtgttttgattaaacagtttgctcacatcaaagtctgttctgtctccttttacttagacaatagatgcaatggatacatgggaagatctgactgaacttgggtatcatttg

SEQ ID NO: 116996 - DNA, 1053 bp, Homo sapiens
tatttatacatactgtatgttttagcctatatcaatttcatattttataatgcattctgtatttttataatctcattttcacctaattttgtagatagatttttgctttcttcttcctttattaaatttacagagggttatctattaatattttcaaagaactgggttatagttttaattaccattttgtctttctaattcatctttttataattttctattttcttctacttttctttgggttttatgttatttttcttagatatatttagctgtatactttttctttttaaaactgacctgtgactttataagagtattgctttgggcacctttcatagtttttgatatgtagtatagtcattccttccttgaattatgttatttgtttctttttcatccagttattaaagattgtgcttcaaattttatattcttgtcttttttattttgttgcattgtgatgagacattatagtcttcaaatggtcccttttttttccttttaaataaatactgagatttaacatgtgatcttttgagtttgaaggacttcccacacaaattgttgtatgtcaggagggtttgtgtatatgaagcgtatttattcttcttagttttttgccataacgtaagaaggtaaaagtgatttttttttcattatgtacttggacagtggatggcattcccaatgacagtagtgatagtgaaatggaggacaaaactacagctaatttggcagccttgaaacttgatgagtggctccatttcacactggagccagaggtaagttgctttcaagtagtgtaataaatttctttcattcagttagtgtgaattgatatataatatgataaaatttttttctttactattgagcccttagtatcagagaatataacttgtttttcagttttcttggggacctcattcattctcttctgtattggggtttattccaacagaggacttggaaaacctagttgtggctcattatttaagcaaggtaattgtcttagtttgttgttgctgctatagtaatttataaagaaca

SEQ ID NO: 116997 - DNA, 1430 bp, Homo sapiens
cccaaattctttgtcactagttactgtaacattaatctttcttaattctttctctgtagtcagtccttcttagttgtttcacagaccctgctgtgtgtgtttgtgccttaaattttaagttctctagcactttgtgtcttactcttatcttcttactccctctatacattccctggggactttatctctatgtgtatattttgcaatcatttaggaactggtgactttcaagtttagagctctgtcttagacctttctgtgaatccagctgccttcaggacatgatcatttggatgttctacaggcactaaaataacactatgagctacatatatttttatttaccctgctgctacttttccagtattaatcacactctgccacaactattgtttactgtctttcttattagactatttaatttgattttgtgtcttagtgcctaaaatattataaataaattttatttcattcatgcattaaaaataatgaaattagtagtaaattatatgaaatgtgaaataagtttgttggaaacagttgcaaactaatggaaactaatcaacacataggtgttttgcatatgtgatattcatttgcttgtatctatttgaactattacaggcagctagtttattgctgcagctcagacagaagtggcatagcttatttttacgccgaatgagagctccatctaaaccttggtctcaagttgatgaagctaccataagagcaattatagctgttttaagcactgaagaacagtctgcaggtttacaacaaccatctgggattggccaaaggccaaggcctatgtcttcagaagagcttcctttggcctcatcttggaggtcaaataatagtaggaaaagttcagcagatactgaattttctgatgagtgtactactgcagaaaggtaaatttatgacattttaccaaaatgggtcactttttattcaggaaaatgaattatttatcttagaatcatgtgcttttataatatttaaaaattacttttttataatctaagatccatgaaaagatagcaataaagtggaaagagttttctacttgttcaacttaattcttctaagtattaaggtaatatgaattttaaactattgatatctgtgagttatttaataaggcaactctttgtcaggaaaaggtcaaaatatctaatttctagaattgggtctctcaaaaatatatagacattttaaaattatgtattttacttgatatatgtgaagtaacattttacctagataccctgggccatactggctatggccatttaaaagaacaacctccttataagccttatctagatatcaatactgctgattagcattcctatagaaaagtacttcactcagtgacacattgaatgccagttcttggtgtgagggatctagaagtgtacaaa

SEQ ID NO: 116998 - DNA, 1048 bp, Homo sapiens
gtgttaaaaagcccattcgtaacacacaccccacctcagtttttgaaagtcagtgcattcagtggttataaataggcatgatgttcttccacagctaagagttctagaagaaaggggaaaaaaaaagataaataatctgaaaggttcctaatgatcacaaatactgccaatactcaaagtcaagatggtataacctgagtgtcaatcagttgtgtttttttctcccaagggaagacgttcccataactggagcaactgttcaccaaccagaggttctagttcctagataaatcagaagtcaaaataaacataaaaagaactggagtgaaaatttttaatgaccaaaacctacactgataaaaatgtaagaaaatcactttaaatttcattttcctaccagcgtatgctaaaatcatctggtatgaattgttctaattctttgctttaaggtttatggagttgacttccagatttaagattacagttaatctgcaaaatctctcaacttttgtgacaaaatggcaacagattcccatggagtcctggaactgtttctacctaaaaataatggattttgtttttcatagagattcagcaaaagcactcagctggaacttccaaaggtttactgtgaaacctagcatattcgatgttgggtttttttccaaggaactctcttaagcaactatatcttcttatcttgaaaattattaaaatattttttcttctaagatttctagctaacatatttcttcaaaatcattattatagaataaaaatgaaattattctcacacaattgaaaagaatcccacttcatagtactcctgtggaatgataacctatgataagcacttaagaagaacccaaacactttttacatggtgatttgaaacgagtcatactggttcagataaattattagctgtgtgaccttaggcaaaactaatctttgagtctattttctcctatataaaattggactaataatttaatcataagaaataaattatatcttctaaagcagctagcatagtatttggtcaata

SEQ ID NO: 116999 - DNA, 1026 bp, Homo sapiens
aacaagttcatacaagtttttaaaaattctcaactggtagcttgcttgctgtgcgtcttccaaactaaagcctgcaagcgccacaattctaagtgccgccttccattttttttcagtatgttttcactggcttatgttttcagatatgattttcctttttcgcatatatggtttaataaatgggggataattttttttttgtaaatccgtgcttgtgccaagtctcatatttctttgccatctcagaattatctttttaccaccactgtttataaaatttccttagagactttttgaagggaaaatagagcaacagggaaaaatgaaagaaatgtcttggttactgagctctaaatagacaggtttgatggcacttctcatgatacattttagttattcttataaaagcaaacaggcaaacatgagtgtaaattaaagacaaaaagaaaactctggttttatatttgagaacacgtgaaaaatcatgggtcaacataaaatcttgagaaccttctactttctctgggaaagcattatatagtggtgcattagtttagaaagtcagctatgattttgcctatagttctagttattagctttggggttttcttgtactttaagacatacctgtaaattgaacctatttgaattatattccactgtatgtgtattatggctcttttcctattagagcaacttgtgtttccctgataatgtgtacattttttaggcatgtacttaatagttcacaatgttctaaatttggaaggacttaaaaaaaaaacttgtttaaatttccatctgttttgtaatatctagctctatatgtaaatgatgggtttgttggtatttaaaatgaatacaacttgaatgtaattaaagtgctgttttttggaagcgataaactttaaatatacttattaaaatgaaattctattaagtttttcagatcttatttcttatactttataataagactaagttaacaatgatcaacaatatcccctgagataataatgaatttca

SEQ ID NO: 117000 - DNA, 1050 bp, Homo sapiens
cttagtagagaaaaaggtatgaataaatatacattagggatctaccatacttgagtgcccactctgtgctggacactattaggcagataatactgtttatatttgtatagcattcatacctttccaagcactctcatttgacacttctaattgtcttctaagatagataaatactattttcacttttcaaacatggaaattagaagtcagaaaagttaagtgatttgctattttcacatctagtgttggaggctggcctcaaatgcaggtattgtaaccttaaatctaaagctatttcttgatataacacattgtatcttgcaacaaggtaaatcctttattatatatctctacttttggtactccaatcaccttttattgcataaaatacaaaatgtgaatattttgtgttgatgccacatgaactttaaaacacagtttctttatcaatctgtttcagtattgtccatttgaattgacagtagttgatgtactaaacatgaagattcttgaggcctattacaaaactaatgacctattgatcagaccctgtgcctaggccaaggaagtatttttaacagccaccccatctgcatattaaagctcaagttccacttgattcaattatcacttcttagcttttcttaaacactctatatttcacattgtaaaactcttacacaaaaccttaccaggtagctactgtgaattatatattcccaaatacaccttgtccttttccagctcttcactagttttaactttgtcccaatccatttaaaaattctcttctgaaaggcatgctcaaatgcagctctaccatgaagacctcaatgattatcctcctcttaaataccttaacccttgtctataacaattgtactataaaagtgaaaattgttacaattttaaataaaattgttactcacaactttaaataaaattattactcaaaagaagctcctcctggacagcaagaaatgtacctgttatatcttagtatgtcactgtgatattaaatatttattataaataaaggacaatgtggcc

SEQ ID NO: 117001 - DNA, 1050 bp, Homo sapiens
cattctctgtgctaataccatgttttactttaataagacaagttccctgtctttaattaaatacttcaaaatagagctatttttgcctaaaagacgctactttatctcctcaatttataaatctccggttggttaagcatttcttccaatgactaagccaactttgtccttgacaaatcataagcctgtttctcaaggctaatattcttcatgaagaataggcattagttatgtcagcttgctagtattagagtcatttgcagtaaattttgttgagaacaagctaaaaatatttatagtttttatttatattttctttctattttattatatggtcaggatattttactggctaagctctccgttctcagtgtcagtggattggcacaatgacatgttgtggtctgttctgcagcgtgtagcaaaaccatttcttgtcctaacacttgctgaaattatgccaaatattttatcttaattattaatgatatatggctagtggatccaagaattctggccttctagacctccattatctctcctcattcacaaaaagattcccaaggaaggtgtttctctatgtataatatggtttggctctgtgtccccacccaaatctcatgttgaattgtgatcccacgtattggaggtagggcctggtgggaggtgactggatcatggggacagattctgcccttgctgttctaatgatagtgagtgagttctcacaagatctggttgtttgaaagtgtgtagcatttccccctttactctctctccttctctgtcatggtaagatatgcttgcttctccttcaccttctgccatgattttaagtttcctgaggccttccagccctgcttcctgtacagcctgcagaactgtgagtcaattaaacctcttttcttcataaattacccagtcttagatagttctttagagtagtgttggaatggactagtaaaagatacaaggaacaatgtcaatgtcaaatgggagcttctcattgtaacctagttcacttggcttggaagacaaggccaacccaaa

SEQ ID NO: 117002 - DNA, 1049 bp, Homo sapiens
agcattcttgcttgtagcagccatagagatgaggagaagtgggctgattggaggtagaacagacttaccagtggatagaatgtggcaggtaagggcaagggccaatacaaagatgattgatggggttctggttggagcaactgagtgtgttgtactgagaagggaagactcaaattgaggagcagggtgtagaatcaggaatttcttttagcataatatatttgaaattatgctgattgtatatgagagtctggagtacagaggaagtctgtaccggatatttaaatttgggagttatcagcacagagactatttaaacccacaggaattgatgaaatcactgagagagaatagaaaaatgagaaggttgagagttgatcattctctgacatctagaggttgagtaaagtaagaagtagaaaaaagagacaagaatgaattgtccctgaggtgaaggagtctaagagataggagtgttttaaggagggcatagcactctatattgaatgctaccaaggtctcttaacatggggtagggaagtgctttttgcatttggaaaattgaaggtcattgctgaccttgatgagccgtttctgtggagtggttgagacagaaacagactgtaagttttagcataaaagaataagttcatttcccttttcacaggatcacagaacaaacattttaacattagatccatttaaatgccctcctagttaaatagtccaatttctttgaatattccttctcagacattgaatgtccctgatcacatccttctggacttactcagttatgttgaatttcctcttcaaatgagaaagtcagaaacatacccagcactttcagataggatcttccagtggggctgttacctctcttcatcaaaaatgctatattatgccgactcttattagtctaaaatggtcattgcttcacagaaatttgcccagtgacacgtaaaattgttattgaactaaatgctcagctttacgtttactaacccttttaaatagcatcttgatttcagaccagcatatcagcctgt

SEQ ID NO: 117003 - DNA, 1042 bp, Homo sapiens
aagaggatatttgatggaaacgagtttgagcaggcttctacaatttaagcatgggtgatacaaagagaaatctccaatatgcttattattattattttgcaaaaagaaagcaacaacacaattcagggatgaaaactattttttaaaactatttttgattttgtattcactggctcttgtggagtttttaaatcatttaaaaaaagactcacagtgtatatatatatatatatatatatatgtatttttttcctttagcatatctatttcacacaatctcttttaacctttttgacaactatacctatttttcagttgttaagttttgaccacgttctgcgtctcatctcccaatgtgtcctttggatgtttcttacactggggaatgaagatccagcccactcactgtcatgttcactgtctcagtctgatgctgtgtgtacagattgcttcagtggcagctatttaggaataatgtatccatcaaatgtgtcttatacaagtagccacagaaggaaaggggacatgtgtttaggacttagtccctcaagcccatgtcagaacatccttcctgcacagagaccacacggaacactcagtgggcctgcatctgctctgcagcatttacccagcagcaagaggtctcctctgcactagtgtgcaagaacacaggtggctgcagcaaggtgatcagtgtgatggagggtgagcagaagcctcaccttcaaaactctaattatgacatgctgccatatgggaacacaattcagcaaatgaaaagcaataggatagggaggctgatggtgagaaacgataggctcagatgcccttgtgacatatgctgtagctgcatttgcaggctgaatgtaaattttcattaatttgctcacatttcctctctcctcttttgtgtgaatgatgacctgtacattcagtggggtccaagctattgatgatttttaatctttttcttaaacacaatgggggaaattacaatgaagtgttacaagtgtacttttccttaccgaggagataaagtgaa

SEQ ID NO: 117004 - DNA, 1077 bp, Homo sapiens
agttagagaagtggatggtcagcaaaggcaagaagaaacatggctgaaagtgtttgttctatctttgcatcaaaagctgttttattcgctctgatttttactaaggaaagtgtgtggtgggcagagattcaggtagatgccgattgggaagtgcagatttttgtaggtgcaaggctttctgctatggcccctatctcgggcttctgtgtaggagtttgtacccctgggattgatgtggaattgtgtgttgaattaggtttacatcatcacatgcaagtgaaatggctgtagttgaaacttctggtgcctcggggttgggagtcatttttgggaggggcagtatgggcagtatgtttgacccatggtgctgcataacttagtgtcagcatctcattgagctaggcatctcattgtggcttataatgttctgtgacactgtcggtgtggcttgcctcaatcatgaagtgagactcatttgttttatgttgtgaagaaagtattttatagctgactgttctctaactctgtattttgccctaagaaagccacaaattaaggtgggaagcagtaaagagtgtttgttattttcttttggtctgaagttctggcagcatgtataatttattaatttgcttattgctgtttctagtgattaaagttatatttcatgcaaataatcttctccattctgagctgcctactggcaactccccttagaagcccctcagggccgcagctcagcacctcccagccttgtcattcctcttagacctcctagtgcttgtcattcctcttagacctcctagtggtagctgacatttgctgtcttagagaagggcaccactgtccacctggggccccagggaagaccctcgccatccgttttcttctgcccatctccccacacacttgcaagagtcctcaggaaactatggccactccctccttagtgtccttggcattacctttgctctctgctgacattcttgtgccttcattctgatttccaaacttattgactcttcccgggtcctcctacaatctcatttatgaatatacttactgaatatttgataa

SEQ ID NO: 117005 - DNA, 1035 bp, Homo sapiens
ttgagagaaccaaaaagggtaaaatggttaccttaacagagaagttcaaaagtgatttttagaggcaacttgcataaattccaaagtaatgtgaatgtgaacataattgcatgataatctatcaacatgcatgcattgccttttttgggaccacagaaggtgcgggcctggtggtaagaaacatgtgaaaggggagtaagattctaattaagtcttaagagcagcataacatggatttattatacgtaaccttaactatcactgcatcctggtggataattctaggatttttgacctgtagataaagctcttgcctaagtcaggagaagacaatttcagaaactcattattttaggaaatgacgagaatacttctttcaaaaataggtatagctggagtttctagagcttttcccaatactgacattgctctagatctgtctttccttaccaatttcccttcctcctcttccatggctaattttcccatctttatatcgcaagttattatttaattcatctacttgtccctctctgaaggtccatggaatgctaatacttattcatttggtcacttttactagggacagcagagtgggtgttaatgcatactaatcatgtaaggttgatattatttttatttttttttgtagctgaagaaactgaagtttacatagattaaatatattgccccaaaccactcagctagtaagtggtcaagccagaaattaaatccaagcttttccggctccaaaatgttgtgtgtgtgtgtttcctgtgagtcacactaccagatattcagagcagttggttgatatttaaaaggcatgaacaaaagccacccaccccagaaataactctaccactcaatggttattgtactttaaatttcaatatttgagatgcatttcttctgcattgttggctgctctctccataaagtgttttaagttaataaatgttatttttcttttataaatctttacatagcacattaatgaatattaaattaaatgcaggcatactttcagctgct

SEQ ID NO: 117006 - DNA, 1799 bp, Homo sapiens
agaacgctcatgtgttgttgcattatagggtataactgattgcagaggcaccctaaatagatttcactgagaatatagttagaattgtgtaaggctttaaatccagactgaaagaggaaaacaacttgttataaggcgagtccatttcgacttcatctgagggggttttcatgactgataggctcaagcccctgttttaaaatgatgatgtttacgtgattgtccaggaactttgaacttcaaaacagttttagctcctgagtaccaagtttttaatttaatttgtacaaaatgaataccaataccctttactaaaaatagtatacctggctagcatttaaaagttataacctttagcttgccatgattgctaaaagtcatctgttgtgtgtttttaaaatctgcactaacacttgtggaccattcatgccatactgaagctgattttctactttattttttcagttgttcatggtggacaatggagcagatgactggagaatagccatgacttatgagcgtattttcttcatctgcttggaaatactggtgtgtgctattcatcccatacctgggaattatacattcacatggacggcccggcttgccttctcctatgccccatccacaaccaccgctgatgtggatattattttatctataccaatgttcttaagactctatctgattgccagagtcatgcttttacatagcaaacttttcactgatgcctcctctagaagcattggagcacttaataagataaacttcaatacacgttttgttatgaagactttaatgactatatgcccaggaactgtactcttggtttttagtatctcattatggataattgccgcatggactgtccgagcttgtgaaaggtaagtttgtttcttttcctgagaacataatttaccatgtggtatcttcacaagtaagaaaaaaaaaattttagacttgagacgtgtagtgtctcactcttaaaaattttggattttctgacaggcttctttgaaatgactgtgacaaagcttttctgaagattttttcgtagagcaaatgccttcatgcttgtgtgttttctttctaatttgatcagttttcagtagagggctgcctttataattttgtgccaaaatttggagacctagaaattgtacaggacacttttattggaaatgtgagtttaatggtaatattgagtcatttctgtgcctgattgcttatgagcgttgtttgttgttgagacagaaatcctgtcaaacagtgttgatgcaaaatgcctgggctttagggaatatcttaaagcggtttgttggttttagtgcctgtatataatagttttcaaatgattacttgataaggaggttatgggtatgcgtattagtttgtactgaactttcaacaattagtaagaacaggcaatgtgtatttgttttaatgtctgcagcgctctggtggtctagacctaggcatatattctcagatttcaggagtggctcagtgatcttaatcagttatacgttaataatgttaactttgccatttaagaaaaatagacttatgacataagcaggaatagttgtctcatagtgggctacagagtaccctcacatgaccttggttaagaaaattcaagttgaaattaacagtagagacataggaatgatttagacatttctaggagtgttgaaagttcagatgttagtctttgtagttttttttgttttgttttgttttgttttttttttttgagacggagtctcgctctgtcgcccaggctagaatgcagtggc

SEQ ID NO: 117007 - DNA, 1070 bp, Homo sapiens
atgaactttaagattcaatatgtgatcaactctgtatcttaaatgatctgggttctaattttcaagttttccatttcaaaacagtttcagtgttttttatctgtttatataacataagccagttgtcatggaggaagggatgaatggcatctgaaagtttcacttgttctatttgtgtttttttattatttacataagatgaatgtgaaatagggagccacatattagagtgctagctcattttcctggtctgccagccatgattttattttgtattttcaggagagtcacccagaggcctagcctactcctttcccagcactagccattagaggtgcctatttcctgatgatttacttaaatttgaaacatgttacttgggatcaagtttctttaatagttgtaaaagtagtcataaaatatgcattgcagtgctgggaaaacatatccaccttgatttattacagaatactggatagttattggataatgagattatttcctaccacttgaagattcagctgttgccaagtaaactctaagtatttcatcaatggatttgtaatttgtggttgatggcaatgtaatactttgtaaacttgtacttccaagttggtctgattcatacatacagatatagcattttcaggctcataaatgagtcacaactttaaaatgggccctttcaagttataaaagtcggcagtttgaaagcattcatcctgcatctgtgacttgcaaaacatcaatgctaagtataatgtttgccaaataaattggtcattaaagtcttttatggaaagaaaaaccagtactccctcaaattcaattttctcttctttcttatgtagatatgcttcttgttttgttttgttttgttttttgtagttttattttttgagttggagtcttgctcttgtcactcaggctggagtgcagtggcacaatcttggctcactgcaacctctgcctcctgcgttcaagcgattctcctgcctcagcctcccaagtagctgggactacaggtgcccgccaccatgcctggctaattttttatgtatttttagtag

SEQ ID NO: 117008 - DNA, 1037 bp, Homo sapiens
gacaaaaatcagtaattttaatctggtttaaatattaatctgtttttgtcccagaggacataatgttatcaaatgaaatacccaatataaaaagatcagctttagtcattagtttttatctaatttaatggtgaccagcccttagaatttctggcttactacatgtctggaagggaatgagtattcttatatttattgttgttatgataatctgcctactgtgctttctactatttagtaaggtgtttttattgttttattttgttttgcttttaagatgggttctgagaagtttggaggtgtcggtgtgaagtgagaagccactctgctaggttttttatccctgtttaaagattccatttttgaaatatcacactgataccttttgttcctcctcttaaccatcattcaccgactatatcatctagatctctgttctttcagccctaccaaggtcactggcatttattgtgacgtaggtgcctgatagatagttgggtggtaaaagggatgaaggtgccacattaggcaggtttgatgtggtcaggaaaagaaccagggggactgttgtagtcagtaatcagtggtgtagttgcctaaaacttttgtctggctctgattaggttaggagatgagttccctctgcaggttaaaggtgttcattaagtgcttatggtattctataccatgtaaaaatgggggtacaaaagccttatctgaatcaagctcctcaatggtaaaaggtgtatttgataccatctgaatagccacagagcccagagccctttaatatctgggtcagataaaaccttacaagtcatctaatcctatcaggccaagaggaacaccaactgctgtcattacatgaggacttgtggggtaaatgtttctgcacagatgtgtacctatcagttataacaatagaagaatgataattaacacttaatgagtgacttaaagtgttgaaatttaaccctacaaagggtcgttatgaagaagattactaatgggaatattatacattaagtgtgaaaaaa

SEQ ID NO: 117009 - DNA, 1121 bp, Homo sapiens
gacagagctccaaagtttttgtgactattttgagtaaccctaaagcagcatttcaactttcctttcatgaaactgtccatgtgctaagatcactgccactcaacttaggtcctgctgtgcatttaatttcttgggtatttcctgaaagccccactaataggaacagcgatctagaattgctccttttggaaatgcactctgcagatgctgctcactaaggtctgcagaacttctgctaattcccaccaactgcctctggggaaaaaaaggatcatgagttttaaacccccacgtttcacttcctcatacaagcatatcttcaagtaatcacataactgaatgtgcctgagtagactaaatttgaaagagaacgtaataatttttttcgtagctctttatccagttttagtttgtattagagattttacctggtttagactttgtcttaatttgtgcttcttattgataatgttttgaagggaaaaatagcagcaaggattaagaaaatgaaaatattctttattagtgtggtacactagttaaagcaggggttggtaaaccatggcccttgggccaaatctggcccaccacttgtttttgtaaagcctatgagctaagaatagttttcacattttttaattgtttggcgaaaaagagattatgtgatagagactatatgtagtctacaaagcctaaaatatttattacctagccttatgctgaacaagtttgccaacctcttatctaaagtagcatcattttgtcaaatttgttttaagcacaatgtgatattttcaattacaaagcatttaaaaatttttactttggggtcagacaatggatttctatttgttatagcttaaatctggaggcaccaccccctaccaaataatcactataatatctttaggactaaatataaactacttttggtaccaatgatcaaacattgacattagttccagtgatgataggtgcaagtaccatactcagtaacctaagtctttctgactagtactagctagatgcataagtaatttatttttacatatactaaataaaaactaccttattggcctgtgcagtggctcatgcctgttatcccagcaattgggaggcca

SEQ ID NO: 117010 - DNA, 1042 bp, Homo sapiens
attctctaacggaagcatataaaattaactttctgaattgttccatgggatgaagcattacacactcacagcggaaaggaaagtttcacattttgtagactacaagaaaagtttgcttattgtggaatggggaactttttaatgatgccatctaaattgaaccaagtgggaacatgaccaccagccacccacctgcacctggagtcatctccatcctgccacagcactcaccatgtttcctttacttgttctcttctccccctgcaccttctcctctttcaagagcaaacttgtcctgggacttccctgacttctagctcaccaagttcccaattttctactcacctggtactttaagaatcttgccatttctttgaaatattttccaattaacaataataaaaaaattttgacatgtgggtttgatgggagtattcagactgcaggggagaaagaagacaagggaggaacattcactaggaccttggaccaactgaggggagtgggactggcccctgtggggacaatcccataggtggagctaaagggtgatagatgacgcagacagcccaagtggctgtttgggtatttggctggcttctaaattcccatcaaaccaatcccactcttgtttattagagtcctattatgttaatattggtcccagtgtttatagaatttgtactctggagcagtttacaccatttggtgataaaagcactatacaagaatattcttcatgtatgtgctcatttctcctggaacatttccttgcagctgtcagtaaatggggccttccccagataaaggaaatctctttcttggaaaatctttgaaaataagtatggaatgctaagggatagccttattaataaggtggggaataaattaaatgacccatagacctttggaagctaagtgttttattctgcttaatattttaatgatggctttgggccttcttagcactgcattataacagagtcattccattatacataaattggtactattaatctaaaagtgctaattcagacttata

SEQ ID NO: 117011 - DNA, 1109 bp, Homo sapiens
atttttctttgataggtctttacatctggtgttcacatttattacagcttgcatattaccttactccttgcaaccagttttctgccttaccacattttaagcttctcatgaatgcttactatttttactcatctacatattctcagtgcctccaaaagtttctttacatgtagatgttcaccatgttattgaatgagaaactcctgaaataaagctaattgatggttctcagactagatagcacattaaaatcatctggggagcttttaaaaaatccctgtgccatggcttcacccccggagacctcagcttcattgtttacggatggggctttgcacaggattccttttaacacttcccaggtggctccaatatgcagctacaggtgaatatgccgctacagtgaatagctacgtgtgaatatcagcaacaagtaagagacacgttagctctttcttctgagccattggcagtaagctcttttccttttgaacttagatatgtaccttctttgaatttctttttatgcttatatgttctaattaattgaagcagttattttatttgcctttacttcaaatgaaaactacatgcacatagttgcaatttggaaggagaccatttatcagactccttgcatctctctgagcctgcagctggtggacacggcaatatcagctttgttactgaaattaaacggatttggacaccaccacttgccctacagccacatgggctttctaatgttctgctgatttaccactgaatttgaaaaaagtcgtaggtgtaccctcacactgagggagtcactctgtgtcccaggtgagcttaccacatagaaaaccccatacacctgctttgtgggcaagccaaggaaagagagggcctgatctatgcctgctcagttcctactgccagatttttcatccctcccctgtacaaaacaagagatgcattgcctacctcttttcctcccaacacacatacacactacttaaaacaaataatgttagaggcaagcatttgaatatttagctcggtctatttttctcctcttagaaactttttaagatcttttctttattcctggtatttaaaaatttacagtc

SEQ ID NO: 117012 - DNA, 1136 bp, Homo sapiens
ctgggattacaaacatgagccacagcacccagccagtagtagtatatattttagagcctttgctgtttcaaattattataaaaattattgatatgtcttctaacatttttctgacagactttgattacggttgattactagtgaggcagagcaaatgttcttatttttcaactgtgtgtgtgtgtgtgtgtgtgtgtgtgtgtaaagatgttcctgttaacaaagatccttccccccactttacttattttttgataaacagaaaatgacttttatttcataggtcttttggcctgtttattggccatagaattattatacctactaaatgtttgatggacatcggtaaatcctctcataccacttatcacagtatctagcatgtagtagagattcagtacgtaggttgaatttgtaagtggaaatgcattgatccatttagagcttagatgaagcaataattcatccattatatgaatctgtatacccttgttatcaagagggtcctttggttgataaatacgtgttagtgtggttcatgagaagaagtttttatgtataaattatatgtgctgtggtgcccagttaacaccatagacatttatttagtacgagctgtgcctaaagcactgaggtagagagacacaaagattagtgatatgacccctgagagtttctgaaagccctggaaaggggacaaaagggcattcaagtgttacataactagatggttatatggcagggttcttgactgaggatacaaaggaaactttccctccaaagatgggagggaggttagggataggaaattacttaacgggtacaatgtatactatttgggtgattattacactaaaagcccaggcttcattactacacaatgtattcatgcagcaaaattgcacttacactgcctaaatttatataaataaaaaaaatgaatgcatagacctatttctccccatttttcctggaagtttacatatcactttcttttgccaactccccattgttcaaatgtggaaaacaatgaggtgcctttgaccctgtcttctcactgtcctctgttccttttcaaccctagatggaaaggaagaccctactattagaaacacatctcagtaataggcagagag

SEQ ID NO: 117013 - DNA, 1065 bp, Homo sapiens
gtgttgttcccaggcaggtacaagtacttctaaaaaggcatagattaaagaaaaatggtatttggagtcatggttactaaatgaagctacagctcaccatgatccttgggatgaagactatgacccccagcaaagttacaaaggattctgctctggaatttatcaactgctttgtttgttctcttaacaggtaaaaaatgcagctgccaatgtactcagggaaacatggctaatttacaaaaatacaaagctagtgaaaaagatagatcatgcaaaagtaagaaaacatcaacgaaaattcctgcaagctattcatcagtaagtatcatttttcatttttatcctgttgttgtgtccttggctttcaatttttgcacttgtttattcttgtttcataaggaaggaaaaaagaaaacattgtcatgtttattcccagaagatgttatctggcaatctaatcattccacaataagatcctgagaataacctcagttcctttaatgattaaaaatcacttattagtactagaatatttattaaaatatcttctcagtttctttttagaataacttctgctgaaattgtatttcttaatttgacctatttattcagatagtttgctctaggattttttcagctttattttctaaacatagcttcaaacatatttatatgaaagtagtgcatataactgatttagtacttgaattttaagttagtttttaatcagaattttggctgtgttcattttaaattttccagtttgtgtagaccttttactctcttatcattattttaactttatccagaccactattatggtttaagtccttcgttctgttccattgttatataattagcatacgcttttaaagtaacaatctatatctagtaagatgcactgataatttgaaagcacaggatctttctcctccgggctggcataatccttactgtaagtattattcatgtgggtatcgattgtgatgccatgcagacttgctcttaattctatatggagaagagcagatatggtcacatctgtggctcagaaaagtagctttc

SEQ ID NO: 117014 - DNA, 1048 bp, Homo sapiens
gtttggatagagtgacagaggaagctacttgtgatttttctgcttctgtcagatatttcttattctgtttcttctgtagcaatgtgtacttctaaagtagataagcttcaggcaactcagaaatgctctgaattgctttataaattcatctaggggttaccgggtttccattacagtgggggacatttatacttctaaaagtgtaactgagtacgtttattcatgcaagctttgtttggctagatcattctaatcatgcatacttacctttcattttagcttagtgttggaagttagggagtgaagtcataggggaagcacacagggctcgattcctaagggcaaggcttccattgcccactgtgcagatccagtgagaccctcggccttatctgtcggcactgggtacaatcagaccttactagctgaagaaaaatgttaaaattcattcgatagatcactcctggcctctcctactctctgatttatcctgagcactttttcagcagctctctgcttctaccagtccatgctatctcaactctgtttctcttttccaaacttcatagcctctctactctgttggatgctgaactgtccaggcctgtgccctcttttcagtaattgtctttttagattgtcacttagtgtcgtgaagtgttctctttctctaacttttaacgctttttctggtagcaactttccctttaaagtttatcattcttttatctcaactatggaccaacatgaatttgtttcagaaccaagaaatccaatctacttgatttgtatatcatgagagttggattacctgcctttcagaaaccccaggcttctgagttgtcctaatttggaaaagatgtacccccccaaaaaaattacaatgcctttgtttcaaatattgttcttttaaccatatcacattcatattaggcaaaaatatttcttgttgtttacttgaacatcaaatatcaagaggccatgatgactttatgcatgctcttccttctgaactcttattcaggaggaagctgagtgcttacagatg

SEQ ID NO: 117015 - DNA, 1031 bp, Homo sapiens
gatatttaacagtagctaaacataatcttacaagtagagattccatctgccagatactataattgtcctctgacttttatctacactgaaaatgggaatttttcctaggaaatggtctggcctccctacaaatttaatggcagttcaagataaaagttaaatgaaatacaatgaagaataagataataattatgtgttttgtgttatattgctgctggttgaataaaagtttttttttttgttaataagaatctcacttatcactgtgttttcatcaggttcaaatacctaacccaatccatttcggactaaacagggctaatacctgtatctaatcatgtaggcataggaaggtgctcattgctccaacatcaatgaaattccagttgctttgcatatttcttcctatgtctatgtgtcatgatactggggctttaaggaatgttttggctttttctcatatggttaaatccttatgagtctttctgaattcaactttacctggtaaatagttgtcctaaggacatctcatctcttgctctcactctctcctttcttttttgcggtgttggggaagcatgcttctcattgtaccagacacataaccagtttggacttaccccaaatgttcaaggcattatccatgcagttatttgctcttgtcaattttgtgcatgctctttggaaggcataagattgccataggaagaagggaacctttctgataccagattctatcttttagattaagaagtgtaaaaatggaacagaggaaactgaatgaccaagcaaacactttggtggacttggcaaaggtaagcctgaggtgcttagccctcctagttgcatctgttgaaatcaaccacttcacagtcactaatcatgaatgtttcaagaggatcccaacccaaatctaattaataaatcaaaccagcaaagcaccctaaaatgatggtccaacttaaaagaatgtttctgtaactctcatttaatgtactctttccctattacgttattcagccccattctga

SEQ ID NO: 117016 - DNA, 1023 bp, Homo sapiens
agtctcataaattgttatggtacttcattaaaaatattgactttgatcattaagaattgcttcatcagtgtggtcagatggcctttctaacttggttaagtgttcattccatttgaatctgataggaatgaaactctaacttaacaagttttggagaaataacatctatatattatgacgagatcaggcatgttcagaggggtatggccgtagacaacatctacgtattaatcatttgaaccctcaaattgaaaaatagtaattccgatatagagaattttcatgtgatgtatcaaccatttttctttttacattcatattcacttaaatggctttatttagtgattttataaggcaaatctttgtattttggtaatttgttagattacttgaaacctagatccttaatcacacttttattctttactcaatagattttaatgtgcccagaacatgaaacagagagaataaacatgtactgtgaattatgtaggaggccagtttgccatctgtgtaagttgggtggtaatcatgccaaccaccgtgtaaccactatgagcagtgcctacaaaaccttaaaggtaggacttatttttggaacagaattttgattcttcgtaactttactttatgcctttaacttttcatttataaaatcatggtgtgttatatggtctcttttgtactaaaatgagttaaagtgttacttagcgatctactaatattaggttgttagtatttctgatcaacaattatttgtggtactgataaggcccggcatatattgacacctatgttgtattagctctgaattctgagggaagagaaggatgaaggacacttcatcatgatacccaaatgagcccaatgtctatgataatggatgtatacataggattgacatactttaaagggttgtggctgttttaagacacttgattcttatttcttgcctgtagaattactattttgttcattctggtggcacacttaccatttaaaactgaattacttccgtggctc

SEQ ID NO: 117017 - DNA, 1065 bp, Homo sapiens
ggttttgaaatgtgaggacatgagatttgggaggggccagggccacaatgatatggttaggttcaaatcttatcttgaattgtaatcccaaggtgttgagggagagacctggtgggaggccattgaatcacaggggtagattttccccatgctgttcttgtgatagcgaattctcataagatctgatggttttgtaaggcagtatccctgctcttgctctctctcacctgccaccacgtaacacagatctgcttccccttctgccatgattgtaagtttcttgaggactccctagccatgtggaactgtgagtcacttaaatctcttttctttataaattacccagcctcaggtaattttctttatagcagtgtgaaaatggactaatacatactcataaagtgcttttaagataattgctttgatatacagcatgagaacctcaggcattaatgaagaatggtcgcatttaatgtagaaaattgctgataattcagcttgtaaatagataccaactaggtttccatgaacatactgactcagctagtgtttaatagctcctgttatttgtcagtcacagtgttaattcactaaataagaatatagtcttactcttagtgctgtattcaaaatttttattgacatgatctacttttaggatttcaccgaagtcctaaatcagtgcactggtgatggagattcgaatgatggctttataatttttgataaaatatcatggtcccctaatattttacataatttttctcttcatttttgccttttactatctcatgttccttcagttctgggttatgggtgttgagggcagttgatggtatcaaattttattggggaaaagaaatttaaaatttagaaaatcattttcttaattctttttggaaaaataaacacatgtacttattcaggaggtataagaatgttaatatatttacccactaagagcctttaacttggactattttactctcaaggttaccattaagaatatcgaaagggagctcatttgcccagcatgcaaggagctgtttacccacccattgattc

SEQ ID NO: 117018 - DNA, 1078 bp, Homo sapiens
gtattgatcagaggcagatttctctcttaaccctactttccttgtacctatagaagttgtcatcgcccaaagaatttttgacctaatgtgaaagtgtgggggttgatggagagagaagtggggggagggagtgggtgaatagctagtcaggaccttagttaagagaacactggttatccaatatggttctaccatatctaatgacaaactaactgatgatctccacatatctcatttcctaggaaagaaatggtgtatcatttcactgtgtaccctgcagggaaataaaggttctgccctacctaccaagatcatattgccgtagcatcaaaaagccccatacaaaataaaagctttcaaaacacagcatggtattaaaaggacatctgtattttaaaagtctcgtttattttgtttactgctgaatctccattgccagacactgccaggcacacagtaggtggtgacttatatttaatggactatttaatgaatgaataatattggcacattgcgattccgtagatctagttgagattcaggcacagagggacatgaaggccatgtgctcaacagcatgtcttaggaggccactggctcctgtgatagcctgggctggccatcctaggcttgttcctgggcaaagtcttgcttgctagagaaatatcatcccctgagaatgaggatagctttaggatatgtgcacactgttctaattctaccatttgagcaactctaagacaaggagtgatcctttgttgtgacacaaacaatcccaaggaattttgttgctctctttaggccaaagattgtgtgtaataaatttctggagaaaacacactgttaaggctgggcatggaggctcatgcctgtgatcccagcactttgggaggccaaggctggaggattgcttgagcccaggagttcaagaccagcctaagcaatatagtgagaccccctatgtctacaaaaaaaaaaaaaaaaaaaaaaagaaagaaaaactagctggatgtagtggcatgcacctgtagtcccagctactcaggaagctgaggtgggaggatggcttgagcccagg

SEQ ID NO: 117019 - DNA, 1031 bp, Homo sapiens
ctttttaaatcctcgtctggacactagggccttttcattgtgttagggagactcagaaaaggaaaatgttataaaagaccagttttccctgatggctaaacaattagtggcataatttaccaaagaattgtagcctgtgagacacaagatgctgaatacagccaagcaaatactttctctactcttcttagcttaggaaagtggatatgaaaggaaggatgttaactgtctcaggctatgtcatgggcatttgcctttgacagaaggacctcctaggatgaggggaggtggtgctgacagcaagcagaaggagaagaggacccaacagctggctgctcttcatccctcagagaatggcatggaaagagagcaaataatttcaaaatacatggaaaaacatttagatagcacaggcaatttatttggaacctccatatcaggaaattgcttctctaatgcagtgacttactactgaaaagaaaaaagtctctcatgtttgcaaaatgggctttgtacagtgcctcacactgagacctagagatctaatgagaatgtggattattaaatttctcacagggaggaaaggggcccaggaagtgtctcccagatctggttcacagcctaaggaaaaaaatgcttatgccttactatcaaagggtagaagaaaatagcattaatctccattgtcctgattaatcactcctaaaggtataaacagaaagttcaggtcggttaccaccctcctaggagtgccagcatattttacagtccacaaaatccggcgcaaatctcccttccccattcatacctcagagacagaagagtaagccaagttatttgaactatgattttgctattcgtatatatcaaagcgctttcatgttctcacaaaacttgagttcccgaaagtaagattgatgccctgccaggaaaattggctttaaagtagtcccactactgctattgagtaaacctttcagaagagccctcaaggcttaagaaatcagacatagcagagcccctacagaact

SEQ ID NO: 117020 - DNA, 1060 bp, Homo sapiens
accacaataggttcaaggtgccacacattaaaaaggtcagagaagatcaggctttccaggagggcaaggagaaatagaccatatttttcacattcaaatatataaaggtctgttctctggaagaaggtttacattcagtggcaactttagaattcctgtttaggaggggcttaggggtggccatcagtaagaaagtgaagcttagagggcttgccatgaaggtgatttgcatataactgtacttcttatttattgtgtatttgaggtggcttttgagagagcaggtgaagattacaggttaatcttaattgtacatccttccatggccacactttggcttcatcagtaactggacttctcaaaacgtttagcatgcacaactaatagtatttgttgaataaaggaattaataaatgaactcatatttaagaactataaagaactttccaactagagttgcatgaggccggaatgggtagccacagcaagttctccattgctactgctgctgctgctggagaaggtgaggctcattctggaaatcaggaaaagagcatgaagactgcaggattgactcacttttggttttggcagggcaatgttttacacacacacacacacacacacacacacacacacacacacgatacagcatcaactcatttctcttaaaaaaaaaattatattgctcgttttaaagaaactgcatctgcagggaaaacaaatcatcctaatgataagggaagtttcctttttcaaaaagtctcagttcataaatggagaagcaataatggggttagaaaataactatctcacaaatgctaatagatttttaggctacaacaatcaatggatactgaaaccatcaggagaaaggttgatggagaacttaaaagtggaaggctcaagctgccaccacctgaatccactgatcaatgctgccatctctaaaagtgactcaagacattgcatgcctcctgctataatgcaatgtgaggtacacaaggtcatctataaaatatccttatcagaaagttgagactgaatctagtcagtctga

SEQ ID NO: 117021 - DNA, 1548 bp, Homo sapiens
acaatgaaagcacaccggaaggacatgaccacaagacagataaaaacctaatatttgccaaaaaataaaatgcaaatatgacaggaaatttatattaattagtacagttatcaataaaagtaggaaaaggggaaaattaaccaagtaccaaacacttggagtaaaaagcaaaataaagcagaaggaaggaattaataaaagcaaaaaagaattactagtagaaaaccaaaacaatagaggcaataataaatccaagttggtgatgggtagtgcggggagttgagtcagataaactaccagctaacctatttaagaaaaaaaggaggaagcacaaatacaaaaatttaaatgacaagggggaaatagtaaaacaggaaatttgtttaaattgactattttgagcaattttacacaataaattcaaaaactattttgagaaaaatgcaaattgccaaaatttactctaggtagataaagtcacaacaaaccaattaccgtagaagaaacaaatagttaaaagtaccccttaccaaaagaagcatcaagcccagattgtttcaaggggatttctaccaaaccttttaagattaaataatcccattcttgcttaaacaattgcagagactaggaaaagaatcttgaacctcaaagtgccaaaaaaagaaaaaaaacaaataaagaaaaactcctgaattcattttataaaatgaatgtaatagcattgattcaaaaacctgacaaagatggtaccaaaaagaaaatatagagcaatctcatgaatattaataaaaagttttaatgataacattagcaaacaatccaacagcactttcaaaaggtaatcatgactaagttgggtttattgtaagaatgcaagggtagttcaatactagataatctgttactattcatattaagagttaaaaaatatcttcatctttgcagaaaagacatgatagaattgagcactcacttatgttaactatactaagtagaaattgatgaataatctattaacattgtacctctacctaaaagccagcatcttaaatttcaaagcaaaggagactttccagctgaagtcaggaacaagacatgcccactaactcctctgctacttaacaatgtgttgagagttatagccaatgaagttagacaaaataaagacgtgaattggaaaggaagaggtaaaactatttgcagatatgaatatgtatctagaaagcccaaaggaacttgttgaaaaactaaacaataaaagaacttagtaaagtagctattaaatacaatttacataaaaatatcagtaggcttcaccagacacaagtgcatactttgattccatttcggtgaagttcaaaacagacagcatctatgtatggtgtcagaaatcagcaccctctttcagtcactacctctcttcccaaaggtaagtgctgtcaaaattaccatcaattagttttgtctgtttttgaattttatatgagtggaaccatatagtatacattatttttcaactggctttaactcagtaggactgaaagaggg

SEQ ID NO: 117022 - DNA, 2195 bp, Homo sapiens
gaactagctaattataaaggaggtagtataaaaactcttcattagtaattaatttatcaataactcatatccgttacttgctcagtgacattcagaactattgcgtctagtactgaaatggggaaagaaatctcttcactaaaggagttggctttaagttagtcttggtgataataaatgttgaaatacaagtatcagtataaaaactggattactggtatcactgtttaggcattgtaatactttaaatgttatctttttttctaaatcagagggaaaaaaatgttgtgaaataacagtccttcccaagggaaacactgtgtacttggagaaatgattgatttattattggcatgcttagttttaaacctgagtttgccaactgtatgttttttaattagaaataaaataaatcttctgatggtgggggaaaaagtaagcttaataacagatgttatccgtctatgggttattccagttgctactatttaaatcctggcagattaagacatccatatctcaaactaagtcatctcttagacattggaagttaaagtagcatatatataatggctttaggactatataaaaagcccaaattgttttttctgtatcaccaagaaaggttagaaggcaataaaggtagtaacagtgattttattcataaatgttagagaaaaattccaatctaaaagtatttcataaggctaaatattttctaactcctgataatttaataccataagattataaattttagtatgcttctaattgatacacttgtgggagactttcttgtgaaactttatggactagtaaatgttcacattccacagcaactgaattgaccagaaaatagcagcccagtgtgaattgtggagaaactatttctaacttttctaaatagttatttacaagaaaagcatttatcgattaaataaattataagcaatatttcacatatacactttattccttaacaggagcgatgtaatgagggaaaatacgaagtccgaaatctcaaaaagctctgttacctactctatacttgtctccttcccgccccctaattttgtggcattttttttttagaaggtaggaggaggagctttattttgagcatctgtgtacaaatgagattaatcagatcatatggcctaatttaacctgtttatcatttcagtgtttttagatttgatctataatatatatgtgttattagatctttagttatttatatttaatctaaattcatatagaaatcttgctgacagtggtatataatttgaaaactgttggacctgatcatttttgagagacagttaatgaggaggtgctctggaatcagatgacctgggtttaaatcccagatttgccagttcagcagcatgatcttggaccctaactctgccgtggataaaataagggtaaaacctaacacacagggtttaggattaaatgagataatacagataaagcacttaggatagtacctggaatacagcaaatttcaaattataggttctttataatgatcataaaattatttttgtaattaaaacctctcttctacaacagaaagaggtcttaacagtttaacctcagggaaaatgatgacaacagtgttgttttctaatctccccataagaatacagagcaactaggatagccacagacactattacaacgctagatgacaaggtatctctatgaacttcaaaatacaactaagtgaggacaaaccactgaaccacatagtttcagtatctgtgggaggaagtagaaggaaggcagctggtttctgacagctctgcaaattggagaactacaacactgcccacagtttctcaactacaaagtgcagcgggccaatctaagaacagacactgaaactgggaagtgactacagaatctcatttgcagatgaatgttaaagcaatatgataaggtctgctgattgcattagagctgtctgggttttacgctgtgtacctcttgaagcttatgagacaaagcccagcactgaggacaaacttctagaattagaatccaaatgggcaggatgggtaaaataggacaaaggaaagaagatctagataagtattgggaagaaaggccaagacacagagacattatatatgtgtattttcatatatatatatattcttttaaatcactgtgaaaatgggagctct

SEQ ID NO: 117023 - DNA, 1382 bp, Homo sapiens
acgtggagcgagggatattgcaacttagattcagagttttgttttcgttttaaagaaaaaaaaacttaatgatatagcattgaagctactcgttttcatgttctctagtaagcaagaggggaaactccccaaagtgagaagtcttacatatgactgctgctactcctgtcttttaatcacagaggttatggacagtatcagctcttcagctggaaactgttttcctttgttaatgatattttcatgaataaaatattttattttgatcatctgagttttttttttaattggtgtttgaggctttgagaaagcaaatatttttaaaactatattagcatttctctaaacttacttttaatggagtgatgggctggtaaatatgtggctaaaatattctgtagaatgtacaagtaagaatgcctattatgatgttttaaatgccttcttttcagatgctttgcatgcatactttgggatctgtggcctgtcactaatggaggaaagtggaatttgtaaagttcatcctgctctgaatgtaagcacacggacttctgaacgccttctagatctccatcaaagctggaaaaccaaggactctaaacaatgctcagagaatgtacatatctccacatgactgattttagattgggagggtggggggatttgtagcataactgtagctcaagtttaaaagccatgtataaccaagtgtgctctttttttaaaaggtagagtcttacaatcaaatctcctgctgatttcactttgggatatggtcttgagccagtaatctttatactgggtttcaagaaaatctttgttgaagtttgaaccacaactttgtcgtggttcttaaatgtttatactgtatttctaagaagttgtttgaggcaaattaactgtatgtgtgtaggttatctttttaaaaactcttcagtgcaaattgtatcttattataaaatggacacaaattttcaagtttacacttcatatagcattgataatcttcaggtgaacacttagtgatcatttaaaaagctcactgctgatcgtagaaaatttgctttaattaattaagtatctgggattattctttgaaaacagatgaccataattttttttaaagaagagtgacttattttgtcttattcttaagtaaagtgtgccaattaaacctgtgtggcctatataaatgaagttaataacttcatagtaagaataaataggtttaactaatgtgatagttttctaaaaggagattgtttgaagacaactattatgtaactgagggaaaagcaacttaactgtatgtgattgtgaatgagaaagttttgtgctatgtgggtcatttatctagacattgctgtggtgaataccagtta

SEQ ID NO: 117024 - DNA, 1026 bp, Homo sapiens
tgggatcgctgggtcaaatggtatttctagttctagatccttgaaaaatcaccacactgtcttccacaatggttgaactagtaaataggaacacctttacactgttggtgggactgtaaactacttccttaaaattcttaagctgactagttgtagtatctgtatatcagcttctaacttgtttatcttatttgtgaaaacttgtttgtagcttagggttgatggagcctcaattcataagcaatatactgtctttaagagagttaaaaatcagtctcaggtgattgggtcctgggcagggagttagcagtcccggactttagttccaaatctgctgttaaccatgtaattttaaacaagttccttaatcttgttccaagtcttactttttttcataagtaaaatgtttcttatagctttatattctctgttttaacaaatattgaagacttgtgtttagtggttattttaaaatctcatcttttaaatttaaattttatttcactattttctagaattatataaccactttttccccttgaacattttgtactattttcataagcatctaatttgaagtttaaaacgttgtgtggttttgattaacaggaggatcaactttttgtggcattgcctcactatgtctgatgggtaaactagaagaagttttttcagaaaaagaattgaacaggataaagaggtggtgtataatgaggcaacaaaatggttatcatggaagacctaataagcctgtagacacctgttattctttttgggtgggagcaactctgaaggtaagagaaataataaaaaatgagaaacctatattctgtgttcatatagattgtgctaaaaaggtttgatctttgtaatgtgtattaaatattgttaggtttaggctactggattttctcttttgctctgccaaagctagtctctgtatggtttttccatagaaatcagtgatctcttgtgctgcttgaaaattttcattcttggaaaactcaagtaacccagaacttgagt

SEQ ID NO: 117025 - DNA, 1065 bp, Homo sapiens
aatcacttgagcccaggagttggagactgcagtgagctatgattgcaccactacagtccagcctgggtgacagataagaccctgttactaaaaaaaaaaaaaaaaaaaaaaaaaaaaaatccaaaaaaataagtaatacataatttgctttacctgaatatcataactacttccataatgcctgaggtatcaaagaatttaaagattaagtagcctgtgcaatcatattcatattgagacatacataaaatggagatttgtttttctcaataagatgtctatacaaatcagtataagccatatttaattttactatttactaaaaccttatgtcagatttcttaatgaaataagttttcatttcacttcattaattagtactatattaattttgtatttaggctcctggaacagctcatccttatgatagtggccacattgcaatgacctacactggcctctcatgcttagttattcttggagacgacttaagccgagtaaataaagaagcttgcttagcgggcttgagagcccttcagctggaagatgggaggtatgagtgattctttgttactttttttgtaataaacaaaaatatattggaactaaaaaatggatacagtactatactagatctttagaggatcatactctattagaaccccacctaaagcttacgaggtacataattaagtgcatagtcaaaaaagtgacctcagatttcctctgtgagtgaaaataatagtaattacaatagccaaacacctttatcttccttcttaataacaatgggtacataaataaatggttgaataatttcaggattggaatctaatttacattctagatgaaaaattgatattttgaagtacgcatacatttagtctggacctcagttccttgctttatggtgattagggaagaaaggggtgaacactgaatattgtattccagagtaggtagtttccatgacatttttaaaggatagaaaaaggagttcgtatgttcattgatatttggtgattcacatagtgtgtctaaagatgaatcttcctggagctttaa

SEQ ID NO: 117026 - DNA, 1141 bp, Homo sapiens
acaaagtacatattttctcttcagctttaaacctttagtttgctcccatgtaaagaagcaatgagttaaagtaaaaacacactaaatgagttaaagtaaaaagacagtagaccctattgtgttattaaccgttaccttgaacaatcacttaacctctgggcttctgttttctgttctgtagaaagggggattgaacatgttgatcacataaaaattgatctgacaggagaagtatgaaaggactgtataggcagtgaggtgggctattaaaaaaaggtacatgatagaaataattatgttttttgtgactcatatggaaattaaatgaggaaattcccataagcacctagaatggacctggcacatggtaagcattcagcattagccagtatgaaaatggagactaaaatagtctgtttctgaaagattgtgtaattaaactgctttagaatctgtgcaaaaataaagtgtactttaaataagcacatgcttttattttctaggatcaaatctaaatcgctgtggtttccgaggctcttcatacctgggtattccgttcaatccatcaaaggttggttctatttggttcagaaggaagtagaagggatgtagggatattttaataaaagagaaaactaagaagttacacagaaaaaaacaggcttccagatttcaatgtggctaaatgttgtctaataatatatatatattataaactgaaatcctttaaaggaaacctatacctactttacttcctcaaagaagtgcactttcttccgggaagaatacatgcagtacataaacacacacaaatttctattaattgttacaaaaaattgtctcagtatcatacatctgtgtgtaaaagttattggtgatttcctgagtaaaggaaaacagagcactgaagtgttttgatacctgctgtgtaagaagccagtaaactttgttgtgtttatagaaagactctacatttagctcacatttcttaggaataaaagaaaaagcccttctaaaggcagtgattgaagacctaggtagtgattattttaatgacttttattagaatatgcagaacttcttcatggttatatccaaaggccttgataccagcacatgccaatataaaaacagtgagtcc

SEQ ID NO: 117027 - DNA, 1129 bp, Homo sapiens
agagtctcgctctgttgcccaggctggagtgcagtggcccgatcttagctcactgcaagctccgcctcccgggttcatgccattttcctgcctcagcctcccgagtagctgggactacaggcgcccgccaccgcgcccagctaattttttgtatttttagtagagacggggtttcactgtgttagccaggatggtcttgatctcctgacctcgtgatccgcccgtctcggcctcccaaagtgctgggattacaggcatgagccaccgcgcccaacctgtgttaggtagaattctaaagatgttgccccaggatttctgttccctgttaattcagtcaaatactaatctgggtactgctgtgaagggactgtgtagatgggagttaaagttatactaatcaactgaccttaaaatgtggagcttatccataggtgacatgtgtacaggtgggctcagtataatcacatgaacagcagacgaacacagaaacgttcgtcatggaattgcagagaaagggagcagaagagagaagagaaggtagagagggtctaatggaaaagatttgagtgccgttgccactctgagatatggggcccatatatgagaaatggcaagagaggatctaggagcaaaaagggatacctaccagcaaagaaatggagaactcagtcacacaactgcaaggaagttgattctgccagcatcctgaatgagcttggaggcagattgttcccccaaagcctccaagtaaggaaggtagccctgcctacaccttaactttagcctgatgatgcctgtgttagacttctgaccttacaaacagtaaggcagtaggtgttttaagttgccaagtttgtggtaatatgttatggcaacagtgactaatacagagaacaaatttcagccttattcatatcatctcacaccattcatattattttgtttattcccttccagtctttgttgatatgtgccatttgcttaattataaacataaaaatgcacatttatttttggatcctacttttttgcttaacttgatcaaatacatttctctgtgttgctacatagttctactgattattatttttaataggaatatagcgtttctttcagtacatgaggcatg

SEQ ID NO: 117028 - DNA, 1015 bp, Homo sapiens
ttaaatacaagctataattgatcctgacaaattagtgaaaattgacattttcacatatttctaagtcctgtactatttgtactgattagttgtagagaatccttttttaaatctactttagccttcagtttggtgatattctggcttcagtgggtcttgtttgtgtcaatggggtaggattggtttcttaacccccaaatgtccccttttgaaaaattgaaacaaaaggcttgactgatagtattaagttacaagaatatgtatatatatattttttgcttttgcaaggtggaagtattgtttaaattattggaaaattagaatgattttattatttttctagaccaggaagacttcagacttaagtggtatgatagttaagatggaattttacatttttttcttttaggttgacaattgcattttttgcactctccgggctggatatgttggattccttagatgtggtgaacaaagatgatataatagagtggatttattccctgcaggtccttcccacagaagacagtgagtgagtttttagcattttatttttagtgtgactggttgtacctgacataacatgtgttggactagaaaatcttagtacttgtatactgttaacatattttatttatctgtgattttgttgtaatgcagcattgccattctgttgaaatacagtacttaacaaatctgatcataatctcaagaaaacaatttagagttatctggaatttaatagagattcacagttgtggcaccatactatgttgtatacttccactttgatgactacttgttgattatttatagtcagtatttatgtttgattagttctgtagcattaactctgtttttcattcccaacaattcttgtcttttcagtgaaaaactctttgccatcgaaaagttttctttcagtttcctgattattttccctccagtgtttcattagcatttttaatggtttcttaaagctcttatgtatgcttcagtcatttttacacttaac

SEQ ID NO: 117029 - DNA, 1102 bp, Homo sapiens
gagcaggacataggggtgagatagaagggtttgtgaaagtggaggtgccatttactgaagtagggcatgttggaggaggaaagggaagtttggaggaaaatatcaggagttcagttttaaatctacggagttttaagatgttgagtagtaaatttaccatttttatctcccacttcctttaatatgtcttgtgtttttaataagtgaagatattattctgacattttcagacatgctctgaactttctggcctgaatgcctttgcttatcttgttctcactttctggaacctccattctttctttccccctccaatcccagcttatcaaaattggcccagatcagatgttgcctcctccttgcccacccaaacataagtagcttccctcaggatttcactgacacttaacaccttttatatgatgtgttgtggtatgcccatgttgaatttcacctagaacagtgctgctcagacttggtccatggactaaatatgggtttgcaaactgttactggtttacagtgggataaaatagttgcaccagaattaactatgcagtgagcactgtttagttcaattgacttttttttttccatagaaaattttcacattgaaagaagcagtgcattgatttgcgttttaacacaaattcccaatatttttgcagactggtattttgagtagcactgtactaggtggcatttggtatagttttaatattgtttcattgttcctatcacattgccttgtttatagtatatatacataccataaagatttattgagtggaatgaatgatacaccataaagaaagatgaggaaatagtttcttgacttggagggaaggtaattcagtgaatatgccctaaatggcatggagaagcctgctagaatttgaaataatttttacatacccatatgtaaagacagctctgtagctattgagctgttttatttatttatttatacatacttcggaagcactatgtgccagacgctaactcatttaatcttcataacaacactgtgcaagaaatcctacctaccattttatagatgagcaaaatgaggacagagaagtttagtggctcatccaatgcc

SEQ ID NO: 117030 - DNA, 1135 bp, Homo sapiens
cttagcacgggttatagtaagacttaacccattatgcttttaaatattgaaagatattgaaggatgctttatttagaacaaaggtacttaaagtattaatgttttgacataaatatcttttgttctttatttaattgctcttggcttttactaacagtgatcagtcttacatgtagattcctgaattgtaaccacatttgtcacagaattattttaaagtgcatacttctttcttataggagcaaaaatccagcaacaattggccaaaatacataataatgtaaagaaacttcagcatcaattaaaagatgtgaagcctacacctgattgtaagtaaatttagatattataatctttcttatgtgttagtattttctgtttggcattaatggagctaaactctactttattggttaggacttaagtttattaatggagctaaactctactttattggttaggacttaataagtttattaatggagctaaactctatcagttaggatttagtaagtttacaccggagaactataatcgggcatttctgtgtgtatccgttaaagtattatcaaatccttagaaattataaggtaggcagaacacatactagtgacatttacaggattgggaatctatgttatagaaaggtttaaaaaaacagctaattaaggggaaaaaagattgatttccttaatcctgtcccagtgttttcccttcatttgctttttgaaataattgtctttgagaggcatttctaatacataaggaaaggttaaactgatttaggacaaatgctagtttttggaaaaaaatcccacaaattatatccctacctccttgcttactgtaatattcattcctgagaatcaaagcaacaaattaaaggtctcagggtgtatggacttaggaatcagacaggtgttgggtcaaacctttgatctttcacttgttggctatgtaattttaggcaagttacttgatatatctgagctttcatttcctcagctctaaaatggagataattatgatatgagtatatagggaaaatgtctgtaatcagaaaaaatagcaatcataaaaattcacttttgagcacaactttcttatgccttaggctaagaaatattttaaaatt

SEQ ID NO: 117031 - DNA, 1039 bp, Homo sapiens
taggagacaccaggaaagacctaagaagctctcagtcctcatccttgtttgtctttgaaacactgtgctggcagaaagtaaatactaagatagggttgtaaactgcctgcctgcatgtaggaggtatgcttcagcatgcatacagaccccctttcccaaaggtagcaaaggctaggacacatagtggttcaatgcatctaaggaaatctctgaccaattattggctgacaactgagctaaccaatcagagatttcactgccacacctgaccaagactacagattttacagaattagtttaaagtgaccaaacaaacagcaacaaaacaaaccctgctaaggggagagaatctcatttttggagttgtccattatattattttatatgtccagtctttaacaaagttatgagacacggcaagaaagtatggttcacacatggggaaaacagtaaaaaggaactgtctctgaggaatactggctattggacatactaggcaaagacttcaaaacagttatttaaatatgttcaaagaactaaaggaaaccatatctaaagaactaagagaaagtgtgggaatgaaatagaaatctttaaagaaattaaacatttaaaaaagaatcaagtagaaattctggagttaaaaaatgcaagaactcaaatgaaaacatcactagagagactcaacaccagatctgagctggcagaagaaagtatcaacaaacctgaagataggtcaattcacattatccagactgaagaacagaggcaagaaaagaatgaagaaaaatgaacagagtctgagatctgtgagataccgttaggcatactaccatgtgcataatgagagtcccagaaagaaaggaaaggagaaaaaaggaggaaaaccgatatttgaagaataatagaagacgtcccaaatttgatgaaaaacattaacctacatatggatggagctcaatgaactctaagtagaataaactcacagaaattcatatctagacacatcgtaataaacctgccaataaatatggacaaa

SEQ ID NO: 117032 - DNA, 1001 bp, Homo sapiens
aagttgacaaataaaattaaccatcatagcaatacagtgaagtaggaaagttggcttcttgatacgattttaacactttctcctttgcatgtgagctgaacaaaggcagcaaaaaaaaaaaaaaaaagaaaaaaaaaggcacatttaagcccacattttaactagaagcacagctgcctggaagggacattaagtctggctaggccaactttccattcaatgaagatttttcagtctctgtttaaatacttccagtgctggggaggtaactatatttattataaggcaaaaagttctgttaatgtgagtctctattaaacaattatattgaggaaaaaatcgtgctcatgaagcctgaatatccctcagcttctctagcatgtagtaagggcacagcccattaacattaacatctgaatgtgttaactctgaagcaccactactgcagaggactttgccagttctggagcattgcagagtttggggacagctctatcagtcctggactacaaatatattttttcccagggcacaaacatgcccccacatagttgggtcaggatggattcaaatattgtttatctgaaaccacttgtctctgacatgcaagtcttgctgccgactctgccaggctgcctcaaagtggtaaattcactcttacaggcctctctgatcccataagctggcttctgtcaaagtcctaaaggctgtcagccttgtctgtatatgtctggacccaactgtagacacatttttttttccagcttacatttagatcagtagacataaatagatatgaggagaaaggggtgtggtccaactccaaatacatatttaagtattagctccattctggctaaaatgctttagttggaatgaccacacattggtcccagttttgtcccctggcgacacatctcctttttactctgtagtcagaacacaactttgttctaatactaactctatttttatgaaaatgtgattaaattgcaacctag

SEQ ID NO: 117033 - DNA, 1081 bp, Homo sapiens
tcccatgaaagagaaacatgcaaaaagaatgtcagattatgtgtgctgcagaaaatcccaacgtagagggatgaagagtgagtgagaatgggactggagggcaatatagaggtgactgattacggaggcctctccagggatcggctgtttgaactgagatctaagaggtagaaaggagcaagctgtgcagccttctggagatacagtgtggaaggcagagagaagagcaagcataagggtctgagatgggctctcacttgctcattcaaggaatggcaaggacatagcacaggtgtggaagaggttgacaggtgcattatatcaggtcttgttggccatgtggaggagctagggttttattctgggtgtaatggaaagctgagagatggttctgacctggaactgacatactccatgttattaaaacataactggctgctgcctagagaatcagttgttgcaagtagaagcttagaaacctttaaagggctcttgctgtgggcaagaagaaggagactgggactagggtgttagctgtggaaatgggaagaagtggaaaaacaggctaacacttggaggtagttcctaaaggattgctggtggattaaatgaggagtgtgaggggaagaagaggaatcaggggctctagacaaatacttggcaacttgtcactttcttaacagttatagaacaaaacctgtcctgcttttgataatccagtcattttcattcttctttgaaccacagcagccagcagtcactggcagtatatatttatacatgagtcctaatggaatttttatagtcaaatatttataaattttaaagattaatttaattttgttactgaaaggaaagagcaaatattcctttagctatcagaatcttaaaaattaaagaaaatccaaagacataaataaaggaactctgcatatgattgttggttcacatgtgatattgtttcgatgttacattaccagcccttccctccaaatctcatgttgaaacgtaattcccaaaattagaggtggggcctggtgagacgtgtttgggtcatgaggcagatccctcataaatgttt

SEQ ID NO: 117034 - DNA, 1894 bp, Homo sapiens
cgttagttacagtcatatcaccatccttatccaccatcatcttatcaagcccatttggcccaagtgatgttctcatcatatttgctacagccttttctgccactatatgagacttaagggcctcagtcccataagacaggacttgaggtcctgatccttgatgatgaggaaagggtgcccatattcatcaaaggcgagggttcccatggatgccatggtgcagccccaggagctacttttccctcagatactaatctgaagatactaatctattgttttttgccctctgatgctagtgagttcagtcattctttgctccgttgtgagtaatctttttttttctcatgttcttttagatattctctctctgtctttggcatttttcagtttatgatgaaacctgtttttgatttatttatttattccgcttgtgaccacagtatgattctttgatctgtggactcatgtctttctttttagttctggaaaattattactcattatatctttctatggactctcattctctttattctttctttctgaaacttctattaggcatattgttagacttttccaatccgttctttgtgtcttaatttttcacatatcttctatctctctgtacttggttctaattttcttaaatcttctattcacaaatgatattacttcctatcttgtctgctaacatttattacttttttaatttctatgcctgtatttttatttttagaagttctatttcttctttacaagtttacccattttttttgtttgtttgtcttcagtttctacatatcatttaaaacttccctactttctggtctcctttgattatgctacctcaaattcttagagtgctgatcctcctgttgtagtgctgctcactgcttgatggatacttgtctcatgtagattgtcactgtatttttgtaggtatgctcagcagttagcatttctccaagtgaaaatctgtaagcccagggctttgggagaattccatcacagtaatcagggccccagcaattccagaatcagcttcttatgttaaatttccatcttgggcattttatatgaagatgatggagttaatttggattcagtgtaccaagtgcagggttaaagttccagtttttaatgggagcatttggtttttaacccaacccagagtaatgggcagacaatggaagtttcttgctgtgtccctggacttgaaaactaaagttttcttggctccctttatgcaaggaatagtcttttcagagttcctgcaattatgtgaaattcagtttcagataagtttcagcttctgtttaactgagtctcaaggagatgccttctgtaggtgctaaaacctcagtccctagccattagatggtctcacccccattaaagttggtattttctcatacacttactattctgactttgaataaccctcttcatttttgaaatttatggattttcctttcaagcttagccgtttacttaaataatttttttttgtgcatgtatctagcttttccacgtgtttggaatgggagaattgtctgtactaagctaatccaccaccgtcatttcaaactatgctggatcataagtaccaagtattaagggagttgctgttttataaatcacagttgatttaagaacattcttatattgacattctccccaaagtttaattacactttgttaatagatcagaaaagtatagaattataattgtgctgagaatcatatgtgaccctgggtatgcccatagaattcagttctgaatgtgaacagtgtcattcctctgccacaagagaaaacaaagttgcttagagcaacctgtaatgaggccaagatttgggactgagaaccttttgagccattgagcctgtcttca

SEQ ID NO: 117035 - DNA, 5687 bp, Homo sapiens
tttttcagattccatggatttgtttttcttacgagagctttttggggaaagtcctttgttaccaagaattttggctaagacagttgaaattcaacttggcaatcagaaataaatattgaaaaaataatttctgactactattagagtcaaaatgaagaatcttagatatattaaagagcagtctggccaggcattgtggctcacacctgcaatcccagcactttgggagactaaggcaggagcattgcttgagcccaggagtttaaaaccagcctgggcaacatagcaagacctggtctctaaagaaaaaaaaaaagaccaattccttgtttataaatgtggaaactgacctggaagttaagtgacttgtcagtaaaatggtgaatagctggttatttgtattctaccgatttttagataataaaatatgcactttaaaacattaatgaaaaatacgaagagaccatggattagtttgaatttcttctggtgactttggatgtctttttacacctaatttggtcatgtcatttattcaataagtttaatatcagatactagttttaggtactgggggaatttttttttctcgtttgtaaaccaagtatgtcctacttaggaacttaaagcttcctgcttttctttaggttctaaagtgcatatatatattacattatattttggtccctcaatgtatgttatttctttttttctctctctctttaaggtaatactgcattgcatgattgtgcagaatctggaagtttggacatcatgaagatgcttcttatgtattgtgccaagatggaaaaggatggttatggaatgactccccttctctcagcaagtgtgactggtcacacaaatattgtggattttctgacacaccatgcacagaccagcaagacagaacgtattaatgctctagagcttctgggagctacatttgtagacaaaaaaagagatctgcttggggctttgaaatactggaaaaaggcaatgaacatgaggtacagtgataggactaatattattagtaaaccagtgccacagacactaataatggcttatgattatgccaaggaagtgaacagtgcagaagagctagaaggtcttattgctgatcctgatgagatgagaatgcaggcactattaatcagagaacgtattcttggtccttctcatcctgatacctcttactatattagatatagaggcgctgtctatgcagactctggaaatttcaaacgatgcatcaacctatggaagtatgctttggatatgcagcagagcaatttggatcctttaagcccaatgaccgccagcagcttattatcttttgcagaactattctcctttatgctacaggatagggctaaaggcctgctgggtactactgttacatttgatgatcttatgggcatactttgcaaaagcgtccttgaaatagagcgagctatcaaacaaactcagtgtccagctgacccattacagttaaataaggccctttctattattttgcacttaatttgcttgttagagaaagttccttgtactctagaacaagaccatttcaaaaagcagactatatacaggtttcttaagctgcatccaaggggaaagaataacttcagccctcttcatctggctgtggacaagaatactacatgtgtagggcggtaccctgtttgtaaatttccatctctacaagttactgcaatactgatagaatgtggtgctgatgtgaacgtcagagactcggatgacaacagtcccctgcatatcgctgctcttaacaaccatccagacatcatgaatctccttattaaatcaggtgcacattttgatgccacaaacttgcacaaacaaactgctagtgacttgctggatgagaaggaaatagctaaaaatttaatccagcctataaatcataccacattgcagtgtcttgctgctcgtgtcatagtgaatcatagaatatattataaagggcatatcccagaaaagctagagacttttgtttcccttcatagatgataacttgactgtattttagcactgttaaagcacgaattggtaacagttgtttcataaatgagcactgttgtgataacaccagcattcatttagcttgattgatatcattgtgctctcattggctaaagcattataagcatcaaatttacaacattggtttcccaatatttaatataaatataccatataatatattgtttgtgaattattgagaaatgtaacattcaaatttctaaaattgtctgccaaaggcttattcattctggttttgtttgctgttgggtgtttggggcagagttaaccatttctccatggtgtctttatactttactggtttgtgaattttatacaattgaaagtctttttttcttgcttctttcttctcttctcaagtttcccccctgtttctactttattgtttgtcctaaccatttctactacagttttttccttatggacccatactaggttgtacaaaccttaaggactcgttaccatttgcagttaccataagtgctttatcttctctatgcacaggcttaaacttgactgttgtatgttagcatattttctatgcagcagttggtcaacttcaactcaaaacactgttttcttatgtttgttacaaacttaattttttgaaagtactctgtagcatgacaatttttagagctgcaggttagctattatagctcaagcttttttgtttgtttttttcttcactttcttcacatctgaggtttctttctctaatccactgaaattattgtgtgctaaatttgggaaacagatctattctaactcattaacccagttgaaatttaggtctgtcatcttaatatatcatgcagtaaaaggaagaatctttttaaagtgacccacctttcatgctgctccagcattgtcctgcttgtgctgatggtgtgattaggtgtagagaatttgcttaaatttaacttcaaagttcatcacacagcttaatgagtcacattgaaatactcagtaattgaactgcaaatcacttttagttacaaaaagagctaaagcatgtcagtggcatgatgcttgccaagccagatctaggcatctaggataattaaggtattttagtatgcaatttactgccataatatcaaaggtcagtaacagtgttctttctttcttcaagcttatgtatacctttaaagataacttgcatgaattactttgattactttggtctcaattatttgtcaccccagttaaacatgaaaggttgcagtgcttcctgttcccttactggaagttagctttttcttttctctttcttcctttctttctctcactctttctttctctttctctttctctctctctctctctctcactcactcactcacagatttgctaatgccacagaaagggctcttttaacttaagataagtgaaaagtactaaaaaagattcaggtaattatcattcagcactttattgtaattcagaataaaatttatgatggcatatttgccctgcaaatgtcttaatgaagttgttctcaataaaaagctccttattgatttgagaaaaactcagtttacctgtgagttcaatgagctggatcactcacttggatttttgtgttgacattttattctgagggttgatgttacactatttaaggagtcatcaatgcaaacagtcacattaggtatgtcatcatctttagtcagtaaaaaccttgtaatgaggagtagtaaataaacaagagaacattagactttttggttaaataattgagatttaatttttaaaagatattcttactcatttgctaggttgtaaatttgatttcaccattaagaaaaggtaaattggatataaatgaacgatctccaactttttgatgaagaggttttactatctctcactgtgggaaaatttgatgaaatatttgaactgtcacatatattaagaatactttatgatttagaccaatattctagaaatatcaaatgtcagtatcttgaaatcatctgcctctaactttgtggtataagaattatatatgaataagctattatttttataaaggaaaactttgccattatagtaaattacattagttgatctcgataatttgaggataacagatgacaattgaatttttaattgatttagtatttcctcctcctctttgggggctgggtgggagggcttacatgctcttatagtgaggcacatctcactgttttgcagcagaatttgaattgtgcaactcctgtgtaaagtaaggatttctttaaatagcatttttgcaccagtaaaaatagataacttagaactcagtcttgataactgaaatgacttatttcacttagaatacatttctcccttctctgccatctccacaaatgccattgggaggttttgaaaaaccagttaatttaatagctcaaaattgtccctgattttattttcttttagggaaaattgtttcataaatgtgacactgataaagcctttgtcagaaagtattctcacaattatgagatggattataataaaatacttaaatttgtgttattttttgaaccacagatgagtaaatttaataatgaaccaattacactcttgagtctaactaaactgtacactgtagcacggtgttattgactggagttaatgtgtaagttattaacatttctatgaaaatgcccttttggggcctcctgaattttagatgttccactgttttgatcatttctataaaagaaatggtcattttacttagatgccagtctactttataaagacaaatggattatagacttaaaaatagtcatttttcttattcataaatctgacaggcataaacccaaatcaaagataatttggtgcccattatgaatttgaagttaagtgatagctcacttgtaaagtgactaccttaatgtgtatagagaccccagtctactattatttgggaaaattgtttaggttatatgggaaaagtagctctttaaaaatcatattgcccaacagaaaccttaggctgaatttacaggtatgataatttttgtaattaattttcttagaattgtgcaggctggatgagataatgacatactcttttacactgtaacagcagcattattgcctagaactttaaccattttagagttagatactaaggaaacaaactaattggtcatcatcattttctttttttctttttcttttttttttttttgcccttatgtgtcactaaacaactagtttctctcccttttgtcagttcccattgtgtattttttcaaaagaagtactgtattcggatgccagctaataaattgtcacacaatggaaaatcatatgccacaacattcattgtaaggtttaataaaattaaatttgcaccaaatttaagtgtattcttattaactcaatacttgattggtattatcctaatgcaaatgatagtaaactcctgtttcagaaaaacctaattgataatttgtggccagttaaaacttaaaagatagcatttattgttaatacttctatgtaagtatgatttatgtacagtttattctaaattttttttctagtagagatcacagaagctaaagatatggggagacttttgttgtcaactgcatgagagaagggat

SEQ ID NO: 117036 - DNA, 1056 bp, Homo sapiens
ctatttcattgtagaccattgaaatcttgggtcagaataattatatagtccttgtagatatcatagaagacgaaacaggataaacttgtggaaagattcaatatttcttataataacttgtttttttctaactttagttacaaagtagatttatttgaagtattcaggtttaaaatactttctggtacacatgctatgttgagcatccccaaagccacccccaaatttggaagtaactcaccatataactgtactcataggtaagatttattactgtaatgtcataaggacatgcagctgaattatgaggggtaaagccgcaggtgaagtgtagagaaatctttgtgtagatgtttttatgctttgttcctcttgtgaggggtcacatagagcatattcttccccagtaatgtaaatacatatgtgtcatgtttctaccaaggaaaacccatgacagacccagtgctcaaggtttttactgggggctggtcatgtaggtaccctgtgcctagctcatacccaaaattctagactcccagaaggaaaccagacattcagcataaactgcattgtttctacatacagtttaggtacagtgagatacccttatcatttagggaaagttttagatcagtatagagaactatttaccagccaagttcccagctaccagccaaaggtccaaccttgcaagaaggtctttctaaggatagcagtctcagcctgccatgctacctcttttctacagacatgcctaaaatgactgactgttgaaattttatgtaaacattgtatgtaaataccagaggtcggcatgataattcctattttgacgattagtaaaatgtttatcattaaacttagctaaaatacctggtgtttccgatgtcttaatgtgtttcatacaggcttttactaatgtgccagtgcctgttgtcagttttaatctgtgtgtgggaagaaaaggacagtgttagaacatttagtacagctataaagaatgtttaaaaagttaaattataataggaaataatccattatgaaaggacacttcag

SEQ ID NO: 117037 - DNA, 1095 bp, Homo sapiens
taccttttcatggtatctgttaatttccatagtgattcttcatgaatgttgggggcagattaaagtacatgttcatcctcctccactctgatcctgaagcttcactgctcattctctcattggttctggatttttttctatgggttaatggtaacaaaagcaggaaccaattgaaactaaggcagggacactggagaaggatgtgatttagcagcaagagaggatttttccccacttttttagccccattcaaaaagtagaaaagattaataagactagagttaaattagaataattccttaggacattttgtgtgtcattcactggaaatggttctgaggaaagaaaatgtcagtacattgtgcttggtctgcttaaagataaaatgcatgtgacttctacattccattacttttaaacaggcggttgatatttgaacatgttatttaacctcttttcattactttttaacaggctattggcattttgaacatgttttaacctaaggtggaattcactaattgagagagcagttgttgagtcccgcagtgtgccaggctgttagacttaggatatacaaagagcaataagacaagatagccagtccttgattccctgctcttgaggagctcatggtttgattggagagacaggttcataagcagatacttaaaccacagtatggtaagtgcaacagtagtactttcttctattagatatttggaaatgctttatccccaacaacttataacctgaggggacaatggttttcttcttttcccatggcattccaaaaggggagaaaatctttgatatatttaggaatacctcttcagtttaacagtcatagcaattgagttttgagacgggagttggttcctatttaagaatctagactgtaaatctgtagtgattaggtgagtccttctcagagctatcacagtgatctcagcgcttcatggttatagtcatctttggcctcctttggttcttttgtttgtgttttggggttgtttttgtttggacttagaactttgcagatccaaagttaagtcctcttcaattccacttttacaccctaattctaacagaaat

SEQ ID NO: 117038 - DNA, 1142 bp, Homo sapiens
cacctttgtccagaagaagggctccggtttttgattgtgtataatttttgttgattgtaataaactaaaagcagcaaaaagtagtttagaatttttttaacccttaaaagcaactgccttgatagcataattttgatacttgaaaaccttaacttcccttacacgaatctatttatacgacagcaaaataattcactacctaatttttaaaagccattaaaatttaaaagtagcatatagacatgttaaaaaaaatcaaacagtgtaaattggtttacattgttggtttacatttgaataaaaagtcttattcctgatttctagatctctaatgcgctgacaaccactatttacagttttttatgtgtccttttagagttggtctatgcaaatacaagcatacttgtctatgtacaagcatgcttgtttgtgtagccctccgtctagtggttgattacatacttttttatctttatttatttttctaaccttggatgtcattcaactccaacacacatagctacctcattctgttttgtggctatacagtatttcattgtatgaatgtacataatttatctagtctctattggttgatatttaggtcacatccagtactttgctaatataaacaatgctgctgtgaacattcttgaacaaaaatgtgtcttttcacgcttgtgtgagaataactgtagtataaatacctgtgttcagaattgctaaatcaaagtgaatgtacatttgcagttgtgatagtgtctgcctttcagaaaggttaaaccacacaattatggggcactatatagttactgagcatatttgctgtagattgtgtgatcttttataaaaatgatacaagtgtgatcttttataaaaatgatacaagatcattgtgatttttctgaatttttttttccagaggaagtgtaaaaatcccacaaaatcccagtactcagggataatacttccaaagatatttctgaattttgcatactgatatatgtatgcagttttatatgctgttctataacctgttttttagcttaataaatgttatctttaatattaccaattatagctctttaatttcaatagctgcatactcttctactgatggagttttatgttgcttccagttt

SEQ ID NO: 117039 - DNA, 1076 bp, Homo sapiens
taacattggactttggttcctgtgactcttgcctgtgtcgatagagttaaactggagctctgctttgaaagataaataaagcacagcctctcaactggacataaatggatctaaagacagcagtatttaacgcagctcgggatggcaaactccggcttctcaccaaattgttggcaagcaaatccaaagaggaggtttcctccttgatctctgaaaaaacaaatggggccacgccactcttgatggccgccaggtatgggcaccttgacatggtggaattcctcctagagcaatgcagtgcctccatagaagttgggggctccgtcaattttgatggcgaaaccattgagggggctccccctttatgggccgcttctgcagcaggacatctgaaggtggtccagtccttgttaaatcatggagcatctgtcaacaacacgactttaaccaattcaactcctcttcgagctgcgtgtttcgatggccatttggaaatagtgaagtaccttgtagaacacaaagctgatttggaagtgtcaaaccgacatgggcatacgtgcttgatgatttcatgttacaaaggacataaagagattgctcagtatttacttgaaaagggggcagatgttaatagaaaaagtgtcaaaggtgagttcagcttctttgtttttctaaatgtctaccacttattttcaggaagtttgatacatcattataagcactggtgttgagtaaaccagcattgacagacctgttttgattaggtaagtcttccagtatgactttgttgagtgtttctatgatgtttggtaatagattgaaaaagtgtgataaaagacttctgttactctgttaagcagtattttctctcttatttggagtaacttaaaattcttgggaaatgggttccccagagttacagagcatgttagtggtagctgatctgagcctttaggcttatgcttaatctacttgggaatatggttaaatgtaatacatttttcttagctttttgttttgttttttttttttttagaacaaccttggagtagaaattactatatttattgagtcat

SEQ ID NO: 117040 - DNA, 1034 bp, Homo sapiens
ggggcccaagtattcaaagggtgtagagtggctcaatattagtatctaattcaggagaatcatttcagtgcaggcaaaggatttcaggtcctttatctgtacattttgcaggtaaaaaacctcagtgcaggtaaagaaaccacatgccatgctgtggagtcaggctattcccaactgtagagaaagtccattgatccatgagtgtggtggggctggccccagggctagtgagaagctgttgccatggctgcattgctggtaaggtgggattccgtgtgtttgccctgagcaatctgcgctgcctctgtgactttcctcctcttctcagtcttacaccgcctggtcttaggtcatctgctaagctgtcacagaaagtgacgtaccctccacacctgtggatggtctgaagggcaaggaggaaatttcagaaagctgtcaggcacttgatgaaatgaaaccacagcatctggaagttgatgtccttaagccaatgaccagaaggaatgaaccagagaactgatgttgttgtccatggacctgatgtttcttatgagattccaagtagaaaaatttattagattttgaacacttaacggctggataaggacaactttcttatatatatatatatatatatatatatatatatatatatatatatatatatatatgtcatatgtggcaatactcttgtcaattaacatattaagtttggattgaggtaagtaatacttgaaagtgccattaattaataactcagagcatgaaaattatttgattaaaagctcaatgaggctgggtgtggtggctcatgcctgtaatcccagcactttgggaggccaaggtgggtggatcacgaggtcagtagttcaagaccagcctggccaagacggtgaaaccccatctctactgaaaatacaaaaattagtcaggcgtggtggcaggtgcttgtaatcccagctactcaggagactgaggcaggagaattgcttgaacctgggcagcaggggtcgcagtgagcctagatctggcca

SEQ ID NO: 117041 - DNA, 1034 bp, Homo sapiens; identical to SEQ ID NO: 117040

SEQ ID NO: 117042 - DNA, 1034 bp, Homo sapiens; identical to SEQ ID NO: 117040

SEQ ID NO: 117043 - DNA, 1069 bp, Homo sapiens
gggaccaattaggaggcagtgcagaagaccaggatagagacattgatctagaatgaaaatgtggtagagaggaaacttgaaacaatttgagattatctgttagagttagatacacaggacttggtgatcacttggaagtgcaggaataggagagtaagaggaaggtatcaaggataccccaggttttgggtaataacaggacaaatgataatgccttttaccatgatggagaagtctgggaaaatgaggtgcaagctaccttccaggtcagcaagtaagacaaattaagagtgctgggcaatacatattataagagatgtgaaccagatattatggatatacagaggatgagtacttaattcaacttggagataaaaggaaatgcaatccttgagtagtgtcttgaatcataaagaggagctattcatgtagatggttgggcaagggtacattctaagatggagcatggaggcaacaacatgacatttgggaaaaccgtaaataggtggatattagaactctcaagagtaacatggtaggagcaaattttatggataaaaggagagattggatcataaagggcctagaatgttattctaataagatagagtttttcttgaaggcattagggtattatcaaagggatctttaagcaagagaaaaacaggatcagttttccattgcagaaagatctatctagaaatgatgtaaagggaaagagactggaggcaatgaaactagttggatattatgggaatttgtaatcctctaaggaggaataatataggtcttgaactaaagcataggcagggaatggagagaatgggaaaagagacagatatgtttaggaggcagactaaacatatctattagcaggacttaaagtttagtgggtggagttgtggggagggtttgtttgaatgggtgaaagaatatgagaataatttgtaggtttccgtcgtaatcggtagagaggatattagtatcattgaccaaggcagagaagattgaggaggaaagattgattgactgattgattgattgattgatccatctgtctgtccatctg

SEQ ID NO: 117044 - DNA, 3751 bp, Homo sapiens
aaagaactttgactaattcagcttttttttgtactgtgctttgtttatttttatagatatttgggctttgacttatattctcattggtgagctcactgccattttcttcctaattcttctttaaagaacttgggctggaaattctgtagtcaccaaccttagctgataagtatttctgctattgttagcttagtgttccatctgcccccttactgatgccatggctgtgacatctcagttggggaaaacagctgcttcatgagatctctagccttaacagttgtcccagtgaaaatgagcaggggggtttcattgcaaagacaactggcataaatgtatgaatgaatgccagattagtagcatgttagtcaaaagaggaattgagatcaaattgaaagaaaagctgaatatgatagatgaagtctacagaaagtatcacacatactgactgaaaatatttctctgcagatggaatctgcctgtgtttcaattcacgaagctctgaagtctgtcatcgattatcagactcatttccgtttaagagaagctcaaggccgaagccgagcagaggatctaaatacaagagtggcctattggtcagtaggagaagccctcattcttctggtggttagcatagggcaggtatttcttttgaaaagctttttctcagataaaagaaccaccacaactcgtgttggatcataactacgttttgagaattgatgcaccattgccactgtaatattgctgtcctctaattaattttaggtactgaagaacttaatattggcaacatttttaaatccttactcatacacttgttgggagggatgtacaatgcatattcccaaactgtggaaaggacacctttttttatttgtaaaggtggaaaaactttggaactcattttgggctattcatgttaaatattcaacaccaatgatctactctgttcgcagttgtttatatctactcttcgcacactaaactttggtattttgattccttttaaccatttaagactacttttcttataggtagttgatattttaaaaactttagatttaatgtctacatgtgttagggaggaagaaaattgccttttaattgttaataagaaaaccaaatgtgatgaactgtagcccaagccctattctgcactgttcagttttatggaggaaaaataaatctaccataggaatgttagttaatattgatatatcatggtaaaattgatttctcactagcttagaaaatgtcagacttttgtttttggggtttataatttaaaccagctatgctattttttcataaaggcatttgtagtacacagaaaacagtagtttcagtagtgtaaaagagtttatacaggccttaaatatcagactttgtaacaggtagaaatattacagaataatttaagacactacaatgggggcaaatgaaataggaaaatttttagtgagttacacgtactcattacattttcagtgcttttacaaggaaaaaaggtgatatgtttaattttaaaattttaattggctagctcttgcccttatatgactttaatgtctgtgagtcattcccagcttaaattaacaattgttagtattagtctcacacataagtgccatacattttatcctcatggatgtgatgcactgaaaagttagttgctctccttttttcttttttttgtcgtgcatattttatttctgtagtttctggttagctaccctaaagtgatttaaaaatttagaatgctttgtgtttcctatttggtaatcttcattgacttttctttagttaatgagtattaaatagtgcatattctgtagactatagggtttacattgtgttgcatcttataacttgtatagattgagctgattgaaataagattttgttccaagtattatctgatagaatacaagatgattcaaaattatatagatatttaaagcttttctgctgttttttttttttttaattgcaactgcttttctgccgtgcctctcttccctacccaaaagtgatgagttctgaacaagacaagactgtcatattgtagagactttggtatgtgataccatagaatactgattggatagccatcctagtcacttaccaatactgactagaagttaactcttaattctaagctatcttaaaatgcatatatatacttcttgcatggaagagcaaaacaaattcaagttgtcatgcctgataatttcagatgccaccgtatagcaaagggtgaacatgttttcaaccctttaactttttacggtgtttgaagaccagctactccttaatatttatcaatggattaagaagtttaagattttgcagatttatcaatttgggtttttgtactgaagttgtcttgcggctttgcaagtgtccctttatatttaaatttgaaagttgtaagcactgatgttaatgtgattgatcagcatgggcatatgtaaaatgtccttttctggttgcctctctatgctattgtgttcagatacttacaccataattaaacagtaagttatagacttgctgagtttggcatagatagtgcactcatttaatctgtgcctctcaaaacttcagaatattagcatattaccacaaataatttttggtgaaactattgagatattaaaatttttgaaatcactactgttacctgttatagaaaatagtgttggcttagtctagtctctgtgtaactggttacattttgatggttgtctatactcaactggatatgtgtatgtaaattagaaaatacatacctatccagacataaatgctaagtaacatttttttcttcctccaactacataatttgtagctcatcatttttccttaatcctttcctaacttgttgcagcagtttgaatttcccagatatttatgtttgaacataatggctcagaatacatatttgaacatcatagttgtatatatttttaaagtagaataaataatggaaagcaacttgatatacaagtttatactaaaatttcaactgtgtgaagatacattttaaggcattactttgctaataatctacacattcttttttctattaaataaacaaatggtttgtggttcacagctttcatccaagcttggtgataatcaattttgaaaatacagtggactgaaaagcaaatttattctttcgaagatttcatttaaatctctgtactatgcatttttgtttcagtttgtaaatgtgtaacatttatagttaaataggacaaagcaggccctatgactattgttttcaaaaaattaatatataaataattcagaggggtttttcatttacttttgaaaagaaatttctttaacaggattgcacctatcaatttcttgtagaataaaaaaaaatctttcaacaaactgactttacttgtttctgtcaggatttaaatctttctaaagctccttataaacttaaagcctagagtacagttctgtaatgagagtgattatttatttggtattttattaaaatatctgagggactgtccaagaaagaaggtgaaagagaaataccacgtctgtactgcctaatttgtaaccttctctttgcattccttactgaaagtttgtgtaggtgaaaagcagttaaatcatcagttgctctaaagaggtcttaatttttaagtaaattacctttagtttgtatattacccagttgtatcagtgtttttcttaataatgtagtcagaggggacag

SEQ ID NO: 117045 - DNA, 1069 bp, Homo sapiens
gtgtgtgcttggatgatgctaataggaaagtgggttagaaaattttcagaaggaaaatattgcaggcagtaagcttagaggttaagaatatgactttggagttcaagttctgcctttcccacttaatttagatgaacagtcttgaatagttcgcttatttaacatcagtttttcagtctgtcaaatggaaggaaaaaagtatattgtagggttgctgggagaattaagtgatctaatagatctccattaattagcacagttgtctggctagttcaaagtgaataaaagttggagaatacttgttcagtttctgtaaagtttagttgaagtaaaatctcccaagttccatccactggtgaaaatttaaaaagatagtaaaagtcctttgcccatcaccttattgccattttaataggaaatctgattaaatctgattaatttttcacacttttcacagtgatttttcttttttaatctcttacaggtgattactggtggtcactatgatgtagattgtcgattagaagatcctgatggtaaagtgttatacaaagagatgaagaaacagtatgatagttttaccttcacagcctccaaaaatgggacatacaaattttgcttcagcaatgaattttctactttcacacataaaactgtatattttgattttcaagttggagaagacccacctttgtttcctagtgagaaccgagtcagtgctcttacccaggtaaataaaaaaatcagcaatataatgttggtatatttaaaaggaggaaaaaagcataatttaatatcatgcactaactgatgagcatggaattttgagactgacagtctttaaaatctatcttaattcttacatgtaggcatttcacagagaacttcagacttttgtagtgaaaaataatgttgaaagattttatgaacttttaattgtaaagagaaagaagcattaaaataaggaggaagatcactaaggtagaaacatcagtggtaaaagaaggttgggaaggctgagcagtgttccaatcttctgaagcattttctttaatccctgaaggaatgt

SEQ ID NO: 117046 - DNA, 1018 bp, Homo sapiens
gtgaattcccaaatctatgagtacttctacagcatatgatttttctttttttttctttctttttttgagatgcagtcttgctctgtcgcccaggctggagtacagtagtgtgatctcggctcactgcaacctctgcctcccagattcaagctattctcctgcctcagtctcctgagtagctgggattacaggcatgtgccactacacctggctaatttttgtatttttagtaaagatggggtttcaccatgttggtcaggctggtcttgaactcctgacctcatgatccgcccacctcggcctcccaaagttagcaattttgggaattacaggcatgagccactgtgcccagcctatccctgatatttaagagaaagccaaatagacacatcaatgcattatatttcacagttccttaatctgtttgaagagatggacacaaaaatatacacaaaggacacattttcagacctttgtgaattcccaaatctatgagtacttctgcagcatatgatttttctacagcaggcaatgcatttgaagtttaaaaattaatgtgaaattttcagagccttactaagagtgattgccaacttgatagtgtattgaatagaaagcaaaaccacaaggaaaccctgatgttggccagtaacgcaaatcatatttgtgtctcaagaaaagaacaaattcagaagccactagtcctcaaaagccacttaccacttaccagtttcagtttcagctgaaactgaaaacgcgaaatctctggaaaccaggaatccaggctactagattgtcagctcctcagaaacctctgtagttggaccatgttgctcaccttcctgcagaaattcctcaacattataaagatttcagattataaacataatattacggggcaatattttaaatcctcatttaaaatggaagttgaagacagtaacaaacacaccaccttccttaagaaaaccagttttgcattctccaaaatgtagggagcaacagagaaagaagtttc

SEQ ID NO: 117047 - DNA, 1378 bp, Homo sapiens
agctcagcttaggggaggggagtttgcagcgtgcacaggagcagtgtcttctcaaacttgagtgtgcctcagaatcacctggaaggtttgtgaaaacacaggttgcagtgttttagcaattccaggaggtctgggttaagtaaatccaggaggcctgagaatttgaatttctattaacttattggggctgccaatgcttctggtctgggggccatactctgagaactactgttctagtgagtgacccagtagctatgagcattcagcaggtcatggcaacagtttgaatgcttttcagagtgactggagagtgccacgcaatcctgcaggctgattacataaagtttgttaggagagtttgccctgtgattcttctctgttattctctcatattgcttatccaggtgacccgtgtttagctgctgaggttcagtcaccctgggctctggttccatctgcaatggatgaccatgtaaatgaccatgtgctctcggctagctatttaattttaatgaaccccagtttacttatctgtagaaaacgggatgataacttttttaagggacaaaggaccttgttactcattgcacagcaggcaacatgagcatcaacttgtttgtgttgatttcccttgccaccaagtcccatagggtgacacaatatgggctatatggatgctaggcacacagtgggtttgtgttgtagctaaggaacactgagctttgggaatccattgctttatagcaagcactaaataagcctactcttggtgtggaggaagattgtatcttatctctcaaatttaccagcacataaaataaccttgagaaattgccccataacagagcaatcagtcttacagtcttgccacacccagaagaagagtgccaggggcccaaggaggactggctgttcccgcactgtgcacttatgcaaagtgcagaattgctgtatccaagcatattcccattttacaacttgacatccattgccaaattgcccttcaaaaaacttttaccaagttacattcccagcaaggacccattttcttatgttcttactacactgagtattatcctccttttgatctttgcaattttataggtcaaagacaaattcttgtttcacttgtgtctctgtgatcaatagtgagattggacacctttttacactcattagtcatttgtattttttctgttgtgaatgtaatgtgctgattttctcagaactggttggcttggctcttctccttggacccatgaagaatgcagcctggacctggtcttatgtgctgagtatctattatgagcaaggctctggtctctgtccttgagcttctccacagtagttgggaaaatgaaccacactcaagtacagg

SEQ ID NO: 117048 - DNA, 1063 bp, Homo sapiens
actggtgatgacacaggaggtcaaggttttgggaaatcaagtagcggtaaaacttgattgctacgagttctacagatcttaggaactatagtgtcatctgggttgttctaaaggccctagggagaataagtagggacaaagagaaatgaaattgccagatgagaatttatgtggaaaatcagagagccctgaatgcaactttaaaagcacatcttatttccaataactgcaggaggaggtagttgagaactaagcttaggatctgattataagggttgcagcattaattaaatgctcaagttcatgaggcttattatattaaaatatagacacttagggggaatgaatgcaaccctgtcccctgagtcatggaatgattcatactactgcaaagaaagtatgacaatgcgttcacaccactggaattcactagtcttgcccatctccaaaaaggagctggatcaccagaagagcagaatagcctgctgacctcacaattttggcaccagctaaaagaaagcaccttcaaggttagggggctatcctgcaagatacggcaaatgccttaaatgagcaacatctctctatatctttctctacaggtagaatgaatgggtctggagaccaagcaaacatgtgacatttgcaaaaatgtatagtgtacaaggctacaaaacaaggcttaataaattcctaagaatggatgctatacagcttgttctccgaaaagagtgcagcaaaattagaaaccaacgttaaaaggagattagaaaccctcatatgttttgaaattttaaaaaacactacaaaaacattcatgggtacaatatggcaagagaaaaaataaaaggtatagcgtttggaatggaagtaataaaatcgtcattatttgcagatgacatgaattggaaaagaaaatgaatcttgatacttttgtcatgcaatataaaaaatcagtataaaatggatcacaaacaaatgtaaaggtaaaagagtgaagcttttaaaaaatacataagagaatcttcatggccttgaggagggtaaacctttcttaaacagg

SEQ ID NO: 117049 - DNA, 1008 bp, Homo sapiens
gggaggccaaggtgggcagatcacaaggtcaggagttcgaaaccaggctgaccaacatggtgaaaccttgtctctactaaaaatacaaaaattagctgggcgtggtggcaggcacctgtagtcccagctactcaggaggctgaagcagaagaatcgcttgaacccgggaggcggaggttgcagtgagccaagattgcaccactgcactccagccagggtgacagagcaagactccatctcaaaaaaaaataaaaaataaaaaaaatctggacccaccttttgatcaggctttagcattatgtcttgatctttttgaagcatcagagtagcacactgtggtagtgatcatttttcctctgctactatgtcaggagctccacattttctctcatctattctcactcaaggacaaacttgattcctataccaaaaaaaaaaaaaaaaaatgcatgagttttcgtatttattccatgtaaatgatgacttcattttttgaaataaagttactttgatgaactattaaactgttttctccttctcttccacaacttcatcactgccttattccaacctcctgttcactctctcatgaggtcttccacctcacccctcgatggccaccatcctgaaatacccacctacttggggatcaccaatcaaagagcctagcttcagagttcgttgacctcctcagtgccagtgatttccatctacaattccacaaaagtagttcacatgggtcatactctggatcatgtcatttaaagctttttttccaactgatatctttaccattaatagcataccttctgtcagcaacctcttattcttctatctcagcctttcactcacaatatatctaatcttacccaggttcatttatttgaacccctcaattttttttccagtttaccaacttagatgatgcttttgttctatcactgtatttgcttacttgtcttcacgctcttctattttactggactcaaaaccacagcccagattcca

SEQ ID NO: 117050 - DNA, 1739 bp, Homo sapiens
ggggaggtgttgaccattggctgtcttccagatgagggtgcttccctgtcttcctggatgtcaccagctttctggtattatctgcagcccaagagtcatcactctcttctctcacctaggaacagatacctctcttgtttgcttctggtccatgggaatgagatggaatggaaaaaagaagctgatcagcatggctcctcctcccaccatccctgagcaattacccttttggttgcctcagggtccagctgctccactgcctgccacctctgagactggggcatctcaggatccctggcaccttttgccacaatgtcattgcaaaggtttggggtatggctctttctgccttctatcttccaggactttttcagcttctgattcactacggcaactctaactgttttgttccaacacaggtatagagttttaaaaaattattttctcttgtcatgtctaaaaatttgaaatacaagacagagactcctttgctttacacatttgcttcactatttccttccctcgatcacctgatagttttattctaatctactggtaacatcctttaggcattggcttaggtgctgagatggtctgtggctctctgaaattataaagcaaaattttatatatctgtaaacacttgcattttcctagagcgtaggctggtaattcttgttttcaaagaaagccatgaatcaaagaggctaatgattgcacaaaaacaaaagacggtaagacaatgatttcacaattgtataagtcttgcctggaattttagatttcctttcaaattctattttaggatctgattacttttgatccagggagtaaaaagtgagaatctgctacggcctcagctgattttccacataggtttggaactgctttatgggaataatctgtgtaatcacttttagtcaaaccagaagagagaggaaagataagaagttaagaatccagtcaaggtaagcctgagccagcagcaccctagaatcccacagcatgcactcagcccctacagtggccagcagccaggtgctagttgctttgccttctcaactctttgtttcccttggcaatgacttcttagagaggtccccctgcagaagtgattgcaattgcaaattaagaaaatggatgagagaaaataattattttcttccattctccgaataaggcatgaggttaagcatatgagagaacaaaataaaccaattccagcatgtaaatgatcagcatctattttaataactacacttgggattctgtaaatataatgaatagtagtatatggcttttggaaaccatttaatggatccttatcagcagcctacagacaggatctgaatggtcacagctttggataatgggacacaatttaggaattgagggaaaaaccaactttgctaatctctagaacaatcaagaaaatgtgtggaatttataaataacagtggagggaaagcatgagctgccagaaagctgctattcctctgcttggcttttagcagaggctgaggaatttgcttgggttgtttgggaaattcttgtgatacttataatataatcaggcagaggttttctttttttaatatatttctgcttgcctgccaaatgctaatgattgctggatgctaattgtctacagcagttgttaaatgagtttcccttcacatctcctctgggggtatttataaaagggtaaggaatctatcaagaagtatgctgtagaaagc

SEQ ID NO: 117051 - DNA, 1064 bp, Homo sapiens
aatatctcacttttattattattttcgcattgctctagcacatccactttggaaacaaaggacatcattctatttatagaattctgtttttagtaatggtatttccatttacaaaatatagtaattctcaatggctgaaaatatcaaatcctggaaaacatagcattctaatgtgtgatgttaagactgttctcgaacagtggttggctgaagattcatttgataaatttgattgttctaaaatagacaattttgatgattcagacaattctgatgttagttctgtttagaaataactccaagaacagtttttatgtttcactttcaccctgaaaattaggcagatttgcttcatcctcaaagagcatgtttatataaaattgaatgagcgctggcagcgagctgcacttttttttctaaacaggaaaagggttaaccattacaccatctatattctgtgatagaccctactccccacccctgtggagaattgggtggcaatatgttgaagctggcagtgcactgagaaagctttgtgtccaatttcgcagttttactgaggataaaatgggagttctgatagacaaagagttacacaattagccacagcagcactaggagaggaaactgagtctcttgacactatatgagaggtgaaatactcttgcttttgtggtttattaaggccttctggaaactttcaccaatgaagaaaatctgtaagacaaggtgtgacaaggtagactcaaaagaaaaaggcagaccacttacaaaagagggtactagcaaaagggcccaaagttccaaagttcctgccatcctaagcttacaaagtatttacttgtagaagagcatggggaaagtgggataaactggtataatcgagacaaaaatgtcaaatagcccaagactaagagctgggcactctgggatttcgcctcagccctgtaccttttctatctaacatattgtcctttggtgatttgataactgcagcttcctttatgggttgatctgatcttgagtgagaacatttggtttcagtgatataattagaacaaacc

SEQ ID NO: 117052 - DNA, 1035 bp, Homo sapiens
aaggagaaaagacaaaagccttggggaaaaaacattaaatgttaagtggatcttctcagtgtggtacaattactatggatgattgtcttaatcctttctaaaatttctctaatgtactttcataatcaaattctagcccagtttaagtgagttatatgtatttgggggaagataaagtgttgctggttttgtgtttctgttatcaaagtagtataacaaagttaaaaaaactgttcattagtaggggtatgcatcaaaattgtaccttttatatgaattgatatagatgatatattattactttaccctgaacattgttgaactgtaagttgataacattttaaaaattcagctgaaatggattttggctggggagatagcttattgacagtatgcaggtgtcagttctgggaagactgttactgcaggtctggatactagaccatctactgagttcagttgtcattttgtgtacatatagcagtattcatgatcataccaactcccactgctttctgaagatgctacagggaaatctaaaggagacattatttgcctggcctgacaaaaaatccaatgagatggtcaagaagtctgaaagagtcttgagggaaaaccagtgtgcctacatcaatggtaacatcttattctttttctaagggcaagtgggaagaaccatgaccttttgtctgaaatattggttacttacactttttatgcagtagaacctggatcatgagtcatgatttaaaatacttgggaaatgacttaaacatagcaggttttgttttttaagcctttgtatcttggttggaatcacttattgaaaacatatgcatgcagatcagtatccactgaaaagtcatttacttgccaagacttaagacagttaaaataaaatatgaatttacttcagtggagtctttcaacaaaagagatcaagttggaaacattagccttgtgttagaaaatagaacaaaatgttctgtaactaattaagaatgctagctagtctctgtttttctaaaatacata

SEQ ID NO: 117053 - DNA, 1062 bp, Homo sapiens
ctcccaaagtcagagaacagaatccttcacagcgctaggcacctatttaatgcaaaaaatactgtagaattgacttctctcccatctcctgtcttcccccaactgccccctcgggactacatccattatgttaatgagctgtacctcagatatctgtgaaaagaccgatcaacccagctggttgcacttcaaaagctttagagtttgtcaatcgagactagttcaaggtccttgaaaatacacttgttctaaagattaaagattaaaaactgttacaacctgtcctggtttaacagtggtttagagtgtaggctctggaacaacaatgctaaccccgggagcctggagccgctatcgatagaagacctagtgcaagtcattcaacttcttcattgcctgccattcctcatatgtgtcaagtgtctggaagagtacctgtcccataacaagtcttcaattacctggagcaaatgcaagaaaatttaaaagctagactctctgctagctttcacggctacagaagggctctaccatgaactaagctgataggagccaaaggaatttcctcaagtcacttgtatatgaaaaatgggatccttagtggtcttcactttttctatttcaaatcctaaaatacagttgaaaccgcccatgccaacaaaactttacgaaacatcccacatgttgaagagtgactaaaagaacctgctcccaagaaaaacaaacttacttctttccttattcttttctttcacttacccctttctcctaaccctaaacccaaaaaaccacaaagactgacgcactaactgctcagaaaaagtagaacctctcacacttcggggtgattaaattttacctctggccccggaggattggtagagagattcgacttaatcaccaagccggggctgcaaaaaagccagcttaccagggcacctcactcaagtacatctgggaagtaggggtctttaatttacattacagatcgtcagaagcaaggataagataaatcagatcatttgggggctgaaaaaaacgacggtcgaatatttaatctgc

SEQ ID NO: 117054 - DNA, 1034 bp, Homo sapiens
atttaaggaataaggcaaattaatgtttatccgaaatcaaaatgagattggataattcctggaatctgatttctgtaagtttcagtcctaaagggaccttaaatatctactagaacgaagtacagtgtatttctcagattacatgacattagtcaaccaatttagttgtaacacaaagtgagaaagccttaggtgttgaaggagtgtgaaaataaaaatctcttttcatgcagtttctgcttcattttccaaggattataatatgctgagtaaacttttggcactaaggaagccagctacaggccacgtaatgaaaactattcagaaaacagttcagcaaatactactatttgaatacagttcaaatcgtatttatataaatactctgcctacattatttaacccaaactggattattcaccattctttgaagatgccttgtgttttctgttatctacttctgctcgtgcagtttacttacaccttcaccctttcaaatcctaactcttcttcaaggcctgattcagattttaactttttaaaggctatctgaatcattcaaggagaagataccctttctctcataaaaacacttagagcaaactaccactattaaatcacttattgcatactgcctcagagccatgtgtccagttattctggtttttatctggtacccacacacacataatacttagtacatttccttatatgtaaataattagtaatgtaacacatcgagtgaatgaaattgtgattagcaaagtatgacagctaaaaacaaaggaaattttgtatagtttaagtttttgtacagcagaaggtaatggaaaatatttgcaacatatgacagtgtttttaatgtcttaagtatatgaagaatttgtttcaattggtaagaaaagaccaactgaaaaataggcaaaacataccaaatttcgattcacaaaaagatacaaatggccaacaaaacatgaaacaccttgaaccccattggttacaaaaaatacaaataaaaacaatgctgactgaca

SEQ ID NO: 117055 - DNA, 1910 bp, Homo sapiens
agaaaagttaggagttcagagaagctttcttcaattgtgaaaacaatacaaaatagctagctgattggaatgcagaaaaatgcagattaatcaggataccattaaacatctctgtttttccttcctttcttgtagtttatttatgtgaatcagtcctttgctccttccccagaccaagaagttggaactctctatgaggtaaaaaaaaaaaaaaaaaaaaaaaaaaaagaaagaaattactgcttttttttcttaatcgagtatgcacatctgtataatatgtatattgtgtagtattgttaattcacatttttatttcaagagatggcatgccattcttaattttctggggtagaaaagatgactttcttgttctgttatctaacatcttgatcatagaaagatattaataaattatacaatgattgaagaaccaaggaataaattacatttcaaagtcatcttcatgattctcataaagtaaggctttttctttatctacatttgatttcttctacattgttcttataatctgttatccaaatctgcctacaagaaattgagaaaacagcataagaatgactgtttaacatcttacagagtcattgtaatagttattagagtacacatactagcaccactactagaaaacagctaaaattacatatattgtggttggacatgtagagaaaggacaagattaaaatacataagctcattcatgcctaagatgcttaaaggacagattttattaaacacttaggattattaatatgtgtctgatagaaacaggcatcctttgaaagagatagcctgtaacataggtaacttaatatacgtgtgtggatatttatgatacatgtggcatttatcttcttagtttcatctaagaataataaaagattgagtttgatttattgccttttttttttgtagtgttttggcagtgatggtaaactggttttacattactgcaagtctcaggcgtggggatgaaccacaaagaaaatcaacttgctactacatgaaatggattttcacggaagagacagctctgaaaagttttgatgcttgtggcaagagacttaacagatgtgatctatttagtatgtgtctactctatgtttatgcataagaaaacatccatagcatgaatggactcagaaaaatgtgatttgtattaatgcaccagtcatcataaaagatggtcatgatagtacacccattgctcctacttgttactattattgctgcagatctgcctccaaggttgaaaaggagactaagactgtataaacatcttcattgtcagttctcaaaatgactgaaattgttttcatggtaaaagttaatatactaaagggttcctttttttttaatgtttacatttatctctatgtttacctttttagtcacattgacctgctggctgaatacctcaaatagtccagtagagggcagtccaccaggcagaaaaggttaggcgttttggtttcacatctttgctggggaataataggggaaatggctgtttttgctaatttttagctaatatctagccaggagagcaagcacataggacagactgaaagactgtaattttacacaatacacatggcttaattattttattgggatacagaaaaatataaattctggacaaataagtcatatacctgttttcagtcctaacatttaaggattcttgagtcccaatcacataactgtggtgttactctgtcatttatatggtgtcaaaagcacttgatgagtaaacccagtagcatctttttgagtgtttcataatgcattttccaacttgaaaacaataattgaaaaatagccttattgtatattttatgccatgactaaaagtgccatttttactgatgctattagactgataattt

SEQ ID NO: 117056 - DNA, 1065 bp, Homo sapiens
cccgtatttattcatgtgtgtctctgcctctcctacagattataagctcattgagggaagagatcacattaatcttcatagttccatgtacaattctcagcacatcatagacactgataaactaagctgttattgagagcccttcccctcatttataatgtacaagagtaaaatctggatttgctcataaattgtcaggcactgaacacaaattatatctgtattacaaaaaattcacattataatgcacattgttttctgttacagttctgaaatttttgtgccagaactctactcagccataaccacaaattgatatttcagcatgaactatttaaagataatttaacaataacgtctattgagtacatataccaggcactgaaagttagtgtattatctcattttgtctttcctaacagacccaagaggtataggtcctattattttccatatcttacaaataaagaggatgagagattatttgtaaagccaggattcaaacccaggtgtgtctcagagcctatacacttaatcaccacactatattggctaagagagatgcaagcaatattgatggttcatggttggtgatcaaaatagtatctgtcaaccaactattctgatacttttttttttaaatactaagtttaatccaggacattttagtcccaaatttggatattaaaggaaaactaaatatgttacctgcaaataaagttttgttttccaaaaagaaaattattaaagggcacttcaacactgtgactttaagtactagaaatattttagtaaaaacagactaaactgaaacattgagcagtgaatcctttaaagagcaaggttataaggttttaattgttactttttttcctgcttcatttgcctgtaagtgactttattaaaaaacctaagtatatatgtcatacatttacccaaggaaagtgtacaaactaccttgaatattagacatattgatttttggctgtgtgcctgtgtaattatcttaggagaaattctttgtgggtaagtggggacatttttacgataatgtaatttcttgaa

SEQ ID NO: 117057 - DNA, 1027 bp, Homo sapiens
ttcacacatctcatattttcttacactggattcctagaagtattattgaatcaaagtatacctttattaggatctgtattaccatactgcattccacaaagggtataccattttacattctcaaaagtagtatcatctacactggtaattactctaattttaactagtttggtgggtgaaaagggacatgacattattttactttgctttttgtgaacttaaatattgtttgtgtattgatcatttgtatttcctctctttggaactgcctgttaagataaaaggcattttaaaaattagtcctgttgggagaactttgtaggatcaagaaaaaaatgatggaaaagaatctaacatttttacatctctcacatatcttcagtatcataaatacgtaagatggatgtagattaaatatttctgatttctaagtcttttatattccattctctttagatgtttcagtgtaattgtcagtaaattttattcttcttttacagttgacattttgctaaaggctgtgggagacactcctattatgaaaacaaagaagtgggcagtagagcgaacacgaaccatccaaggactcattgacttcatcaaaaagtttcttaaacttgtggcctcagaacagttggtatgaaaccaatggtgatgttttcctacaaaaatttgcagtagttcctaggcaacagtgaattaactgttgtttatagaaatgcatatggagccacatatgtcgcttttgttatgcccttttatccctttatttttatttattcattttttttttttgagacagtctcgctctgttgcccaggctggagtgcagtgacacactgcaaccttctcctcctggttcaagcgattctcctgcctcagccaccctagtagccaggattattacaggagtgcaccaccaagcctggctaatttttgtgtttttagtagagacggggccgcctcagaagtgctagaattacatgagtgtgccactgtgccctgccttatctcttgttagtggagt

SEQ ID NO: 117058 - DNA, 1012 bp, Homo sapiens
gcggggcccaaggggcggggcctgggcggggcaggcactaaggaaagcggaaacatttctaggtccgagccagcggcctaactggagtgtgcgcattcgaccgagcacagacacgttgcccaccgctcctctcccgaggtctgtagtcgcggagaaacacatgttgcgttactaacgttcagaggtctgcgacagcttcgatttgaatgactagccgggaacaccaagtttcactgtgtaattgcgtccccctactccggcgcctcctttgcgacgctccctggagaaaagcacgcccactgcacgcgctcagtcgctacttccgctctcgagtgtctccaagcaagatggcggaggagccgcagtctgtgttgcagcttcctacttcaattgctgctggaggggaaggacttacggatgtctccccagaaacaaccaccccggagcccccgtcttccgctgcagtttccccgggaacagaggaacctgctggcgacaccaagaaaaaaagtaactgaatttatttccgggcagagaggcgggaggttcagattgcatccgagtaggggtggcggccagtaaagaagcaaaatttagaggagcgcctgtcctagacctgcattttgaccagtcatcagaagaaaagaagtgtactttttgatttttaaggcctttaagttgagtgttaaaataccatctctgtctatcggtgtagggcctgatacttggctgccacacttatttttatactgtatttttttgagttggccagactgcgagctctttgaaggagggagggagctgagtggggcggggggaggggggtctcggtaattccaggtacttaacacaggagctaattatttgagtaatgttttatggtggtaggggtggtcattggcaaagcctggattagaattcatgccttccaacttaactcgcttttgcttttttccccctcccagttggttgtgaattcactccttaaaccaaaaaccaaattcttatgcag

SEQ ID NO: 117059 - DNA, 1071 bp, Homo sapiens
agatattgctacctttgattttaaaaattcttaaaatgctattaaacctatacactccatcctaatatatatgaattattcttcctcagagtgaagatacacaacagcaaatcatcagggagactttccatttggtatctaagagagatgaaaatgtttgtaatttcctagaaggaggattgtaagtaaagcatttcatagacatttctaagttttgactatgtgattaaaatatatactgtttaatcagtttatggtaaaagttttctacttttgattaattggattaggtgaattaattgccacctatgttagctataaatctaacttaaagaattatttttaaaagatatgcaatcttttttcctcttaaaaattttggaagggaattttatataaaggtaatatattaaatcgtaaaaattccaacattacagggaagtataaaatgtaaaataagaatctctcaaccttagtccttctacccaatttcttgtgtatccttctagaaaatagtttgtattgactaacatataaagtatgttatatgtgttgactaacctacaaccttaaaatttttatttatgagatcacactttgtatgctcatttgcatgttgctggttctcagtattttcaaaagctttgcatagaaacacatctaggacaagcttattctttttaatgactacagagtattcctttttgtgaatgttcataaaaattagattacattctttattttactgttacaagactgaagtctgtttttcaaatatacctaattcagctaatcaatttttctatttttaaaatgaataagaatattgccaaatattacaaacaaatacttttaaactaataacttccatgaaaatggtttgttctcaaacataaatcagtcagagaaacttagaattttctgtattttactgtgtatgatggatgagaaatactctggataacagggaatccatggtcataaggtactttttatcatgtggaacacttaacttgggtttcctgaaagattatatcatgctgtccttaaatgtccaatacatacttacaa

SEQ ID NO: 117060 - DNA, 1987 bp, Homo sapiens
ggcagaggctgcagtgagctgagatagcaccattgcactccagcctgggtgacagagtgaaactctgtctcaaaaagaaagagagagagagagacagagaaagagaggatgaagggagggagggagggaaggaaggaaggaagggagggagggagggagggagggagggagggagagatgccattttcccatattctgttgggatggatgttagtttaattttggttacatatagccttgattgtaaattatgtaagtgtttaggggtcttttaagaaggtgaattcattattgtaaacttaactatgaaatagctaaactatatttagaaaaatatgtttggaatgattcctaaattattatttctaaaatactaaaattccagtcattataaataaaagtatttcatgaaagagtttagtatcttagctcagttttcttgcatttatgtcaaaacaatgtaattttggaagagatcttgacggtaaatctatccaaaacttaagaagtgtcattcttcttttttttctggttgataatcagtcttaagctgtgtaacttactgtgacgtatggagttaaatctagtaagcacttacaaatgccccatgatctaatttccgcctacttctctgactttatcatttactaatcttttcttatctactggccttttttctcttccctgaacatacatactttgttcttgatgaaatgtccttttagtacttactaccttagcctgaaatgctcttctctaaattttttccaagccaactccttatcattagatctcagcttaaatgccactcttgcttaatattcagcctgaagtagggaacccatcaatatatcatcattgtattttgattgtcagtgtaacacttgccactatctgatgatgttctgatgtgtgtgtttgttgcttcttccccactaccagtgcttggcacatagtagttactcagagaatagtttaatgaatgaatgaactgaaattaagcactggcttcttttacttgatgtttctgaagaaaacagccaccttaattcacctagtctctgaataagttcacttaaatactttgccattgaatgtcacctttcatttgacaagtggtttttaaacaaattgtcagtttgcttgagctaatgaaaatgattcgcattttgtttccaataacattacaatttttttgtcatttagattaattggaggatctgacaacaaactgatttatagacattatgcaacgttatattttgtcttctgtgtggattcttcagaaagtgaacttggcattttagatctaattcaagtaagttaacacttgcttcttactatcttaaataacagtttgacatttaaatttttaaaaacttatatattctaaattttctaaaatgatgttagtaagaaataaagcatttcataatagatattgtgttggtaaaagaggtcagaggacatagaaacaagcaaacatttgatctgattaaaactatcataactagtttaatcatgacattttatcttgctcatgtaagttacagcaaggagcttaagactcgtgggtttcttaacacatgtatccaaaactaaccctaaaccctacctctccctgtctcctgaaaatctttcataatgtccctggaactcaaggtcagtcatcagcaaatttctttttatcttcagcctcttctgttaatattactttacattttgctctaaattaaatcttgcttccctgatgatactacgtgcaaccctttgaagtagtggccattttctctcctgcttctttctgcctttgagcctggaggtgtaatcttagcttctcattgcattttccagaccattctttcttctcaaacacctccaaattttatcttatgttatcagactataccaccttctatccatttagttatagtcatcactcatctccatctctccttcattggagattttgttaagaattgtgaag

SEQ ID NO: 117061 - DNA, 1036 bp, Homo sapiens
cagaagtattttatgcttgcgtcctgagattaagtcatcaccattgattattattttgatgctgttgttgatcttcttatgagaaagtagttctatctccaaaggggattagatggggagttttcaaagaacaaacatggtattaatatatcatatccaaagtaaattctgtcatgtactcgtggaaagtagaaactatcttttgtgttttgcaaaattttttatccatgcttcacacgttgatcacttgttttgatattagataacatacagaagaaaggatttcaggaggactttgtcattttccgattactaaagtaggctagagctgtttttacaatacccctgagttaccacatgctgatgtattgtgtcacaaaaaagaagatttctgtaattcaccttataggtactatgtctgtcactatcaggaacatgttggaagttctgtggttgtgatctttccccttcaattaccacagttcattaaatactgaagagggagtgtactgagcacacatgagtcagtcactttaaaaaacatcagttgaataaacaaagatggaagtgcatagcttattatttctgcttctgtttcatcaaatagctattcagagagaactgattttcttaatttgttcatcctctagtttttagaaaggcaattttaatgtaaaaagtaaaagtggaaaattataaaccaagagagtttacatcaaaacctcttggtcttgcatattcttttagagaacagatcaagaaaactcaatatgtaactattaaacctatgcttataattttgatattttaaatatcaaagtgataccattcatataactggaagcatatattttaatgcagagagttagtgtctctaaggtatgcatatgttgtcccaaatatgactttgtatctgtataaaatctgggagaaggcattattaataaattcgttatggaatttacaccgctattccaccagtactgaatttacattggtagtccacagaatttacaccagctacccaaacgaatga

SEQ ID NO: 117062 - DNA, 1645 bp, Homo sapiens
gattgatgaaaagaactggttatcaatatttttaaaaattatttaagtaatatcttaggaacatcatttatatttaaaaatcagtctgggtataattgagacacagctttttaaacataacatgcatttatctaggggcctttgtcagaaatcagagcttttattatgttggtctaaagttagtacatttctggtaatggaaaaaagtgaaccagtttaattcccaatacctagacaggtggaagcaaagctctgccagatcctgaaagagagaagcaaagatatactctgaatgtatttccatctattctattttgatagaaaaatggtttactataacattggaatattgggagaggagggtttaagctgggaggttgatgggattcgggggaagtataagaggcactcaggaacctgcctaagaataaaaggactccctgggggtggaggtagaggggtggggttggggagatctgttagcttttatgtatttcatgttattcttaagatggataaatgggtctgaatttagtcactactttttgaaagtcagtcctcttttttttccgaacatcctgatctttctagctctttccattcttctctcttacagacctttatctttcagtctcccagacaggacaggtagacaaggtattgctgactttgagaaatatgtactataacaaagggaaagcaaaatgatgtcaaaggcaattaattatttaggccagactcaaaaattctttgtgttaataaacccatatagtccctgtagcctattttccattctagtttctccttgtagtttcttcatcttttattggacttagtgtattttactagtatatcattgatgtcatgtttgttctgttttgtctgcctgcattgtaaaaggaaagtttaaattttttttaaacacttgtcatctaactgacaaattgcatttgcagaagtgacaatttactttgtatataaaaacgtaaaatttattttgagcatcatatagcagaaccaatcttaatttaactctcacagatttgttttttttccatctctaaattaggattctaacataaaattgcctgctgggttttggaagctgtgaatttaaaaaccaaaagctgaaccttcagagttttgcatacaaaatgggaagcagtgaaggcttagaatagtgactgttaaatagtactttttcccctcaaatggttttcagttccaaagtcttaacagaattgcttttacagttttgacctgcaggtgcatattaacagtggccaacagaaaataagatcagaaatcttataaaacttgactgtatttcaaactagaatgctcgaaaaatggaattaccaaattaccaaatcaccaaaatacaatgggttttcattgtagcaaaccttctgacatccaaacatgtcataatcagaatcaataaaaatatattaatgttttagtattgaattaaaaaccctgaatatttttgcaaagcgtattggcaaatattggaaatatttttaatagacctctagttttacaaaactaatttttcttctgatatttcctgtacgttttttcacaccataaattaactgtgtgaattacttttttaaaagttccatgtacgtggtgatgagca

SEQ ID NO: 117063 - DNA, 1258 bp, Homo sapiens
tcttctttatggaaattcctaagtaaaaatagtggcaaattggtcttttaactagaaaaattacaaaatcctcctatctaaaaaatgatactacctccaggacgtctgcaattttgtaaatttttcttccttagtagacaacatacttcctggtaaaagaaagccaaaagatggtaaacctctttgaattggattcttctttgatcccaacccactctaaattttggtagctagacctttaacttgaaacgatcaaattaaagaccctttcaaatattatacatgctgccttaattattatttagttgtatctccaacatctttgggggagcaggaaggaagggggggtaacaaaaacttcattgcttcaggtaggtataagtatagaggtcaatcacatttttagttgtacatcaaaaataactaacatccattaaattataaaacttctccagccctattcactatttaattgggtatggagttattcatttgtatcactcttatcattgcctgtgtagaatatacttattattaatactattctactaatttttctattatttccaattctgaattgataatccatggcttttatttcattgcttaacaatgtttgtatcctttatttagcaaatagtttacactggcctattttgtatcagtcaagatttttctcaggtaacagctttattattatttttattttaattaacaaaggtaggattacataagaaaagaaaactaaaattatgaaaagggaccttaaagctagtgtttctaattttatggacattgccatatataatctaatcaaagtggaagattcgtttttgttgtctatttttgtacaaaatgatgccactgaactcagatgtctttgttgactttgctttattatatagcctgaataaaaagtaatgaaatgtaattggtatataaattaaacctcaaatatgaaggctgttaacgtaggtgagaaaaatgatatgtatgcattttcttttatttgtaagcatattttcttttaaaattatttcacaaattacaaatgttcctactaataggaaagccaaatattatgcactagtggtacttactggaaattttagaattcatttatttatatttactacctcttgcatttatgcttttctttctctaaatttgtaaactgtaagctgaatatatgttgctgaatctatgctatatgacaaaacatttttaatcgttatatttttactaatgcatcaaaggg

SEQ ID NO: 117064 - DNA, 1128 bp, Homo sapiens
ggctttacttgaaagcctatttttttaatgttctagaactttattagaaaagtttaaaagagccctcacaatttaaaaaactaattttattgttttaaaatgttttaagggtttatccctaagaaattaaacaagcacaatctattacttgcaatttttatttcacagcacatattgctaataaatgccattttaaaagcaaaagaaaatctatcacaatcgttgcaagagatatttaataaggaaactaatgtaaatcatgcttcatgctatctgtcagttaaatcaagatataggtgaagatttaggttttatcatgtgaatattgtgtggtagtgcacattaatttgtatttaaatctttacattgttatcattgcatgtgttcactgtattttttaatgtgtcactgttttctctttatagattagtatttcaaagtaaccattccataccaattcaaactaccatctggtccctaagcttgttatatgaaaatcttttatcattgtcttccattgtaagtgttttatgatgagctacacctgagttgtacattttctttttcttttatttgcttctgtatacaggctggcttagcaggagctccagcccgtgctgtatcagctgtaaagaatatgaatcttcctgagatcccaagaaatattaacattggtgacatcagtataaaagtgccaaacctgccctcttttaaataaaaatgtaaaaaggccactcccaggtaaaatccagggggaagagtcatctaagtttaccatgcagttgtttaccaaaaatagaggaggagagtcttaacttttgctcttggatttaagtcaaggtactgtatagaagttgtgtaaaatcagtatgaaagttcaatgttgctgttcttgctcagtgattttaaagaaattgagtagttcctatgtgatttttttttttcttttctaaactgcattcctgtgcccacctacggcatgcctctatgtattggctactacagtgttttaaaaagtgtttcagatatttctctaattatgtacaacctaaaatgttggtgttttgtatggatcacaagtgcagcattccttaattccttctgctatatgtcacacagttgttattt

SEQ ID NO: 117065 - DNA, 1081 bp, Homo sapiens
gttcaaggggcaactgtaatttcaatctttatgttagtggaagtagctttttacttgaaaataactttaatgtttgatgaaataaaattgaggtaagagggaggctcttcctttcagaaatttgtattttaagacagctaggcttatagaatgtcaggataaacatgaaccagatgttgtagcttttagaagttcttttaagcatatgtagaatgcccaaaaagagcgagctttatcttgctgtagtatatggcaaggtttaagatattttttgttggcccgcatactaattagtataatttgaaatagaaggttgatatttcggatataccaagagctcacaaattagaaaaagacaatctaataatatgctaaggatagaaatagacaagtcatagaaaactaaatctcagtggcccataaatatgtagagatacttaacctcactagtagtcaaggaatgcaaatgaacaattagattttattttcacctatcatattgacaaaaactagaagagatgacaacatccagtactcgaaaagataatgggataatgtgaactctcatattttgatagtgggaatgtaatgtactactacttttttaaaaaaagtcgagttctgcggaaatttaaaaaaattaaaaatacacgtatcacacataccccatgacttcatttgggaactctatatagcacttcttggttcatttgtatagaaaggtatttattatatcaaatatttttgtaaattaaaaaaaaacctggagatgtattaaatgcccaccagtatggtaatagttgaataaattgtagtaactgccgcacttgcaatagcaaacaactggaatgacttgaatgtctgtcagaaggagactgatggaaaagctagattacatccgtattacggagtcctatggagctaccaaaaggaacgagaaatatctcttcatattgctacgaagttattcctagaatatagggttagcttaaaaaagcaaagaggaaggagagtacatatggaatgcatattagggctgtccagagaagagatatatgtagaaatatatatacttctttat

SEQ ID NO: 117066 - DNA, 1034 bp, Homo sapiens
acctgtaatcacagcacattgggaggccaaggtgggaggattgcctgcacccagacattcgagaccagcctagacaacatggtgagaccccctgtctttacaaaaaataaaaaaattagccgagcatagtggctcatgcctgtaatcccagctactcaggaggccaaggcaggaggattgcttgagcctgggaagttgaggctgcagtgagccgtgattgagtcagtgcattccagcttgcatgacagagtgaaaccctgtctcaaaaaaaaatttgttttaaaaaagactgactagaaaaggtgccaattagtgaatcctgaaaaatgcacggggaaaaactcaggtaaagagggagggagaaggacattctaagtgaatggagctgctgtgagcaagagttgaaggtaggagaagtctacagatttcagagggctctagtgggggtgtcaggggttgtctaggctctgacatggctaaactgcaaagtgcactccagtagcttctgtgtgtgtatatagactctaatgagcatcattcccagtgacaaaaatggagtgactagcaggtaagtgaaataaagtcaacagagaggagagtaagcagagttatgcaatttcaggacctccagcagctccattttggaaaatcattaaagcaatttaaaaaacaaagaaacagaaacaaaacaaaaaaataggataaaactacttcagtgttttcccccaaaacttccttgtagaactggcatgccttatatgccagtaaataaatacatatatttttacatattgaaaaataataataaagcagtgaaagtattctatatgatacttcagcagtggatatatgccattatacgtttgccaaaagccatagaatagaatgtaatagacaaagaactaaccctaaaataaattgtgaactttgtcaatattggctcatgaattataacaaaagtaccatactactgcatgatgttaataatcagggaaactgttgggggataacaagagaatacatgagaactccct

SEQ ID NO: 117067 - DNA, 1050 bp, Homo sapiens
aggataattattttgtatgacttagtttcttacttgaattagaaaaataaaaggaagtaaggttcagtgccgtggtgcactgttatttcttggcactttaattttaaaaaaacctctcagttgggacttttcttggttggttacaaaccttatcttttggaaaattttcctctgtctagttttaagagcattactacctttgccttcggcccttgatgtttttgttgtatttcagtgttgctgtagtacattagcaaaactcccttctccagctaattgtctaaaagcaaggtcaaacattggccaaagaatttactgtgtaggaagtgattgactgtggaaaagtctggtaggatttttacaagctttgcattttatcaatctggaactggcaagatggaacacatttttaattatgcaaaatttgctgtgtaatctcaaaaatatagcagtggcttaatacataaacattcaggtcaaatatatttattctgggaccaccttaggatttttgcatcattgccagatgggttgcaagctcttataattgaagattttgtttcctttccttgttctttgcggtaaaagtaattagtaatgaaatagcagtgtttaccctataattcacgagtgaacagagcaagtattaacctgccagtgaagtgggttttaataactcacaacataatatccaaaccctggtggcagaggacaatgtttagagggtggtaatttagagattagtatacgtcttagacactgtttataaacatgctttagttttctcttgggaaaacagcttttacttaaatggttttaacactgaagaaaaacattatatatatatacgtgcgtgtgtatatatgtgtgtgtatatatatatgtatatatatgtagtgctattagtgctatttacactgaagtacaaaatagcaaaggggacaatttggtattagtattagttaaacttttgaagttgacatataacaatagagtaaaagcttaactctagattaactgattattgtgaatggaagatgagagagaagg

SEQ ID NO: 117068 - DNA, 1139 bp, Homo sapiens
gagcaaattgctacatctctaggccccagtttctctctttgtaaaatggagttaacaatagtatggtgtgataaggattagatgagttaatacatacagttttagagccataacgtgacataataataacaaaataaaggttcattaaataaaaacatttgtagcttttttgtccgacatctttgcaaggctgcggtgtctgctgctactctccgagcttcgcaatgccgcccaaggacgacgagaagaaggacgctggaaagtcagccaagaaaaacaaagacccagtgaacaaatccgggggcaaggccaaaaagaagaagtggtccaaaggcaaagttcgggacaagctcaataacttagtcttgtttgacaaagctacctatgacaaactctgtaaggaagttcccaactataaacttataaccccagctgtggtctctgagagactgaagattcgaggctccctggccagggcagcccttcaggagctccttagtaaaggacttatcaaactggtttcaaagcacagagctcaagtaatttacaccagaaataccaagggtggagatgctccagctgctggtgaagatgcatgaataggtccaaccagctgtacatttggaaaaataaaactttattaaatcaaaaaataaaaataaaaataaaaacgtttgtatatattctccacaaaaagcagaattttattgtacagaacactgggctaaaaatcagggtacacaggaggtggagaggagatgtgtgaggcgagagcagcccgcagtgagcagtggggaggagggaaagctctatcagcctgggcggcagagctcctccctgtgaggtcctgcctgggcccaccttcccacccacatccatgggcatctcagagatcctcgagggggcactccccagtagcatggaatcatagaatctgtgtgccataccagttgtttctgtccaatttgacagttcttctcaggaaaactatgatctgtgtgtctctcttgaatggaattgtttttctctgattgttcattcatctctgatcacttaaaaagtaattggaaaaagtaaaacatattaatatcatctatctccagtaactatatctggtgattcttttctactctccctac

SEQ ID NO: 117069 - DNA, 1056 bp, Homo sapiens
taactgacagttctaattttaggtaacaaaaatgtggtagttgcattcagcatagtgcttttaagaaaaaaataatctgttagggaaaaatctatcaagaatggtaatattttaaagaaaactttgggggcatttgtaggaggaagctttagttagctattcctcataattttcttaggtagattgctgcatttcccagcaatgctggaaaaatgaagtgttactctagatgacaagcctggctgcactggaagttgtttgatctcatattgactgaatttcccgtgacgtcactgccgtacaatattctggagtgtttctggtaatccctggagttctggtccagagtaccaatgtttctggtaatctctggagttctgggtcagggtaaaatggtcatgtgtatgatgttgattgtacattaatttattctcaatgttgaggatgattgcactgtcatcttaatgtcatgcttttcctttgtagaataatgaggaagtatgacaaaagtggcaggctcatctgtaatgacgctgatctgtgtgattgtctagagaagaactgcctgggctgcttctacccatgcccgaagtgtaactccaacaagtgtgggcccgagtgccgctgcaaccgacggtgggtttacgatgccatcgtcactgagtcaggagaggtcatcagcacgctgccgtttaatgttcctgactaggtgctcttgtatatggactgatttgtttcttcttcttacacatttaagttgacctctttcttttgggtgaattttagggcttgggggaaatatcgaaaaaacatactgaagactcatgttctgtcaagccccagaacaatgtagaatgggcaataattctgtaaccttcttaactgtgtcaacaattttcaagtcccttaacttgcaaccaaagaatgtaacaatggagggatcagcatttctcatcagcaccctcatctctactctgccttcaaattaaaactctcttccctctttgctgatatctgagaaaatgtagctttaagattttcaaaactctgtagttg

SEQ ID NO: 117070 - DNA, 1050 bp, Homo sapiens
cagttctggatttgttgcttgacgtatgttttaggactaaaataagaaaagtcctaaaagtaatggtgtgactacagtacacctgtccacggagcaagagaacttacattcttctgcatcattctccatagaatttactgggttttccagatttcacttacttttactgagcatacactgtgaactaaacattgtgttaacacggtaatgaattgcatttcctttaaccatcacagcccagtaaggaagacgtaaaatcaaattacccaaatcacattctttgaaatgctcaccaggaatgtgcagccgggaaaccagtaaaaacaagcagggcctttttcagtttatatcttgttttatttttgagaataattattattttgtaattggcagaccaaatgcatttattacttcttcattttagaatcatataatcttagagccaaaaagagccttgcagctcatccatatagtgaattagtcgacaaatactaacagagaggctgctctgtgacaggcagcaggctaggtgcaggggaccaggcagtgaacaaaatctgcagggctcctgtcttcatggggcttatggactaaggccaaactcttttttgttgttgttgtttttgtacctttgcaactgaggagatttagacccagtgagattaagtgactcaggtaaggacacacagaagaattggcagccctggtgttttgaacactaagactaggtcagagctctttcaatgatgccacgtatttcctacactacggtcattaagtgcttttaatataataaacattcctaagacccatccccaacctcaggaatcagaacctgtaggaatgagacctgggattccataattttaaacaagcattgcagttaagtcttatgatctgatacatctgagaaacactgccctatatcatcagttgtccaattttcatgctaaaaaataatcctaggcaaattagcattaaagcctccttcctttctgtctcctcttgtcactcagtcttaaggattagataaaggaatctggtttaaaa

SEQ ID NO: 117071 - DNA, 1112 bp, Homo sapiens
ttcttttcctagcacagtttcagcaagttggggaccacctttaggatccagcttagctaaggcagaagttcggtttcttttctcgtcagatcatttttcaagtgtagtattaacttatgcttgtttgtttgtttgctgttaataagttgatttctttttcctgttgtctatttatgatgtttactttttttagttttttttactagctgtggcgtaaaagggagtctgtaatcttgcctcactctgacatgtccaccgattcttttcaaatggtgttcacaggtgaaaattactgaagaaagcactctgtctttcacacatcctatgtgtaaatatcggtcctgttaatggcacagacctctgggaggcaggacgggaaaaactaggtgcaaatgaaaatggacgagtgataatttgagatggtcttcaacttttaagtttgagaatacattaggaggggatctgttcatatattataaagtgtatttttgctacattttaataaatatttccctctcatcctcttccccaccctccatttgtttaagggtgggtgaacataaatattgttttttatgggaaaatgtggcctacaccctggatactattctctgtttcttgcttctgtttttttttttttttttgagacacagtctcactctggcaccaggctggagtgcagtggcacgatctcggctcactgcaacctccacctcccggattcaagtgattctcctgtctcagcctcctgagtagctgggactacaggtgcgcaccaccatacccagctaatttttgtatttttagtagagacagggtttcaccatgttggccaggatggtctcaatctcttgacctcgtgatctgccctcctcggtctcccaaagtgctgagattacaggcgtgagccactgcgcccggccatttcttgcttctttctacagtacagcctgttgtgcaaatattcagagaatagattgtgttcaagcattctttattccctatgtgtatcacattaaacaggaatattcacataagtaactcataaataaaaatatgtaattttaaaactttatccccctaggactctggggaggcaatgtgaaatgaac

SEQ ID NO: 117072 - DNA, 1088 bp, Homo sapiens
taggcaaaatagtgttcggaagtaatttctttgtgcttggattgggtagaaatctttcagaagaaaagagttattttaaagtttttccttctttctggattccttttgttaccagtggagggtgtccaggttcttggcgtcttgaacaaagaactggagaagacgcacaaagaaagcgaggaaagaatgaagaagacatttattgaaaatgaaactaccctccacagtgtgggagctgcttgagcataggggctgaagggcccctacagaatttttgggaatttaaataccctctagaggattccattggttacttggtgtactccctatgtaaatgaagaggatgaagtaaagttacaaagtcattttctccgcctatgccatatggagaggacatttcttgtcatagctgaagtgggaatcagctttatgttcccagcctcctgaccctattttcctgcctcactttggttctgatcgccagtttctttcctcataccagtgtcttggggaacaccgctacatcagtaaactgtatccaatatggtgcagtatagaattgttctcatcacatcatttaaagttgattattacaggaaaggtgctgtggctcatgcctgtaattccagcactttgggaggctgaggcgggctaatctctctctcttttttttccctgagagggcgtttccctcttgttgcgcaggctggagtgcaatggcgccatctcggctcactgcagcctccgcctcctgtgttcaagcgattctcctccctgagcctcctgagtagctgggattacaggcacccgccaccacgcccagctaattttttgtatttttagtaaagatggggtttcaccatgttggctaggctggtctggaactcctggcttcgggtgatctgtcctccctggccttgcaaagtgctgggattataggggtgagccactgcaggactgattgagctcaggagttcaagaccagcctgggcaacagggcaaaactctgtctctacaaaaaatacaaaaattagccagcgctgtggcccgcgcatgtagttctagctacttgggaggctgaggcacaa

SEQ ID NO: 117073 - DNA, 1123 bp, Homo sapiens
tgtttatataaacgctctactaaattaaggctcttccctgcgcagtacaaggtttccctagtagtttggtttgcccaaaagaaagagaaaatttgccaaatggaccttttcagcagaagtaattttgggggcatctttttggaaatgtacccgttgccctgccttttttgctggctgtcatctgtttttatttcactcagatttaccatatagcattcagagttgttggaatgaaaacttatagacaactatagaaagtgcagttcaacttggaaaactcatttcaaaactctgttttataattttgtttagcatgaagaaagcagtgtcactgataaatgcaatagatacaggaagatttccacggttgctcactcggattcttcaaaaacttcacctgaaggtttgtatttgtgtgtttccatgccttgtaatcttccttctgatttaattgaaagtctgattatttggagaactttttgcaaagcatagtgttctccaatatgttcttagagacactggttctgtggaagatttggtaatgtttcatggtcagaagtttgagaaactctgtcttcaataaagttaaatgttttaaattatggaacttttcagagtattttatatgctagtgtttgtggtatgtattcgagggtgattatggcaggtaacattttccaaatgtgtttgaccttggatctgttttattatggtatatattttgggactaaagttctaaaaatatactttagggaaaaattctgatgtcttggttttatttttccgcttaaaaataattctgtggtattttctatcaactggtatttaatctttcacttaattttgtttctctttcacttttattttaaggatatggttgttttggacatgtggatgctttgtaattctctacctggcccaatccaagttaatttagttaatttctttatcaggttataaaaatttgattccatctcatatttatggagcacccactaactgctctgtgcagtgccatgtatcaccatccattgagaaccaagactcttactctgtcatcttgtttttcttggccaagagccagcctcaaaactgtgcctttcccctttgaagtgtctttcaa

SEQ ID NO: 117074 - DNA, 1003 bp, Homo sapiens
tttctggaatctctctttgatttcattgacttatttgtctatgccaatatcacactgccttaattattatagcttaatagtaagtgttaaaatcaggtattgtgaacccactgacttttttcttcttttttataattgttttggcaatcctagtttctttgccttttcatatgtttgaaaatcagcttttgtatttctgtaaaaaatcctgcttggggtattgattggggttgtgtttaatttgtaaataactttattgagaaatgactccttaataagtattgagtatatctatttatttaggtcttctttgatttcttttatcagtgtcttttgttttcagcttatcaatcctgcccttattttgttaggtttgtaccttaagtactttttctttctttttttttttgttgttgaactattggtagtatttttcaaattttgttttccaatggcttattgatagtatatggaaatacagtagacttttctatactgatctctatcctgtaacttggtaaattcactaattagttttagcagctttcttataggttttttgtgatttcctttgaaggcagtcacgttgtctgtgaataaagacagttttatttcttccttttcaatctgtagagcttttatttttcttgctttattttactgacaaggacttccaacgtgatgctgaataggagtggtaagtctgaatatccttgccttgttcccaattttagggtgaaagcattcaggctcttatcattaagtaggatgttagaaaatgcccctttattgttttcacttctctacttccctttttaaaaattctgtattcttactactctcaagtgtcttctatgtcattgcttcattttttatcattttaaagtctactttttcctatatcctctatagattttaagctttccatttgtttccctgcaattctttttttaagccattttcatttttaaaaaaaattcttggctttttaatagtagcctgt

SEQ ID NO: 117075 - DNA, 1066 bp, Homo sapiens
gctctgtggcccaggctggagtgtgcagtggcacgatatcggctcactgcaacctctgcctcctgggttcaagagattcttgtgtctcagcctcccgagtagttgggattacaggcacgcaccaccactcctggctaatttttttgtatttttagtagaggtggggtttcaccatgttggccaggctggtcttgaacccctgaacttaagtgatctgcccgccttggcctcccaaaatactaggattacaggtgtgagccaccacacctggcctgattttagtcattcttaatgcattcaaattgttgttttaaaaaaacgttttgtatagagattatatatttttatattcaaggaggttggtgtgatataggctatttcccaaccattactagactaagaactccaaaagtgattttttaaaaatgtgtcttattttatccaccccactccatttccattttagggtttccatgttactcattgtagaagttggagttcttacaattgtctttaaggaactacatgccctgttgtctcctcagcccacaacctacattgttgaccatctccttttaacatcctctatctggcttattgaatacctctaatctctttacttcaaaagttctgctggatgttcatagggctggcttggttcctttttccagctgattgtttaaatgtcacatttgtcagtgaatctttccctgatagtgccacctcctctgtggcattttattatcttatttttctccataatatttattttttttgtggcccactatatattttacttatttacttttttgtctgtctctaccaccagaatataagctcctcaatggcaataatttttgtctgtttgtttactgctgttattttcactacttttggtctttgggagatagtagagtgtcagtaaatatttgttgaatgaatgcatgtgcaatattccatccttacaaactgtgctatttttaagttcactttattcggtttccttatgaagagggatattttttttattgacagagaaaggacaataaaaggaggaggctatgaa

SEQ ID NO: 117076 - DNA, 1087 bp, Homo sapiens
ttgtccagctagagcctggaacaataaatatgatggtgacctgaattgtgtttttgtgtgtgtagtagtatagtatgcctgcatgtgtttaaatcccagcttttgagaaatacaatttatttattttttttgagacggtgtcttgctgtcgcccaggttggagtgcagtggcgcgatctcggctcactgcaggctccgccccctggggttcacgccattctcctgcctcagcctcccgagtagctgggactacaggcgcctgccaccttgtccggctaattttttgtatttttagtagagatggggtttcaccgtgttagccaggatggtctcgatcccctgaccttgtgatccacccccctcagcctcccaaagtgctgggattacaggcgtgagccaccgcgcccggcctacaattttttttataccacaggattttactttattattaatttcagaacaacttgaacgtgattattaaagatcaaagcattgctatgaaatactttttgttactgcggcatatagggaaatatatctttcagatatgataagagctttttatcatattttatactgtaatggattatcttttaaggtagaaaagggggagtgactttttcctcctaagtagataagactatctcatcttaagacaaaatagaattgagaatgaggtattagagaagatctgaggcaggagattacagtgactgaatgataatagaataatggaagaaatgttattatttataacaggaattgaaggatgggaatattattacttttttgttaaaactttcgctattcattctattatgcaggtttctggcttctttaagaagtatctagcccagattatatgactataaaattctgtggaattgacttgagtcttacatataatgtattagtttattacagtgtttcaaaagtatcattttatttcacacattttcactggaacgtaatatgaacttagtggttagagtcaagctattagagtatgtctggtggtttccctttatgtgcagtttcactttccatagtttcagttacccgcggtcaactgccgtttgaaataggt

SEQ ID NO: 117077 - DNA, 1114 bp, Homo sapiens
gcctccactgggagttttggaatgcatccccccacagtgggcagggggactactgtgtgctctgcagtttagtgtagtgtaacctcaggcaaattacttaatctttgattctcagtttctttatctgtaaaatataggtaatagtatctatctacacaatttttatgaagactaaatacctagtatatgtaaagtgtttagtccagtgcccagtattacagcgtgtgctcaataaatgctggctactaccatcatcatcaataaaacttttttgtttttggctaaaataaagaaatcaatccatttgttttaattcagagctctcactaaatttatttcctgatgaagttattacctcttcccttgttccttgcattccctctcccttttttcttgattatatttttcacatgtatccttactggaaattaggaggggaaaaagagcctgaaaagtcccttttgtttcttctgtgaactgagtaagttattcctttaggtgtaggatgatgatctggaactcactagcatagactggagctattccatgagtgaaaatacatacatacatgcacattccaagtagctatatacttcctttgttttatttttcgtgactacctaatgttaagtctgcgtagctaaaagcattttgtatgttggaagtgtactattttgaccacatacattggatatgctttaagcatcatgagttcagcaatgcttgtctttgggattctcaagtccttctagcttctttgttacatcttcaaagtatgcctatgtgtctgttatatttttaggcagtaggaataaaagagtaatgcttctagtaagacagccatgttaataagacattcagattattcaggaagatgtgaatatctagatgtgaaatctaactcatttgaaatatgagcttgagtacatttatgtttttctgtgtttgtattttgagattttggatagatgcatatatgcacattgattaatcttataacttgcagagctagagcaccattttcattaacaaatatgctgaggaagaagaggagaagcacacatacataaaagatatttctctttcatcttgtatgtagacttaagtgacttct

SEQ ID NO: 117078 - DNA, 1037 bp, Homo sapiens
tggcattgtacacattttgtgcctgtgtcttatatctcctaaacaatagacagacacataatgaggtatagagctaccatcacctaggcagaagcatgccatctccaagtgttatggtgtgccctagctgtaaaggaacagttaactactatacctcttttcctcaatgaactgctgcctggaattactgctctttctcttgtttaccttctccttgattttatgatttggtattctattctttgtactcttcatcttattccttatgttaatttttatgtgactcctgttattaaggaccacaaactacttttctttcaaatatttacaaatatgaaatgagaattcttcacaggttggaatattaagtaaaaaggaatgagggtatagagcatgttttaaaaaacaagtttattaaaggaaaggaaagcttttacaaaaagggagattaaaagttaccactgcttagtttatgatataaagtatcttaaagtacaaaactgtcatacttatgaagttggtgttggtttaaaacaggaagcattgggtacagttctcataaatgtgtattttatagggtagttatcctgaaaatatacatatattaaactactgggaggattagaatcactgtaaattgtgagggattattttggttgtatttacttttgagctgttgtactgaaaacttactgtaattcactgaagagtacggtttataaggagctccttatcttctttttcacttctaacatacaaatgaaaaatgcagcctgcagtgaagttttaattgctatcacactggataacactgtttgactgtggtctcctttcttagaacacttctgtctcgaggctttcctgttttgctattaattttatcacaaaaactaggtgattgtagctttcctgcagtattttgatatgtattctagttgtttttggttaattgtcttagtgtttgtctactgtgtttagcaaagtgagattattttcctgttccacagatacctcaaatcgagttttctgacttaaag

SEQ ID NO: 117079 - DNA, 1665 bp, Homo sapiens
atcatgatttggcttttgaaatttgtatatgatcatttgccaaaatgaaatatattaaaagctttctacattattgacttttttgttacattctgtcacttgtattaatttcttcatgagaaaaaagaataaaatagtccataagataattgaatggctctattaggttatgatgtaactagttctaggcccattgtagtcagctgaaaattctttatttctagagagtaatgtcatttgtaacaaatgttgataattttgactgacaccaacactttaactttgaatatcttaaaatacttaaattttgctattaatcttagtacatttttttccccagtaaatttcctgttaaagacaaacctgttttgttaatacagggattccaaattttatttgtgcatcttttgaggaaggatccttgtgtttcatttttttttcttttacagtaactgtggtaaaatcaccctgacagtagaatttttatttatcttaatgttaaattagattataatcagattgcagaaagtactttatgtagaagtaattatgattttgaatgaatttggggcttctaatactagttttctgacttagagctcttcattcttatttccaaaatatatgacaaattctgtttagtgtgagaaaatgggcaaaagttcttttttaaagtgtttactctgtgctacacatagtatcacttctttttgtggttaaaacctctcttccaggcatgatttcttattattcttattttattgataaatggagacacggaagcacagagaagttaaataatattcccatgttatacagatagtaaacagtagacctaggatttgaatccaggcaattttatttgagttccagtttatcagtaggatgctgtatcaccttgttaatttaataacttagcagttgaaattgtaatatgtgtatatgtttcaaggtgttgaaagctgttgtaaaatgtaaggttgttcataggattatcgttacatggactctagatttaatttttctttcccctttatttgactaagttgaaacaattttacatttttagtcaattagaaacaccatttattcttatgtagtaagtaaagtataaatgatgtcagttcaacagaggctgccttttattaacaaatattattgtaagggctacatgacatcaatgatgttgatgtgagcaaataactgcatcagttaaaaagaaaagatgtcctcagatctatttaggatagatttctcagagaaaaatatgtatgctattcaaatcatgaattcttgttatagaaatttaaatcttttcatcttaaaggtggtgttagtattgactgatttggaatgaccttcacattttttagctacttatgtgagttcgtctgcattttccttttttttttcattgaagtatcacgtatcatatctttattagaataaatcacactaaagcatactttctcacccttaattacacatacaaatgagataattcaactgataggacataattcaaatataaataaaatcattctctcacatatttaacattgttgagtggattttaaattgtatatatttaaggtatacggcatgctgttttgatataaatatacatagtaaaatgattgctactattaagaaaattaacccacc

SEQ ID NO: 117080 - DNA, 1048 bp, Homo sapiens
atttacttagtagctttcagctataggactcaaaagtctacaaatagcctcaaaacaccccattgaggcaagcatagagtaatcattattttttgttaaaagaggaagtgaatggtgttatttaattgtcagttttagaataagagaataaaacatcttttaaaaatatgctgctagttacagcatggtctttttttaaaatgagaaaccagaagtttttctccttcatgttaagggatggtccaattttcatccccattttcctttggttatttttgccacttttttactgattgtaattatgtgttgacctcatttgattctaaagtataagaaaatatgagaattataagcataaactttaagtagtttcattgacctattttaatttgtgaaatctttttttgctataaacagatgagtacaataatttataggtagctttgtgagtgggtattttgtttccagctatacagaagttgcataatagctacccactcaggtattttagattggcatggtagtaactgtttaataataagactgctactacataatagcatatttgtgcatcttttcgacactacacatgaatgacctttatgaataaaatagtgctacctaattctatatattttggctatatgtttcctaaaagtgataatctttggagatggacagatcttacataggttaagatacaggataagtttaaaaatacaaattaaaatggagtctaattaatagtcgttcctgaaaaaatataagcctttcccatgaggacattttctgtcaagaggtaagtgtgggtcaggctcatttggaggctgagggggcatctgatttcttcataatattatataaaatttgtgagtggctaagctacctcattgtttcttctgtggataagggcctgctgccttgaattctagtcagcctggatgggtggggctgatctaagctgagggtcttgatagctgcagagcacacagtaatcatcatacctgataacaccatattgaaatgatcaagacaataatgataatag

SEQ ID NO: 117081 - DNA, 1194 bp, Homo sapiens
catcctgtgtattctggtaagaaaaagagaggatagtatagatgattgctgctaatttttaaattgacaaagtgaggaatgtgactatattggtttaatgagtgcctaatttgaagaattctaacatagttgttttttcccctccatatgtgttgattgtgattctattgctttcagccaaattattttaattagatttagattcaggaatgactgcctcccacagtttctactcttgtaggctttacttacactgctttaaacaataggggtttacctttatattaggagcattaattatctattaattttcctcatttagaaccattaaatttaatatatcacatttattaatataagagaaaattatagaagtcaattatcttaacaaattgaggtcctacaatttttgagaagtgttaagtttattatatttaaaaaagtctagctgaggattactatttgtggtttcttttttcttcatgttaataataatgtagagagtgcttagactttgttactaaatagctgtgtgccctgagaccaaaacatttcacctccctggccttcctgcatttatgtacaaaataaagggttaagctgtcctactatccagttccaaaataactctgtattatatttttgacaaataatagagaataaggtgaaggaccagtggtggcactggtatgtagtaaaaacagtacagggtttgttatcacactgtcttgacacttaggaagttgctagaggatgtcaagcagattacttaactgattgaggctcaaattctgatctgaaaattggaacaatagtaggtgcctcacaaggtttttctggaaattaaatatgacagcaaatataaaagcatctattacagtacagtttcattcattgatatcttcatttccttgaagaggtctttccagattggggctggagaattaaaatgctcaggttcttacaacaccattatttgagctggaaaatatgccctttaagcaacattttcgttctacttcatatctatagaaagttgggggcctgaaggccttttgaattttgaatactttccatctcttttagtctaggtggtatcactttggccagtacaactcttagaatttttgtaggcattctttaatctaattccataaccccctcaagttagaagaagttctttataattctttt

SEQ ID NO: 117082 - DNA, 1029 bp, Homo sapiens
tctcccctctctccgtctcccctctcctcccctctctccctctcccctctctccctctcccctctctccctctcccctctctccctctcccctctctccctctcccctctctccctctcccctctctccctctcccctctctccctctcccctctctccctctcccctctctccctctcccctctctccctctcccctctctccctctcccctctctccctctcctctctccccctcccccccctttctccctcaggctgaagtgcaatggcgtgatcatagctaacggcagccttgatctcttaggttcaagcgatcctctggcttaagcctctcaaagtgctgggattataggaatgggccgccatgcttggacagcaaaacttttaaaattttcattttaaattatgttttcttaagtgtttttacttaatccttagtgtgaaagtctcctattactgaaagactaattcattcctgtctttgtagttttgactttcattaatctaatggatttgaggatccacatctaaaactttaagaattaatgtacattatgtaatgtcatttgccttgcaaacagttgtttttttttttccccccctgaggtcagactaatttattgacagttttgttgtgcttgacaagtaacaggtgctaacatctttttcagtcttgtcacagggactagagggtctaggtcaccatgttcattaatgtagtccaggaaattttatttctcctgtggctaatcatttacatttgacatgaatctgtcatctgtgcctctagtctctctgcttccacctttgtcttctatagtgtgttgttctcataatagtcatacttttaaaatataattcagattatttctttgctctgtatattttacaggctttccttataactcaaagtgaaacccaaaggcctgtaagaacccacatgatctaaactcatgctgcctatttgatttcacctcttaccttgtttcccagcccctccactctgttatgaccatagaagttgcct

SEQ ID NO: 117083 - DNA, 1026 bp, Homo sapiens
gggaggggttgattgtattgggtggaccagaaataagctgggacatttggaatgggttttgagaaaggaaagaaagagacagctttctctctcatcttcatatgtttaaaatacatgtaaatgtaaatgctctttgcattaatatcttttcatcttcattgcttcaactgaagcttttattatctccatcctaagggactgcattattctcctaatttatcttcctgccttcagaatcttcctcttccaacctagtgtcatttttctaaaacaaagttctgatatgatactttcctgcttaaaatgtctaagtgaccccccccaccccactgcagaataatgtgactttgtaggatcagatctctgcctactctgttagtttcttttcatcccactttcccatagtcatcctaggaactttctgtattcaatttttcaaagattttcaagcatcattttcttctcctttgcatattttgtcccttctcttctcccttacctttgcgtctggaaaaatctatcaatcctttaaaacttatatgctaccttgtttgcccaaacctttctcagtactaagtggccatttcactttgaacatgctttcatttgtatatgtatctctcatcccacttcatactgagttttgtttccttattcatatttttccttttggaatttacacagcacatagtgggtgcttaataaacgtttattatctgaacaaataaacctgcatacttggctttaatattcttttactcagataatatgagcatgtaccttaacttaaaaagatagggttcagaatggtacacactatacttgagagttatttgggctcttttgtgttttctgcctgtaaaagaaataaatacttcattttcctaatgtttaggtatttagctgtatgatagataaagcaagttagagataaggaaagtaaggtgaaaatgagccaactgcttaaatgaatgatggagttgagatagaaaccacttcattttggattgtcttcttttattctca

SEQ ID NO: 117084 - DNA, 1386 bp, Homo sapiens
atgcttgctgagtttgcaaaaatgtaaaacgtacaatgtgtaacttttatcttcaggaagtttataacctaataaataagattcaatacacataaaacctttaatgtacgattaagtgataaagtattaagactataagtgttgtgggagttaaataattttaaaacagattttaggaataatctaatatctcattttattgacgaggaaacaaaagtctggactagctgtttaactcaaaaatctgcccagagttacactactggataatgtcagaaccagactaagaacgcaggtttcctgactttggcctggtactctttccattcgtaaatacccacgagcctgtgtggaatgggcttgattcaaagcatgtagaagaaatgagacattgaaggttatgggtaggtggtggggagaagagctgttccacaatggaaggaacaagaaggaagcttaaaagacctggcacagagcataaggaatggcctaatgagagtagaaggtatacaataggaattaatttcagttagtaacctgggcctggattgaagcagtccttgcaaaccaggtagtttttatgggataggcaccagaatgcttttatagatttcttgagcaggatgacttgataaaaattatatcagttttatcaactggaaggtcagtgtgatggtaaccatgaaagattgaagtaatattgaggcaggaaaaggtagtagtagtaggaatgaagtagaaaactcaaatctacaagacatttcttgggggaaaatgattggacgagatggcagttttctatagaaaataaaggtaagaagagtgtagcaagcagaatgctatttccatggacagaaataaaataacttggaaggagggctgggatgaattgaggttttttgttgttactcttgatattaaaaagattattactcagtattaaagcttactgtaaaatataggattttaggtttttgagagctttccatatctttggacagtcaatactgaaatttttgaatttagggttaattgattatatctgttgtatacacttagagacgcttgggttacctctgtacattttcagttatatgtataaaacatttttgaatggaataatacgtacattcaggtttatagaaaccttgatggatatgatttaatacaaattagcaatagtatatctaaatttgtaattgtcactgatccattgcttaggatatattttaaaatatgttcactaaattctgttttcagttaagttattcatttatcttttgtttaggtcctaggccactgaaatggagtacaagagaagtgggtattttttctaatttgatttttttcctgtattagtgttgggataatggatttgtatttcat

SEQ ID NO: 117085 - DNA, 1352 bp, Homo sapiens
aatacattaaatcttaattagtatactacctatagtagcatctggtgttactgaatttttaccatcttctgaaagcagtaatcattctttacctggaggaaaagattccagtaatctgttttattaggaaacttttctagccttcctttcagttacgggatttattgaaaactacctcatatacatatgcacatatacccatatatgcatatgtatatatacatgtgtgaatacatatatggctatagatctgtgtgtatgtacacatatagacacgtgtgtatgtttttgtgtgtatatgtttttatgtgtatctgtatgttcctttctaaatagcattctatttcataccttggaaaaatataaaattaaaaaatgaggtcaagatggcgccttttaagaaataagttgttataacagttcctttcagcttcacatcataagtgttaagaacacttgagtatttttaatgtaaacatattttagcatctatttgatttttactttattttcttgatactttcagatatatatttgctttacattattctcagggtttcttatttcccgaaaacactttgaatcatttccactgattctttttcctcccttgttagtttacatgtatcatttgtatgatagtgtctggaagtaaaagggcacttgagaaacaaagttgaataaaatttcatcatacttaattctgaaaattgttttctgaaattattagctcactgctgaaatatcttcagatcaaacgttcagaacatcagctcccaaggagcttcatatttagtttatggtggggtatgattgtgtatttcacaaaattcatgaaggaaatttgtacaaatttattatggattttaggccagcggaactgtttaaacttcctactctatttgttccattgagtagccttagagttgaaacagcagtttccatttttctcatgggtagatcaacccatatgcacatttatcattgatttctagcactggaaaagcatagacattggagacggtggtcgggcacggtggctcatgcttgtaatcccagcactttgggaggccaaggtgggcagatcacctgaggtcaggagttcaagaccagcctggctaacatggtgaaacccagtttccactaaaaatacaaaaaattaactgggtgtggtggtgcacgcctgtaatcccagctacttgggaggctgaggcaggagaattgcttgaatccgggaggcagagattgcagagagccaagatagtgccattgtactccagcttgggcaacaagagtgaaactccatctcaaaaaaagaaaaaaagaaaagaaaaaaattggagacagctgtt

SEQ ID NO: 117086 - DNA, 1017 bp, Homo sapiens
gcgtgtgcctgtagttccagctactcaggaggctgaggcaagagaatcgcttgatcccgggaggcggaggttgcagtgagctgagatcaggccactgcactccagcctgggcgacagagtgggagtccagctaaaaaaagaaatatatatatatatatatatatatatatatatatatgtatatataattcatataaatatagtactttatttaaaaataaatagcattttctcctcttctcatttgtttatacttttaatatgttctgtttacttgtaatcaatgtggagtcttcttttaaaaaaaaattaacattgctgttgtgaagaaaatttgcagatgaatattggaaaatatactgaatacctagaaggaaaataatgttttttgtccttcttaatatagaggtcaaaatagaaaagctatttctaaagttgccattcgtgggaaaggaaaggccttatcatttatagaatttgatatcagggaacagttgttctgaagtaaaacaatccagaccattaccacattgataattttctccaattagacagattagaggtttaatcctaaaagaaccccagtatccaatatttttgcctacatctttaacattaaggaaatcctgtttttaaatttatatttttaaccattacacaagatctttattattggaaaaaggacagacgcaaattaatcagaaaatttctcattgaggaagattgagtttttaaatgtatgttaacaaaaggtagaaaaactcatcacacttagcatgtatacagtacttatatggactagaaagtttgttcttgtgctttcagtagaagcataaaacaaatctgatgttgtcatagagatagtttcataataggttatgtttttgtacaagtcccatattttcactagaactattacaaacattacagtcatcagcagatgttacacatgtctagcatagaaatttctttttttgtttttgttgtttgtttgtttgagacggagtcttgctctgt

SEQ ID NO: 117087 - DNA, 1050 bp, Homo sapiens
tctttgtcaggtttgggtcataaggttatatgttaaattgttttggatacatagtcggagcccaggttattctaaccttgaaagtcagttatcaaagctgaagctttctatgatagacaattgggagataattttggttcttaagtagaagaaaccatattaaagtgtgttttttaagataataagacataacagtacatccaaaaattgtttgtaggtacctagggagcaaaatcaggcataaagtctcagataacaatctaggtactgagtttctcaaacacattctgtctcattcatgttcttcaggagtgaagactacgtgaattgagttttgggggatttaatcaggaagtaaaggaattctaagcccctagagaatgtcacagtagatgactgagaggtgatcatgtttatcttttccctgtaattctttcattccattttttttttctttggaagaggtgaacatcgtagataataaactttgggagtgttaggggatggaagggaacatgtctgtataggtcagagtttctgaggttggtagccttggactttttgtgagagaaagaagagtagagttataaggatccagggatacatatgcaacccaagcattgtataaacactggaaaaataatataactcacacgtctgttattccacattttcaaatgtacttaattactttgtaaatctaaatcatcaactgaaaaattatgtttctaaatttgtggcacctgtagttaatgctttcaaacaacaaataataacagcttatacctattaccctatgggaatctgtagagtgggtttaaaaaattattttaaagggaccatcttttaaatgaaaccctccctataaacttataaaattaatcagggaagaagggatggggagaaacaaaaaccaagcttgcagcacattcagcgttaatcactaggtgaggcttgctctctggtctgcttcttcatagttgtttggtgcctattgtcctacaatcacaaagaccttagattataattctccttaactgctccatagaa

SEQ ID NO: 117088 - DNA, 1060 bp, Homo sapiens
ccagccccttgccctctactatctccttaaaatccccagcccagaactcctctgggagatggatttgagggtctcctcccatctcctttctcagccaccctgtggttattaaattctttctgtgttacaaaccctgctatctcagtatattggtccgttactgtagatcaggcgtacaaatttgttggtcttgaatctaaacaccagtcccttaatcttattactgaggatactcttggctatgtagttactcatggttacattgctagttagttacagaaccctggtgagagcctgtgttttcaagatctcttagaaatgctgtgaagaaaaggtcttaggtttaggtcttagtagtaattatttggtttgactttggaaaagtgtagatacctgcatctcctcactgtgggctatgcacagatgaaatgtagcattattacgttttgaaaggtgcaggatagcttctgtttttcaacattatgctttagttgttctagccaccattctttatttaaatgagtaggaagccaagagcaaagtaaagatggatttttggagtcctttgcttattttcccacattttttcttaccagagaacacataacatagacaggtagataggaagggagggaggtagataggcaggcagttcaaccagaaaaaaatcaagcctgttttagcaggttgtgaaaagatgaactgaatctgtcaatgtccgcatcttctttagttaccaggagtggatgtgggtaagccttggtgcagcagataatactgataagtgtatatgttccaaatagagatgtggtcataggaggaaaaagaatgttaatgccatctgggatgttaagaagttagggaaggacacagagcataattgagatgaaattgtaacttcttactctcttcagtgatagtcaaatctaatttaagtctgttactctattctcatgaaaacattctcaagagttgaagaaaataaatagtaaggcagtctgtatggaccttaacaaaacttagttttgactattggaattaaattttaatattttaattt

SEQ ID NO: 117089 - DNA, 1291 bp, Homo sapiens
ggtgagagctaagtaacagcaaatctaacccaggattgtaacaggaaaatgaaatacctgaaatgcttaaatgacagcttttcaactgttcaagaaagcaactgattcaacttggaactcgaaatgtaacaagcaagcaacatgcctacaatttgcagccaaagggaattacagcttttataattctgaatcctgtaggaccaaaaacactcctaaaaagaattaagtattcattatcaatctgttctctgtttttgactatgttttgactgagagcttcttattagcagcccacactctctcttctcaattgtatcagtttgttaaagtaggtgtcagcacatttcacagatggaaaaaataagtggtaaaagtatatatataaaaggcacagatctgaaattatattatacaaatgattgatttttatgtccttttacaaacacctttacatttgaagaagttcactggtaagagatagacagactaggtgaaggttttccgtaaaatgaaaggtgtcagactctgaagagactgctcttatccaactcttttctaagtggcggcttagcagagctgtcaccctttttccctagctctcctgcggctgcatgtgagctcttccctgtgctccgccaccattatactttaagggatctcttcacaaaacagactctgagaaccttttaaaatcagtactctttacccttataagtgaaattatccaattggatgtttttagaacgagtactattttttcggaagttcctaactcgatctgtgtgtaaattatttacagatgaatgcagttgcagccaaatcaccttatttaaatgcatcattactggacacttcaatggtttctccatttgaacactgaattttactttacttcaaatatactggcacaagcagtctacatcattcatgatttacctgttttactgtattaaagtaataattttacccatcttcaaagccatatgcattacattattgctaccatgagaatttatgtaaacaatgggtaattgttcctgtccatgtgaccttgtgctaataattattctaaaattgaaatttttttcttttcattgctattcattacttttttgtttttaaacaggcagctttcgattgccagatttaagagtgtgttcgttagcaaagctgccctagttgattgacataggtgtccaatggctttctctgtctttccttgatagtatttctatgaggaatttcattgtattactctgatgctgctgagaatttccctgcctgcttttgt

SEQ ID NO: 117090 - DNA, 1027 bp, Homo sapiens
ttaaagagacaacagttaagaacttcatcgagctcttcaatagaagacatacactttaaaaaaaaatcaacttgttgatgcagcatgctgctactatgctagaattgctttaatcttggagaaaaacaaatttttggaactctaaatgtaaaagtttcaaagaaatttaggatcatccaaatcgttcgtctaaacaactgaagacattaaacagatacatatttgtaagtgacagaaacaattactgatgtatgtattatccagtggtactatgtcaaagcccagtctctccctcacaaacctggttctgtgctttgctggaatcattccctgggtgtttaccccatataaggagtatgagctggagattttcatcttgttgccagtagaaatagatttttatgtcttaagtagaattgatgttgttaaattgaatatgaactcctggggagcctacatattttttaattttcaaaaccaattgtaaaatgttgaagtatactgttagtccttctatggcacagagggtacttacttatgaggttctcagaacagaagctttaggtttgttgaataaaacttaatgggaatttaagctggtttctaactattaacagatgtaacatttagggaaacatttcaaaattacattaaaccagctaaaagtggtcaggatgacatataataaaatcatcaaagatttgagaattgcccaatttaagttcattcaaaactcttgccttttaacccattaatcatgaaaaactctgttcttaattgtcatgcagtccagtaaatatgtgcagtttttctgtcaccaatgccaagaacaatctgacaatttactgatagttttattatagtggctacaaataattctgaaaatggtattttaagaaatatcttgctgagaagcattgtttcttccaggaagtagcctttcatattggtctaaacagttcaaggcgatggcctcctactggaactctagggcattactattttcagaccttgttttttgtgcaac

SEQ ID NO: 117091 - DNA, 1420 bp, Homo sapiens
atcaaattggtcagtgcagcctgcagctggggacttctaaaaacatgttaccatgactagaaatttttatttcagtgcacttacttgacatctttctggttattattgaccaaaacacttgactcctgcctcttctttctttttatccattttgttgtccttattttgcatatttttgcatatgtacagatttctggcttcctcattcctatcaacaaccagaataacttttagtggtctaacttgtatcttcacttatcaacttaaactgttctttttgaaatgttaccagtgggttcagtgctcctgtctctgttctctgtctctggatctctcttcaacctttggttccactggccagccattcttaactgtttcggtttcagaaatattttttccctttagttttataataataattagctaatttttcttgagcacttactttgtatctttgactattctaagcactttacatgtcatatgatctttaacacaatccttagagatctaagtttgtattattttttccactttcagataaagaaggtaaggcacagagaggttaattactttgtttgaggccacactaataagtggtagaatcaggattcagacacaggcagtctgactaaagagctggtacttttcctctttagatgctatactattctgatgagtgtctcctctcatctttttctgtttggatctagttgtgtatattttcatttgccctacacttacctggttaggttaaaatttctacatccctcaaaactgctgaagtatcagttaaaaatatagttttcaacagaatagaagtttaatacatgttgtgaaccaatttcttcgtgttgccttttgaaattaaatttaaagagagcagtcattaatggctcaaagttagacctaagaggatttataggtgatgtgtatatgtgtttttgttttatccatcattcttcagtttcttaattaccaatactataccaagacaaatgcctgcatttcatcattaaccattaaaatatgattttcttagagttgaagattgaatttagggccagttttttcaagtacattaattatgtttaaatgtgtaagtctactcattataaaagtgaattattttgtaagtgttggttattaagtctgtgtattcccaagattttcagtctgaagtgagctgcagatacaatgcctaagcattttgtcctttgtattttgtaccagcaaaatgaaaatcattttttatagcctcattactcattcccaaaatgacctgaggtaccagttaggtccatttgcacaatatctggcaatatttctatgtcaaatatgttacaatctggtatttaaaatggccactgtaagtattatcaggcactattgttcctttttaaaaaacagtataaaattt

SEQ ID NO: 117092 - DNA, 1019 bp, Homo sapiens
cataacagacacagcactgtggtctcctgtgtgactgttaggtctgagcactgccccatattgctaatttctcacattgcttttcttaacattttttttctttaggagcttgatggagagatataccatttctgtcaggttttgcaaaatgtcttgagctccttgaaaaatagatgtcatgtaaatgcaaagtacggtcagttcttttagcctaagacattatttgatttttatagcaagtctattccatgtaaatgacatgcagtcatatagcttaccatgaatacgttcatgtcctaaaaatctcagatactgcctatattcagagtagctaacatttaattttgttttcatgtgttctttgaaaagagtagggaaaatgttttttatattattatggcttaatctctggatttggtcaccagtgaaatgaatttcatagcctcattctattacagacattttgtctgcttcgcaaaataacacaattttgcattattggtggtctgtgttcaagagacattacatctaaagagagctagaaattgcaatttaatactaagcaatgtgatgtgggaaaggaggccaactctccacatgctctttctgctagagcataatattctgcatattgacttttttttcactatccccaaaagtcaggatttttcattaagttctgataatactgttgaaattgaccttgattattcatgtaaagggcctctcagacaacctataggtatgagaatagctttcagaattgtaatcatatttaggttatatttaagcagtgatgttacacacttcccaaaaagtaatttattgggacatttacataactctgtgtacttaaatttatctacttattgcttatttaaaacattacatatgagagtttgtgttttccttactcaccattttccatacggctttattttcctcttagtttgaaaacttaaaaaaaattcaagttaacaagcatttattaaacatctgttgtattcaaggccctgggc

SEQ ID NO: 117093 - DNA, 1045 bp, Homo sapiens
tgaaatccatgcatagttttttcataatatgcatttttcatgagctttttgaagaaccctccttgtaatgtatcttaattccctattccattaaatctatgattttgaaccagccatatgtgacctgtaatcaaaaagtgatgtttgatagatgctgtcaccattctgtcatttttcctcatccaagatagaagatgtcttcgaaagctttgtatatgttccagtcctataaaacaattctacaaaacaatttcaagttcaaaattattattgagaacttttaaacaggatatttagaagtttgttttattaacttggcctaggtcacaaaactcattaatattaatgactagactacagaggcatgtagcctgtctaaacattaacagatacaaaacattaaaccaaattgtgaagcttcgttatgctatgagtcatttcaggcaaagaccaatatagcaagcaaaagctgaacagtccagttgaaatgtttctgatctaagcctttgacttctgtttgtagatgaactggagttttgaaactgacactcaaattttttattgacttcatatgaataaatgattcattaaaatataatacttggaactaaagtcatcattcaaaaaaggcatttattattaataaactacagaaaagagaaaatttgagggtacaatttactttttttaaagtatcttaaaattgcatttattttctcttagagaactttagatgatatcagtcattactaatgtcataaaatgtatgtaaatatgagctaagtgatgtattttatttacccaaagatatgatctaacagcctctgcaactgtcaccaacctttcctataaaacagcaatatattaaatgatagtgaagagggtctgaaatttcaaccttgagatgcacttacactgtattcagtacagcagatttatacttctacttatatatcaacaacaggtctttctaactggcaagtcttgtggtaaacatgagaaatatggatgcttattaggtcacttttggtaaatagaactaata

SEQ ID NO: 117094 - DNA, 1029 bp, Homo sapiens
gaatgagtgtggctgtgttccaataaacctttatttacaaaaactgaaagtaggtcagatttttcccaaaagctgacagcaggtcacacttggcctgcggactatcaatccctgagctacatttgcttgattttcttactgtatactcattcctctgttcagctgggcttggcttttccccatcactgcaccaaaatacttttgccaatatcagtaacattctcatcattgaattaaaatgaacacttaccagtccttgtctcatttggattcttgggagcagttgacattctaatcaatctgtccttaaaattttttctttctttagtgtccctgacctacctctagtttttaacccacctctcaaggcagtctcttaattattggtgtgccttaaggatttattattgatcttcttgacacatttgccttaagcagtactttgtgttactatagctctaatttctgtctgtttttctccctcctgagcactcttaagtattaatctgtagcccagattcctaatttaaatactgagtttgtacatctaatggcctgctggtattttctacatgcttatccaaagatacttggaaatacctgtcttaaactgaacttgaaattcccaacctctatttcatccccaagattacttccctcaacccccattctatctcaatgaatggccctacccatctttcacttgcccaaggcagatacttgtgcttcatctttgattcctaactcttcatctcacccatgtctttcattgaaagaatcagttttgtggatgtacctccaaaatagctcttaaatctgtatgtgttatagtctgttgcttctatgctagttcaagccaccatcatcacaaatttaaattactagtagactgctctgcttttccctttcatgttctcttttgctggtgggaatatcccccatcctgctttattcccaataatttatctttcaggtatcagattagatatcagttctactaggaatcctttattgactccagaatgtagg

SEQ ID NO: 117095 - DNA, 1001 bp, Homo sapiens
gcaccaaagcaagcagcaggtggataggagggggagaggaaatcaggcgaggttttgcagaggaggtaacacttcagaagagtcttaaagtatcagtaagacattgccagaaagaaaaataaaaattaatttcaaataaaatatatataagcatgtgaagcatgattgagaaatatcttcttttttttcttcttttttgagatggacttctgcttttgtcacccaggctgtagtgcaatggcactatctcaacttactgtaacctccacctcccaggttcaagcaattctcctgccccagcctcccaagtagttgggattacacctggctaatttttgtatttttagtagagacagggttttaccattttgccaggttggtctcaaattcctgacctcaggtgatccacccacctcagcctcccagagtgctgagattacaggcatgagccaccatgcccagccgtatcttcttaattgtcaaaggaaaatcaaagtgtgttagtagcattatcatatattatgtttttgtgtcatacatgatttttttattctaaattttaaaatctaaccttaattcagttatttaaattaagatacaagccttgctaaacagaatttttactgatacatgctacaacatggatacatctcaaaaatattatattaaatgaatgaaactggtcacaaaagaccacatatatgatcccatttaaaattgataggatttccagagtaagcaaatctgttagaacaaagtagattgctggttacctaggaccgggagaggagggagcagggggtaagacaggagagttggtggataataactaaaggacatagggtatctttttgggatgatgaaaatgttctaaaattaattgtggtgatagttgcacaactgtatgaacattctaaaaaccattgaattatgcactttaagtgggtgaactgtgtgggacatgaatatttccataaagctgttaccaaaaaatataagtt

SEQ ID NO: 117096 - DNA, 1123 bp, Homo sapiens
aatcatttagacaaaatccacttattctgatattttccatatccaatatttttttccttcaggggaaaaatgacttgatgtcaactgaactatactaaaagatctagctaaatgaaatcactggtgtatgcatgtatgccctaggatgtgcatgcatgcaattggaagcactgttgggagaacacaagagacaacatgaaaaaagacccagagagaagtatgtaaaaccctactggtacttccgtactgcctggacatgcagtgcattaagaggatattgagagatgagtccgtaggaatcatgggccagagtttggaagtcttgaatgctatgctaacaagtttagagtttttgctgcttacattcttaaataggtaatcattttgttaaactgtacttttcaaaaattaaaagttattcgattgatttaacactgggaaaatgccttttgttgtgtattccatgtatttgttgcagttgtccttttgtaacttttatcaaactttgatgtaagctcaggagtttccgtttgcccagtgcccttcttaaagaatggggacattcctgtgaggttttggaaactgctggactgcataatattttaatgaagtctttggaatcacagggcttgaggtagcaacagagatcagctgaaattcaggtgaaaatgataattatgtagtatattcactggactaactttttttatttgtttcatattagaattttaacctgaatgaaacctagctttttaacttggcaatggtattgcattgatgtttgtaaaatgctcacagtggctgtgaaaattttgttggtctaattggtgtaacagatacaaagagatttgattacattttttcagaccatttttgagaaattgaagactttaaccttgcattacctcttattattaagacagtgtgacaccccatccgctatatttatcaaaataccctcagcaaagcttttaaatatttctgtatagaatgagttactgaatggaagtaattgtgcaaactgattaggacataggttctatgtattatcttgatatacaggtgaaagtgctatagcgatctgaagttaccacagtaatgcaatggcaagaacaatgacatg

SEQ ID NO: 117097 - DNA, 1046 bp, Homo sapiens
gattacagcagtgtgatcagagcagttagcatattcttggcattttctcctcattaactttcacttcttcagagggaccttgagtaaaataaacacatttgagcagtcttaagcaaattgtttgaattgtttcctcagtatacagaatcaaccaaaagtaggttggattgagttgagttgggtttagtttaatatcatactttactacagcatcatacatacatatacaatattacctagcatctgtagcacccataaaggattctctaatgcatgtgaagtaaaaggaaagagagtgtttaagtcctgactttgaaactgttgtgttaattgtgaacttttgctgagtctatacattgaagaaggtaacactcagcatgttgagatcacaactgctagattagtgcttggaggcagtagctgtgctgatgtgaggcattaatggctgggtgagttcaatcagatatcctgcctccagtgtctttgtgtaatggtatttactagatttcaaacagactgctgagaaagatgaaatataatctcatgtattatctctgtcttgaaaaaattagataataaagttgttctcttactggcatatgttttattaaccttcgtagagtcaacttaaaggacagatgtctgtagaattgaaaccttttgctagagtgttattaagtgcatttttgagttctaggaatcatggggttgagtagagcaggtaagcattttttaaaaccactcagaggacaatcttatgtcatattctgaggttagctggagagaaaaaatgtgatgtaaattgtgtgcaactacattctttttgttgtttttcttccttacagagcctggagaaagttcttgtggaattcagtcacaaggagttgtttgatttctataacaaggtctgtatttttaaaataattttctaatatgtggagtttttttcataatattttgtttcattttatgaattcttatttttaaatgtcatattatggaactaagttctttaaacttcccttataaaagaccttatgtttcac

SEQ ID NO: 117098 - DNA, 1044 bp, Homo sapiens
taatattcatagttaccagtgctattttttcctttctatttgcatgtgtctgaataacacttgatatgagtttcgttcccttcactaacgtctttttttttttttgtctttgtaaatagctagagactatacaagcacagctggattcccttacatgatgttttcgaagactgtttttttcatcacgctcctgccacctcattattttgcattgaagatacattgccaggttgtgttttctgaaggattcagtgacttgctttctgtaaattatatggcttatcacttcttagacaaataacaaccaatagagatcattgttaagaatactgaggttctaatatactttctttagttctgtgagccaacagtaattattaagaacactttccctttaaaggaaacaaaagtgaataccatattgtttttactgtcatagtgttgctttcttgcctgtcctgcttagtttttacttgctggatgataccataatgtatcaaggagcgtccatggatacaagataagatgtgtaccttagtagaatacagagctttggtaattacatgaataaaattaagaaaatagccatatacaatcaaatacactatggcatttttatttgaatatgatgagtatattttgcttcggaaataatataggaaggaaatgtaaaatagtgagtagtatggtatcagttaattccagtctgagcttctctgtcaacttcagtttctctctcagtttaatgatttaataatagtccaggtttttgtgtgtttttctttatactgcaaattaataatgattcactttatagtttgggagacagaatcaggtcttgaataaaataattgtaatgagtgctaaatgggcaccattattcgaatcagataccttttatattctctttccataaatacgttgatttctgtcaataaaatttttgtgtcttaggattggttgaagtgtacattttttaattatatacattatagtatattttatgccatgaatgtatgtaaatgaatacatttacgtacattt

SEQ ID NO: 117099 - DNA, 1022 bp, Homo sapiens
aggacccaactaaactatgcttgaactctacccatggtaattgtgagatgataactctgttgttttaaacctctaactttgtagtaatttgttacgctgcaatagataactaaaacaacagccatgctcaattgtttacatatggtctgtagctgcttttgaacaacagcagggttgagtagttgcagcagagaccatatggcccacaaagcctaaaacctggccctttatagaaagaaaggatgcagaaccctgctttatactatgctctctaaaccggagcatccctagagaaataaagtagttggtagggaacacaaaaagtcgtaagatggacgttgtatatatttcaatagcatcacttctactttttgccagaagtagaagaaattacattttctatcctcttttgcagctactgcagccgtggaactaagtgttgctaatgaattgtgaatggaagtgatcattcatctccagttgtcttcctctttctgtgattgaaacccagatttggagctgagtcagctttgagcagacaagaatgctaatgcttaagaggtagggagcaacaagatggaaggaacctgggtccctgaatatacttatagaacacagctgtctccatgcccttgacagaaataaaatatcttgtttgagttattaaatttggggtcagtttaggctatacacagcacgtttgcctgtagcctaactaatatggtggcaacataattttattataattggccagtaatgtacaacatattttaaaatggagatttacattttatggcaaaatgcatataaatgttaaagaggaaatgggaaaccttaaaaaacagaacaaaacctttgtgcttgcagcctgcgaattcaggctaaattctcagtgttactgggaacctatattcacctccctccttcagtgtggttattttgagacaaatgttttgagaaaccataagggtatattgtaaatttcccccaaagtctttccataattctttttctactgttga

SEQ ID NO: 117100 - DNA, 1023 bp, Homo sapiens
caactaagactgtgcctttagatgtagagcccaatgtgagggatcagtttcttatgatagagtaatatttataacatctaacttttctaccttatggcagaatgccctgtgaatccttgaaactcaaggccttctttgtcagagttttggttcttactgcaaagtatgttctttccttatgtcatccaaacaaagtaactagagtagtaaaaagaaagtcagtgagtttggatgcattggctttctggacttgcaaattatccagtgcaggcatttctcacacagcaggcttggaggactctgggggtggccacctttgctagatatgctattaacctccttcatatggttgggtcagtgatcttgtaaagttctgcttggcaggctcataggtgttgataggtgccctaaactgatggaccagtagagggtggccaccatctgtgaggttatttcttcaggccctcaataagcacttacccaaatgcactgattttacagtgctgtggttctgtactggattccatgaagcacccttcccgtctctgattttccaggatcattttccttaagttaatgccattcctgtaaatgcatttctactctttgatcccttttctttagtttacactttcagttaaatctgtaagcaagataatctttgaaaattattttaattaatgtttatatttagctctatagtctgtgtaaggagatccagggttacaagagtctgcttgaaaaaatagagccacatcagatcaaattttctttccataggattgtattttttgaaatgttaaaaattctcctataattaaatatttaaaccttatttcatcatttttctaagcgtttttactttagggtttactaaaggaagccaaatcaatttcataaacttctctgtataggatttcaaatagaacatttttatggaaatagggtgaatatgttatagaggaagaaatgcttctgcctctctgcctacttccctattggccctctctctcgttctcccac

SEQ ID NO: 117101 - DNA, 1609 bp, Homo sapiens
caagaaggcctgcggcagagccgaggacgctgggtcctcctctctgggacacaggggtactcacgaaaactgggccgcgtggtttggtgaaggtttgcaacggcggggactcaccttcattctcttccttcactttcccccacaccctacaacaggtcggacccacaaaagacttcagttatcatcacaaacatgagccaaaagcacatacctaccccatcccccacccccacacacacacacacacacacatgcacacaacacatacacacacacgcacagaggtgaacagaaactgaaacattttgtccacaacttcacgggacgtggccagactgggtttgcgttccaacctgcaaaacacaaatacattttttaaaatcaagaaaatttaaaaagacaaaaaaaaaagaattcattgataattctaactcagactttaacaatggcagaagtttactatgcgcaaatactgtgaaatgcccgccagtgttacagctttctgttgcagcagataaatgccatgttgggcaactatgtcatagatttctgctcctcctctcttttaatgaaataacgtgaccgttaacgcaagtaactctttatttattgttcaccctttttttccttaaggaaaggactcttccaaatatcatcctatgaacagctcttcagaaagcccattgaaagttaaactatttaacgtgaaatccattaactggaataattgagtttctttatttttacaataaattcactgagtaaataagttggagctggaattctgagctttgtgtttggactgtctggtctgtagctaaaggaaaaagttaggaggggaatatttatttaaatctatcagttcattgcctggtcaggtctctggcctataaacatgcaaaaaaactaattcatgttaaagtccttccagatcctaatttctaaagcaatcaggagagaaagcttttagaatggcacatcatatctcattgatgccaacatggttttgtccatggttctgactttctgtgaaggcaccagcttgcaatatgccatcccatttcaccttgcatgtgagacagcaaacaaaatccacaaatggtgtgaactaatatgctggctgctaccttgcataaattaatgatttgatcacacgggttcttcgtggggttacatctgtgaatagcctgttttccacatgtaaatttgtgccttacaccttgagttgtgtacacttgtaaactctttatgatcaactgttcccccttttgaaataagtgcagatatttatttaaccctcccttccccaccctctgccccacttccagccctctgaaagattggagtcaagcagatggaagaatgcagtggtgatagttgtcatgcgacagcctgagaacgctgggcagcaccacaccctccaattcacactgccttctagttgtgccaactggaaccaccctttggctgtgctgcgaagcatggaccccagtgttgttgtgggtgtgtcaaatcccctttcatcctcaagagctccctgcttcccttagattatttcaatacggtgatatccttatttgctagcagaaaagggactaacgtcccattc

SEQ ID NO: 117102 - DNA, 1075 bp, Homo sapiens
tattaccaagaactttgttctgacatttggaagaatgaggtttgatgaccactataccctctcctggctgggcttgcaaaaccaagtgaatacatgcgtcactccaagtgttgtaattatacaatccagtgcccttctgatttctttgctacctactgagctttgtgtttggggatggaaagtttcatgaaatagaaatttaaagtaacatggatttagactaataagaaattagccactctaggcttgttaagcatctggcaagttttttctccacaccagcagcaagcaccctagtgtggtctgccgctagttattactcaaattgtagcctagggaaagttgatgaaaagcctttccacttttcatctattttgctgatatccagaaggactcttgtgctacacagtgttgcccggcctggcaatagcttacccttgacccttctccttttctcccgttcaaactttacctattctaagttccaagccttcagtgtcagctgtctttattaacagactgagaaatctcattttaggtgagtatagttaatcatagatcctaccccctggttactcttacattttaacactctcccatgcttaaaatgtaatggatttgggattttaaagcaccctggttctcccaacacagaaggtaattttttggctcctatcaagtcatatgtaagtgattttatggacagagaaaattattcctgatgacagtaataaaggaagaaaaataggcctctcctcttttcctgactcttaaacttgggcttaattttctctgccatttcttcagtaatattaccgttaacaaaaacattttctgaggtgtctcaagcagaatttatcactggctctgtggtgcaatttggatgccaataaagagtaagaggctgtattagagatagacgtagttcctgtccaagaaatatcaaacaccagacagatggaacacaggtagacacaaaagcacaccaaaaggcctttatgaccaacattctctttgtgaaatgccaaaaccacacaccacagactttaaaaaaatatattagacaagtaaagac

SEQ ID NO: 117103 - DNA, 1034 bp, Homo sapiens
aagaaataagagctttcttttttaggttaaacaatactgagaacaaatagctattcttgtgcctcttattccttaccaaaagtaacaatactttaaagctgatttccaagaagtctatgaggtatgtaaggaaatcagccacatccagagcagccaagagagctgtgtagcatacacataaaatgtaaatgctgaccactgctatgaggacacaagaatatatcctgaatagaataaaaatcccctacttcagactttattttataataaagagttcttgtgagctctcagaaaacagacaaaatagtaaatatagagcagttcccatttaatcagaaatgccagagttgtagtatgcttctatcttttgggaaatctttaaagtgagatattatcacattattacatttagtccagaaaatatgcacattaaagacaagaataagatgtattacagaaacagaatttaaattagagattaagtgaataagctaaaatggatagcaaatgttgaatatattttaatcaatgtacaagctatttgtataagcagtttttagtttgggaaataatattccggtaagattcataagatctataaagatgattagtattgtccacatctcacaatcctaaatggaattttataaatcacagatgttatcaataattctctttatagttaattatttaatctttaaatttgcagtagcctacagcagtatttcctccgagggagatgagtagcaccttacatggcatgatttaggtggcagggatgtgatggccttcaagagtattgagtcatgtggtggaaatttatgcccttttcaatgctctttcagtcttctgcgttatcttcttgattatgtgaaaggaaaagtctcagtttggtgttttctcattaacaactccctaaacttgctactatctctttttgacaaagagagaatagggtttacactggggctttgtcttccaactggatctagctggaattaacattgttttgctttaagttaatttttgtttta

SEQ ID NO: 117104 - DNA, 1082 bp, Homo sapiens
tatcattgtgccagcttggatcaaagcacctgatacaatctgtatttaaccttgtggaatgatggagggagagcttacaaacgaattcacaggaaatggctagagtttctgctgtaactctcaacctagccattcttctcatattatcctatggtagcttatctgaacctcagaaatctatccttttctaatttgaatcattttagtcaacgcagcctcagaaacggaaaccatctattgaaataatacacaaaagggacagccgtaatagcgtgtagccgttgaagcctccattccaatgaaaagacagtgggaatagatccctttggaaaccactaactaatcccagaaagaggaatgcctgtgaagttgagttgaacctgaagactagacacactgtagaacctccataggaagggtgcagagtaactgagttacttgtgatagggacaagacttacccactaccagaaacctgccccatcggtcacaaatgggattcccagagtggacactttctgtgtttagtgctgccatgggaatatcaaagaaggacactggcctttcttgagcacctatgtgtcagacactgtgcaagatgctttcaccattatgtcactatcctcccaacaccgagaggtatctttatccccactgggtgcacaggaagaggttaagtgattccctgaggcccacccagcaagtatgagagataggatctggcccttcattttctaactacaagttcaatgggctttctgctgaacacaccccacaccaccaccaccaccaccaccaccaccaccactaagccgtgtcatttctagggccatctcctctcagtcttacagccagcttgggtgtcccacctccaggcctctgcgcaaagggaatgtgggtctctctggtgatgttttcctaactgtatttgtgatgaaaacagggcattccagttccctcttgcccagcacaaccacatcagattcgacggctcaagaggggtatgagtctaggggaggaatgctggactggaagcatctgcttgactcacctgacagcacagaccctttgggggcagtgtct

SEQ ID NO: 117105 - DNA, 1186 bp, Homo sapiens
ttacaaacctcatgctgctcagttttttctttccagtaaatcagatgcatggtttctctagatttacatatagaaaatcgagatgtggtgggtattagactaacacttcagtgataggaagaagagactgatttctcatatttgtgtaaaacattctcttacctaactaccatctggtccacattaatttcctctcatagccatagctttccattaccaatgagttttccatgtattcacagcatatgggccaggaaatctttctacagagaatgtgtcccttaggcatatatttcccctagattaccgtattaagaaatgttctccctaaaccatacttatggcattaccataaaattgcctcttgaacacagttaaattgaaagtgctcaaaatgcgtatcaattcaggtaaaagaaatcttgctacttggaggggaggtattttttattcttccccactttctctttctaactccctacaaagctatttctaattatttgcttatgctgggcactgaattttctcttaggctgaccatatattttattaaagtagtcttgaattcaggagtggaaaaaaaaaagttatgttttagacctcaatgtaagctgaaaggaaataaaggaacttctatatttccatttctcaggctgattttccttcccctgttctcttatctgtatcatgacatgagatgtgaacctcagaaatgtaaaaacaaaaagtctagaataaagcattccttgaattttaaatgaacatgcttttagcagctggatacgaagcagactattttcaacaaattgaatgtttcccacttgtgtgagagccaaacaagtgccatacagaaagggacctcttcaatgttaccaaagctttgtggcagcatttaagtgtggtggctccatagaagtcactatagcatggacgagccacttggcttgctttttcctgctaatcaaagttttaagaagataaaaagctatctttgttatatatgttttgtctaatttgcaatattacagtctcctggggggaaatccaacttccaataataattgtaaaaaaaaaaaaagaatgcactgtacttattcttttaatctgtctttctagaggccaatattttatttatcatgtgcatggtgatcatacttcaaggctggagcttttggagttgttgtga

SEQ ID NO: 117106 - DNA, 1045 bp, Homo sapiens
aaagcaatatacaacacttaggggatgtccattttagttctttttaccagagagtagatcaaggtccctaagttggagggtaacatagaatgccagggtggcttgcacagattcagggcccagaggcagctagtgaggatggcagagattgtgcatacaaagtgtgcttttgtttgaggaaataaaaagctaagcagtctgtatggaaatgactttatgtggctcggagctgattccctgaaggatttatgactctgtattaaatgccacagccttatcttttaaaacatgctactctaatgctgagttttcctctttttttcttttctttcttttttttttttgttactgattttagaaacagtattaagcaccttgttgttttgtttctgttttcaaggaatgcagattctactaagatctccttgcaaaatgaatgcatttaattttccctatgtgtttttcctctgcaggtagttttcccaagagtggctcaggtttgtaagaatgatatgggaggatctcaaagagtcctggagaaacagtggacgtcgttcctgaaggcgcgcttgaactgctcagttcctggagactctcatttttatttcaacattctccaggcagttacagatgtgattcgtatcaacgggcgtgatgttgtcctggcaacgttttctacaccttataacaggtaatcatgccctagctgtgttgacctcatcaattcttcctggcttccttctcccagggggttctcttctaataaaccatatttgcaactgactgaaaattgcattcattgtgtgtagctaagaagcacttaacacttagttttcatcaacaaattaaaagtagtttataagcactattaagttaggttttaggggaagtaattagataaattatgacaatatcttctatttatataagcctggtatataaacactttttatgtgttatttataaatccttctagtaatcctagaaactagataatattgtcttctttttccacttaaggaaagtgagctcgacatattatact

SEQ ID NO: 117107 - DNA, 1041 bp, Homo sapiens
acagtttaaaagtggcttcaacagggtccatctcaaagtgattacagattacaaaaggcctgtcacatcctggaaattatttctgagggtttagggcaaaagaaaaggttgttgtttgtaattaagtctgattatttcatttagatggatacattggaaccattcggggatgaattcagcggaatggccagatgcccatatgatgccaaacatgccaacgttgcactgtttgcaggtaagcgacctgatttctcctcgttgcacttgcttttgcttgtttcatcctgtcactgtgaatctgctctagaggattcgtggagtcacagttgtgctttgattctctggtgaatactgtaattaagaatgcctttctgtttgaaattagtatgaaaattgtacttttgcaagtctttgcttcacttacccatgtgtttgtgccttcaggaaaggataacagcatagcgctgaacatgtgatggatcagttagggaatgtttgggctcaaataatagaaaatcccacctcaaaccaccaatgtaaaaaaaaaaaattaaatttaaaatcccctactgatgtgcctttattgtttaaggtaggatggactttgggattggctaggttcaacaactcaacagtgtcatccgggaggcagctccttttcattcccatgctctatgtcgacctcatgatgagactggtggttctcacagtcagaggatgactgccagccccaattagggctacatgtcttcctgtccacatatagaaaagaaagggaaagaaacaaaaggaagcctctggaagctctctcagagcaatgaggccacatacccccaagcttccaacaaacatcttctcaaatatcattgacctgattaggttacacacccatctctgaccaaaagactatggtgggtgaggggagggtgctaattgcttaggctgacctctactccccaacactactccttctttccactgcaaaagatataaagaaatagcaaacagaccatcattttcagatgtagtgggatttttgtg

SEQ ID NO: 117108 - DNA, 1032 bp, Homo sapiens
tttgaaccaggatggtctcgctctagagtccatgctgtcattccctgtactatgctgcatactgaggaatagagctggtactgtttgtcctgagaatacccttgtaatagctgttgcccaagaacatggtcattatgagtagccattataaagcatttccataagatgctcagtagtcacctctctgatagaataccagctccttcttagatgtcatttttattttcctaaacgtaatagggttggaaaatgacatactcaattatctaagggctgatcaaaacaaatgataaaacattgaatctgtgagaaataggttgacttaagaatctcttgtgaattgttcactttccagttgagtttccgggggaaaaaatggtataacagactgcccttgtactcgatgatttagcagggcgtggaccataggtcccagggctacatgagtgttaggagcaaggtactatgcagacttaaaagtgaccattagtctagctcattaaaaccaagacagttttattctaactcctcaccccaaggaaggaaaggaaaagaaggataaaaagaagaaacacactaatatttgaaactatcaaataagctcatctttactaaaggtcaagtttgtatcactgtagcattgacatgtttgttttcacaccatacgcagccacttcctctcaacagacaaccttagaaaaattcttaaaggagttccatgcccaccatatttaggacctcttctctccttttaattttacactttatttttacacttccaactttaattcactttaattttacacttctcaacattgctctgagagatctaggtttctaggcagcaagtaacacgatttaaagctaaatccctccccgcaccccaccccccggccaacccccgcccgcccaggttcaagccatggcaacacaattcagtggtgcttgctggagggggaagaggaagtcctaggattaagtcagtttatgttcaaataacttaattcaggaagaacagcatatgagacctgg

SEQ ID NO: 117109 - DNA, 1084 bp, Homo sapiens
ctcagccaaagagaagtgtaggaaaagagaaatatgctcattgactcaccaagtcagggaaaatttcagatcacctgactggctacactcagtttgaccctgtcctgtcaaagcccacatctctgtgaaattgttagccaattgcttaactcaagggtgaacttcccacagttcctagaatgccaaccaacctctcaggggctgccttcaatagtggattattccaactggacgcctgtggagactgtatttttcttctggctcctggacaagggctctcgcctccagaccacattgcatttgtggtgattgatgggaaggctgctttgaaatagttttgtcccgagacaagatctttggcagactgccccctcaggcttagctctacagaagatgaaaagaaaactgtggaagaaaagagcaccttcatgcaaagggttcactagcgagttgagccctgagaaagagagacaaatcaaaaattgtgacacttagaaatataaatccaggcttataattatctagaaatgaaagtgtaacttgatgaaccttaaggagcactcttctatcatatttcctaaaataacagactcatatggaaatggaaaatggtggcatggtctgacttaaacacgggtttcttttgtgacctgtctccctcccctccctaccctgtcaattcctggcttgatttgcttttcctttcttgccccatctcctcttttcacagatacaaaacagtatccggtgtttgtgggccacaagccaggacggaacaccacacagaggcacaggctggacatccagatgattatgatcatgaacggaaccctctacattgctgctaggtaaggggccttttccccatgtctgccttgagagtgtccaaaagcccaaggtcctaaatttaccagctatgcattatttttaagatcttgaggtttctaaatagagtgttatttaacttaaagcctcctttaacttatcaagcaatcattatttcaaaattgtctgtgtctgtttaaccctatgtggatttaaatagaaataatagcatatttgggcacttacactcaaataatcc

SEQ ID NO: 117110 - DNA, 1097 bp, Homo sapiens
atactaaaataactggttggaatataaaatatttggttaatccctattcacactaaacagactctttattcacactggccagattcttttttggtgtttgtgttttgttttcatgcatgaggttaataacacccttagagactgtctgaatgtccacccagtaccagcagagccttggcttattattatgccagtttcacaacttgaatccgttagttaatttaacatggtcagagaaaaactcatttgtctttttcatgtgtttcacagtcaaagtgacacagggtcaggcattatctgctggaaggggacggcgaaattaaagtcccagggtacagccattcacagcggtagaacggatgattatcaggctggatataattatagagccacagcagtcccccacaatacactggctatctgcctagcacaaaggtttagatccctaatttgttgcaggctagaatatctgtgaagtagccatgtatttttgtgtaccatcaatcacaacttaggcaactgctgctgtttgcattttggaagcttggcggctgttaagcttctgcctgcttttcagacaggaagataggatgcagggctgcagaaaggcttttagtggcagaatgatgacacctctgccagggtcctatcgcaagctcattagctgagtggatatttgagcgcctagtcagtttcaatacatacaaagtcatctgtttcattaagttaatttacctgagctggctctcctgacaatcaactgcttctgcagtatcagcttgatattgtaaaggcgaatgaggatggggctgggcaggaggcattggtcagcaaggtactggggtctgtgggattgtacttccctttaactgggcacttccagaaatccacattatatttgtaagcaagaaacctggctggaagtttactaaggcttgctatttacttttagtttcaatgaatgaaattgggaaatgagaagcaaatcgggtactatattaataatttaagaatatttttccaattgttaaggaagcgaagaaaggaaaaggaagcaaaagaaaagactgcacatttgttggttagttatttaaact

SEQ ID NO: 117111 - DNA, 1050 bp, Homo sapiens
taggtgtaatctgttttacaaaatcatttataggagcagtctctggagcagaagctccacacctgcagttataacatgacctatataatagctggacatttgttgaaagtgctgcctctttcaacatccccctcagctcagtcttagcctgtttttcaaggtgtgtcaggaccgcatggaattagtaggacatctattataaatggtgattctttgtgggtccccttgaaccttagctgataggataggacagttagcataactgtggtattaccttgatcacagtttctaatcattcaaactccaaagatcacatacttattaggaactcctgctgcttactcatacatgcttactgcaacctcctcatgccaccatgcattttgctcatcactgcagtttctatttatctccacccaaatcctttctgtcctcttcccctaaccagctgcaaacacaattttgtgttgtgcaggacttgcagttctgcatcccactttctacccagcttctctgtttctcccgcaggtcagtgaccttattagttggtctaactttggcctccccatctgggtaaaactctccccaccatcactccacttccttctccttccaggcttttgtgctgtgtgctcctctcactgagctagcagcagtccattgccaggctgccctccttccttccttcaggccatcctagtcactgctcccaacacaatgtttgtgtatttcctgcaaaaggatatgtatttgtattatgctaaatgcttttcttccccaggctgagaggcctgatttatgtatatgcaaggatgagttagcatcttttctgacatttcaaatgctacaaaacctaaaatttgaatttcttcaggtactcttttttgagttacttgtctggtcagatttctgtagtccttctagacagtccttctgcagaaaagtataaagtcttcatctgttcattcattcattcagtaataacgtgcccattcctgggctaagcagcgggtgtccagtgaaaaaagggacatgatccaaggactcaag

SEQ ID NO: 117112 - DNA, 1031 bp, Homo sapiens
aaaaaaactcaaaccaatgagcccatacagatggatcagaggcataatattcatgtgtaaagtatttggtccaagttttttttgtgtgttttgttttgttttgttttgttttgctttgtttttgagatggagtcttgctctgtagccaggctggagtgcagtggcgtgatctcagcttactgcaacctccgcctcccgggttcaagcgattcccctgcctcagcctcccaagtagctgagattacaggcatgcgccaccacacccagctaattttttgtattttagtagagacgaggtttcaccatgttggccaagatggtcttgatctcctgacctcatgatccgcccgcctcggcctcccaaagtgctgggattataggcatgagacaccgcacctggcctgttccaagtttttaggagcagatgaagctgttaaactttttgtttgtgccacctgtctatattaattctctgtattttccccatatgcttacttgcatacttatatggttattctctgtgtatttcctgtttcttttctctctttttttctaaatgtattgaaatttctgagaagatgaaaataccacctttatggctactcctaatggcaataagcgtagtcaccaacatttatttaatgttggctctttgttcaattaatctttgtggcaactgtaaaggcacaagttactttatctccatttgggggttaaatctgttgaaactctgaagaagaaaggaatttgtctctaggtcatgcaactggaaaccctggacttgaacccctagcactgatatatcctaggggttctagttcagattagactgatgctagaacccctgacctggtctccacagacccctcaacactgcttcacgtgcagagcaggaagcaccaggacatccttcctaagtggtgttaagaacttgatctgatgaagtatccatgtgtctttgagtaagtcatttaacttctctggaagaacagcttctttacaaagtaaggtcacatgcctcttagttcaca

SEQ ID NO: 117113 - DNA, 1036 bp, Homo sapiens
agagaattcttttttcctattttctactagggtgcatttaatctgtattagtaatgccacagagaacatttactgtcatataagcaaagaccttgcaaatgtattttaacagcagttcagaagactaaagaacttaacagagaagtagagaagagagagcctgcaaagtctactgtaaaagtaaaacgtgctagttttggcatcaatttaaccacattggagacttggtcaggagcactgaggcttgaccacattatccaaacacatctgcttgccttatcatattgtcccatttacttttctttttcttctgccagcacaaacttgtgtcagcatgtggaagtggtatttctgctacctaatctgtgttaaaacagccctgaagggtcatgcaactagtcggattgtaaacctttggagaagattaaacagtcatcatgtattaatcagtcttgaccacgttgtgaattaaaaggtgaaattcttggccttattctaaaagatgacaggtctagatgttagagataagcattgtttttatattagtcagtatttctatgtagccagttatgtttccagagtagtgagaattattctaagaagaaaaaagtattttcagtataaactaaacaagagaaaaatggaagtttaatacacatctgcagtgaacatgaacataggaaaacgtgaaaacgtgagcatagtgaagtttgaagtgggagagaaccttttctgaactgggttgctttgctcacaggccaggtaggagagagcaggggaggaggttttactggacccaagcgccttgtaagaattttccaaaaacattaagtaaaatttagttagttgtgaagtagaaagttagcacttctatgtcttcaaggaatccggttatagtcataacacagaaaaaccaatcatccctcccatagtagttgaaagataaaattgacatcttcttgaaagagaaaagctactattttatgagcttagaagaaaaaaaattcttcaactttatgatatgctatttgagctc

SEQ ID NO: 117114 - DNA, 1531 bp, Homo sapiens
gtgtagcttacatattgcaaggatctgagtataatataccttaattaacagtgctgatcatgttccttccttatttgcagaacactttacattcacgggtgttgactcaggggatcatttggctttttttttttttttttttttttttaagtatcagatacatagcagtttacatcattggattttatcccctggtttagatccaaagacattattggccagtcttaatgcttgcttgttagtaatactgttatgaaataaaagcttctgttgcagaagcttccttaatagataaaacaaaggcctttaaccagtacgttacttagagaatattaatgaaatagttaaaaaatgaggggaaaatgatgaatgctttaaaaatactggccttttcaccttaataatgtgtcagaaccacttattttctacaacacatgtctcaaatttgctggcatttcaaattcttaggagttaattttctatgtttgaatctttaaaaagaaacatacaaatgtaggatgaatacattcagagggtttagtgcatgctttggctagcaattcaataaagatgacttggaaggatcaaagcaaagatttccataaaattgaatatgagatatttcagcaacatcaatgctatacctcttcaggacacttgtatgcatgtccacagtactacctagcatttacttaatgccactagaacaaaaaagataaattttgttgaggctaatagatttttaaaaaattgttttaaagtccttttagagtaccaggaaaatctgactcaaaggcaaacagcaaacagaaatgacttaatggaaatcagacaataagcctaaggaaaaaaaatagggttggaacctaaaataaattcaatatataacacctttccattttgttccctttcctttttgtttttcatgagaatctatatggaaaagtcagttgattgcttatcaggctgaagcctgtgtttgctcagactagcgataatgagcaataaaaaggtggtaatggttaaagtgagaggagagggaatcagggaaaatgggtgggctcagtatagtttgcaggctctgagttttggaagccctgtaattctcccttgtgctgttatgttcattggaggggagttaagatcaggatctgtaatgagtgtgggggctttccaggcagtggtctgatggctgcacaaaagaactcccagtgattacctagttacatccctacagtcagcttggcaagtaatcttaaagccttgctcctgaaccagcagcatgagcatcacccaaaagcttattagaaatgtagatgctcaggcctgataccagagtgcctggatatgaatctgcattttaacaagatcttcaggtgattggcatacacattcatatttgagagacactgactgaaggaacacatggacacaagatgtgaggacacatacagtgtggggtgcagtagtagggttatcctaggaaaagaaggagcagactttttagctagtgagctaactcattataggc

SEQ ID NO: 117115 - DNA, 1049 bp, Homo sapiens
atccttgtgacaaacatctggcagatatgttttaaagtcctacgatagctgtcagaaagttgatggctcctgatacgttacattgtcagtccagacacactaattctttagtgggattattgatgttgttgtagcacatctgtgtttaattgcagacaggaagctgaaagagaaagcttgttgtgattacgacctctgagatacctattatatctgaacttaacaatcaggtcaaaacttagtggtgggtgggaatgaaaagatgtccgcaaatgaaactatgtgcatgggagaagagactgcatgtcactgacctgcagagaagccagtgcctgggttcaaatccatcactctctagctgtgtgacatcaggcaagctccttaacctccttgggcctcagtttcctcctttgtaagatggagtagtaatagcatctgccttatagggttgctgtgaggattaaattagtccatatgtatacattcccttgagttcccattacatcataagcactagataagtgtttcctatttttatatttccccccaaatcttctgctttgtaaaggtaaatcttctgctgatagaggatgagctgcaaagagaatgtgtgtgtgtgtgtgtgtgtgtgtgtgtgtgtgtatgctaagactatcatgcagaattgattctacacttgtaacacgggcatatttggctgttattgcctacgttatccattttgacacctcccctactctcaaagcccctgcatgtcactcgcttcctctgcttttccccttcagattatttcacccatgttctatttggtcatgacctgtatgtgtacctcatctaagtgatgctttatgaattccataaagccactcatctttgaggtctccaagaacagagactattccctaatgatccttttgtgcagtgttagttgttaaatgtgctaacggatgccagcgtttgaaaatggtgctgatccatgacctcttctgacaatgttagattcctatccttcagagtgagaattttaggcatgaggctgcttgaggtac

SEQ ID NO: 117116 - DNA, 1032 bp, Homo sapiens
cagaatgatgtctggtacataaacactcaataaaaattagctattaatatttgacaccaaaccctcctaatataatgagctaaattcaatgtttttgtcaccagcaggatatgggttcttgacaagtaaaactaaaaagatgatgaggagatgatagtgtccagatgaatctttctgccagtttctgtctctttatgttcttttgtgtgtcagagcatggtttaaaataactaagtaagtaatcattatttcattttatgtaggaaatatagtacatgcctactatgtgcagagtgctaaattagatcttattggatatttctaaaatattaaataaggcattaggagttaggtgactatgttttgctacagttgttatttgcctttgttgggtccagtgcccagttaggagcctatgtttatcaggcccatggtgccttgagctatagccttcctgtcttctgttctcagaggaagaaactccgaggtcataatatcaagtatttcctcactgggtgagttttctgaatgcagtgtttagattgtaggtaatgtagattgtgtatttggaaacacaatactcagggattttcactaacaaagagggcccaaagatctctgtcaattaattagattttttaaaaatatgtatttatcttttagagactggtctcctgttgcccaagctgaagtgtagtagcatggcatgatcatagcttactgcagcctcgagctcctgggctcaagtgatcctcctgagtagctgggattacaggtgcacaccgagcctggataatttttacaattttttttttttgagggggggtcttgccatgttgctcaggctactccagaactcctggcttcaaatggtcctcctgcctcagcctcccaagtagctaggattacaggcatgagccactgcacctggctctgttaacttaatgtctgactcaaaaccaatgtatagatacaaacaagtttattttatataataaaactttgttatatgtggcattaactactcgtacc

SEQ ID NO: 117117 - DNA, 1640 bp, Homo sapiens
taagaaaagtaaaaagtactttttgtgtagatgtcagtcaaatacaatgtggactttaattaaccttaattaatgatttctgattacagattttcttttgtgtgccttggaggctgtatttaggtagagtattttcagccagtagtgacatgaacttgcttcctttgtcttgccatgcaaaccacactagattctcattacaaggaaaaatgtgattctgcatcatttcagaatggtcatacaaagaatgaaatatcacttggggaacaactgaaatttgtaagtggtgtggagtatttgaatcttcagaggaaccattcctaattttaaaggaatttacctatcaaaattgctgatatttactggcttctggctggattcgaggccattccttccaaagattgaatgggattttgagtggtgccccagttctttcaaataaaagcatactgcagaagtgctggacctagcagcatttcctttgcccaagtgtaccctttataaagtactaaacatagcaactagggaatattgtagacactgtagagaattgggcctttgtttttcatgaagggaatttattaacaaaatattttgaggagtcttgtcttgttcacagatggcgaccacggcgaccccccttcctgcgggtgctgtcagagaggatgggggggacgtcctctatccaccccatcttcatacccgagggggcaagggctcgagggccgactgggccccaggtccaggagtctttgtcctatttcctcctgtggcccggtgtttgatgtgtaaggcagtaatacccagttccttgcacctctgagccatatcctgggcagccaacatagcagcatatggcaaagattcatctcggtctgccttcaccttcatcccaccagtcacacggcagagggtttctttgccagaaagatcagtgacatggacaaaagtgtcattgaagggtgcaacgatatggcggacaccaaatatgttttctccgtcagccacctgaggtcagaggctgatgacctgttcttccttttccttcccctttcgaggtgccatttctgcacgttgtctccagactccacaccggaaagagtgggccttatttttgattaaaagtactttttcctgtgtcatgagttttagaacaaatatcaaaaacctgaattaggatgttaatgtgctatttacattcaacttttaactagagggtctgataaaggttagatatgatatattaatgccaatttatgaattatatttctctgtgaacaattattttgtagcttatacaaaaccctaatagcatataacccatctagtttagtgtaattatgcttatgaattataaatgcttagcttttacaattagacttactgatctgtaggcaccttaatgagaaattactgaaattaaattgattcgtaatatttgatgtactgtgttccagggtagtggttgtctaaaataatttttagagtatgtgtctgactgcatagcagtatggctttatttttaatagaaaaaagtcctccctgttgcatgatcccacctttgtccaaggaggagatgtcaaaagttagaaagagcagagtagattcacatgtagccaagagaaaaggtaacacatctt

SEQ ID NO: 117118 - DNA, 1051 bp, Homo sapiens
tctggcattaaatacaatgaaaacatgccattggaaaataaacattgttagagactacgaagaaataaagattgtattaattatgttttaatgttctatgagggttttacagacaagctgtgatagatccattcttctttccctgttcctattcctgattcgttttttaaagaaaagtattcagtcttttcattaatattgcagcgacttcagcacttccccgcccctcccccagactcctactgtccttgaatgaggaaactgagagaatactgattgagctggtgaatggaaacgttcctttcctgaaaatggaatgctttacaaaaaattgcattccacaaaaaaacactcaaaacaattcaacaactgtccctcctcctttctacccagagagccacttgatttcattcacatattttggtttttcaatgtatttgttcttaggcctaaaatacccaggtggaaaaccattctattaagcctttcactattttaaaaacatgagcatctgagtttctaagaacattctcattcctgcatagtgagcgataaatagaaaccaaattgtttgtagcattctaaactcaagtatattggcagaatggcagtggagttgatttttataagaatacttgttaatggttttcgagacggattctgtgctaattcttcttgtatcatgaatgatggccctagctagacactgtcgctgggatcttcatctgttaatcatggaggctgctttcttattcggttgccatagtttcagtgcctcacatagtgttggggtgtcttgggaaaggtttgagatatactagggcttgcaagccttgcagttattttgacagttgtgctctgaaagactgaaaaccgcttctcgtataattcagtgttggattaaaagaggcaacttctgagagtgtctccctggaccttgttatgtgcacatccagctggtatttaatccaggatttgcctcttgctcagtcttgctggcaaaaaaaataaataaataaaaatacagtacagaggctgatgtcactttcat

SEQ ID NO: 117119 - DNA, 1052 bp, Homo sapiens
caaagtgctagtatgatgataatgttatggttttgagaagaataaatgtgctaacatctgtaaaatgcatgtcacaatgccgggcacacaacaagcagtcattcaacataaggtattatttttacttgagtaacagtagttacgaaaaatgtcctaggaatggattttgaaaaagcagatagtacttttattctggggggcaggggaaatagtagaaaaggaaatggctacgaatctgtaatataaagagatgatgcaaaagaaaacaacctttggactagaaacaaacattcataccataaacaggccataatgtcatgggttttaagttgagaagcatgtgaatacatcacttgcagggaaacaggaaacagggaaactttggaatttgaaatatcacacccaaaacatggaaggaaaaaaccactatatataaaaaataataataataacaagcagagccttatatcaaataggagcccaagggatagtttttgaaaaatgatagctatcacttattaacattttaataataaaatgtacactctgcacctacatttagaatctgaaagcaactcataatgacaattttagggatgagttgaattcccaaggaccacacctgtcttaggagagaaactcggctgctgattggaacccttgaggaggttgtggctaggacttctgcaagagggtcttcaggttgggcatgcatctgccaggtcactcttccctggccaagcttgaaatcaatttgggagcaaaagcaaactactgccttccacaccaaaggtaggaaataattggctgaccccagtagagatagcagttattctgctgacagacacactactacaaaacctgaaatttgattcaaatgatagtcatacaagttcttatcagtgagaaaaatctgacttctaaaaggcacagcagaaggggaaataaattgatgttatcaccacaattccctgctaccattatgttttccaggaatgcctccatggcttagagttacagttattttcaactaggaaataaaatgttctcaa

SEQ ID NO: 117120 - DNA, 1802 bp, Homo sapiens
gggagcagccgttcgggtgacgcggcgcccccgccatgggtcctgtcccccgccgcagctcccaacccgagcggcaaggatatagcccgtcgcggctgcgtccctcctgaagcaccgagccctttgcaccgggctggcgcacggtacgccctcctcccagatcagcgcggtctcgctctggaaagatgacccaggagggggaagggtgagagacctggcagaagatggccctgggtttgaaacccagactagggctctgttccgactcctcactgtgtcctagggcgctaccatgggggcaatggggcgctggagagtaagccgggcagtgcccacccaccctgcctgatccttctggggcgggaagtgtctcttgtcccgattctccgcgttttgctcagctcctcgctgtgggagatggtgcaaaacaggatcctgaggtctcctccctcctcgcaagacccgagcggcacggggggagccagggagcggtcccgggcttgtggacgtcgggaaaggaaacagaattccgctgtttttcccgctccctcgccgcccctccgcccagcgcctcctcccactttacagcggcggggtcactagaccaggcgctcctggaaagtttccctgaaagccaggggcggcaggcacgaccggactggggctcagcatgtgcagtctgagggaagccggacctggagggaatcatgcggacagctcgggatgcagctaggagctagatcccggccctttggagagtggaacctcctggcccgcggtacttgctcgacaagtcggggaagggatgaatggggaagcaggaccccggaggcaggtgcggccactgtggacagaggctgtggggaaggtgcgtgtggacacaggccggggctcagtggcttgcaagtaggcagcttcaggtgcagaatcccgagccatctgctccctgcgcacgatttcccagcgtggctatccagggagggaggaagcagagccaggtgtgcgtggagcgggagaggaatgggagactggaggcgctgtcttcacagccggggcaagcacttccagggagtctccggcctgtatcgcactggggagccctgcaggctttttcgcgtcggtctttgggagaaaggtggctgctttggaactgcggtggccaggcacagccacagtgggatcgctcctttttttacgctcagcttttttacgctactgaatgcgatctgtgaaaggtttaaaacacaggcgtgcatggacacacacacgcacacactcgcccttgtacgcacaactttctttacctcagatctgaaaagccgtttaacccacttgcagtgttgtgccagcaggtctcagaaaagctatttaatgccccccagcgctggtttttaagtcttgccaggatgggaaggtcgagtgcctttgccttgtctttctttagtcctgaaattgttcgtcgtccttcccctggtggacacatcttgggcatcaagtctgtggtatgctacagtgatggcggggaggactggtggtttaattaattatttaattatgttttctccccaaagtaaagatgcctatgtttaattctgactaaaaatactctacacttttttataccgtacccaaatggctaccagcggtcaagattgcaagaattttgtatgactttttaatgctgtgtttagtctacatggagcagttttatgatttacagtaagctttgattaaactactccaggcaccaaagttaattattaacctaaccttaaatacagtggcagaactatgtctccacc

SEQ ID NO: 117121 - DNA, 1042 bp, Homo sapiens
cccgccctgaaatgacttgttaatcggcgcagacaccaccaaggggactcaccgaagtggaatccaagtggaatttggatttggagaagagtttcttgaacatttaccctcttccttgttggttttctttttctttttcttctttttttttttggcttcttttttcctctccccttctccgctcgtcattggagatgaacacatcgcgtttgcatcccagaaagtagtcgccgcgactatttcccccaaagagacaagcacacatgtaggaatgacaaaggcttgcgaaggagagagcgcagcccgcggcccggagagatcccctcgataatggattactaaatgggatacacgctgtaccagttcgctccgagccccggccgcctgtccgtcgatgcaccgaaaaggtacgccccgggcgcccgggcgcgccccacctcccgggcagctggactccagcctgagggtcccggggccgtggctagcgcgtgctgtcggctttgtggtgcctgcgttttattttgtcttgtgtctctgtttcccgagccttgcccggtcctgggggagcagccgtgagccctgcctgcctttcctctctgccctgcgccccagagtgcgtccggctccacgtcgagagctttcccacccgcgttgcgcacacgcccggcgccgccccgggccgcgacggcgcgtatggctgttcctcctgggggtgtgtgtgcgagacccaaggctcatcctcccgcgtgcccagcagggagcagagcgggccctaaatggtgggattctcggaagctccctggcccggtgtgtcgaaggcaggggaaggggttctgccctcgagggctggagggggttgggtataacagcgctgttttcgtccagtgccaggtgggagaaggggttccgcggagacggtgtggaagcggagagaatcttttgttgtcagtgtggggtctgggctgggctccgtggagtgcaagaaacttgtaatggctctaggcacccgcgcgccctgtctctcggtgagatcctggctcct

SEQ ID NO: 117122 - DNA, 1061 bp, Homo sapiens
gtccttgtagccatcctgacaagaatgcagacatactgcttgatacttaatgttccagcataaacgtatccacattcttgttgaaggtggagatgaaagcatgtatttaacagctctgatcaataagacatttgccaaaatgagcagattgattttatttacacctgcagcaatgggttctctgcacttctcctcctttgactgcatattgttcagggcattgacagtgacaagatgccaaggatcaatgcgaacagaagccacatttagcaatggtcggcagcatgtggagatttagctacttgtaattaaaagagttgaaagagaaacagttgaatttttgcagccaactctttaaactcattaaagagcatttcttaccaggtggaaggtttacatgttaaccatgatgttctggaaagaaaccattaaattgattctctaaaggaaaaggaggctgaaacagaagccgacttcatctgtggaggtgacactgcaacaagcttatttgttccattgtcagtgagttctggatcagaaattctagtcccagcttctgacaatctgggtaactttgacaagtcatttctccccgtgacagctaagcatgcttctaggactttgatggtgaaatcaatctgtaagttctttatgctttttttttttttttgaattggtttttactatactctgcagttcgcaaataatggccccaactccagtactggatttttctcttcttaccttgttattcttaaaaaatctataatttttgtccacagtgactgttttccctaacagcacatacagtttaatccttggtaaatgtagccctcaaaaatcctggatttcagtctgaatgtgccgggtctctctcctggtcctatcatccctgagtggtacttaggccagaaatgccagacaggctccatgtcaactgtgaaaaaaaggcccttgggttgggatttgcaaacctagctatgcctgggctcattgaaaagaatgatgtgattgattagcagtatctgccatggctgccccagagaaggaggagtggcaca

SEQ ID NO: 117123 - DNA, 1045 bp, Homo sapiens
attcactggctcactgaaaagcaggatttcctactgtacttgtttttaaaaatgtgcctctaatacatgttttcaaacccaaatttaaaatatgatttgttgttgtgataggttagaagttcttacttgtaaaatagaagaaaattgttgtagtggattggaacggtgttgtgtccattaatgtttataaataattaggtgtagaccaataatataagattcctacatcagtttgcagtcctgactttacagtttgaaataagtagcaaaagaaaattatgataatcaagtaatttattattttgtaaaatagtataaaggaataaggaaattttaagtattgtttaggggccaaatttgaactcagctaatatgatttaagcgctctattaattgccctgatttttaaagaggtgcatgtaattttgaaatagcacacattttcatttgtaatcactctggataaatttgtatttttcagtgttcattgaacaggcttattgactctggtaaacttattttattgatgttttcatatggaaaataataagtggaatatgatacaattgttattttcagaacatatttctttagggctatttaatataacctttttaacgagcaaaaactttccatttgagagaaaaaattcttcctgctctgtgggaaaatatttgctgagattttgtatagaataagagacatgtatgtaacatatatgtatattcagcacaagtctactgcaattatgtacacattttggcaggaagaggggattttgtttagtctttgtttatgagttctagagtttcctgtatctagtgttaagttgtaaggaaaaactaaacatgccatttaaaggtaaacttggtaactatttatagagcatacaccaatgattatttctcacagttttcatgatcatttgtttattatttacttggattagactcattaaaaggtataatgctggtcacaattagaatgctaatatttggggaaactatgcagaaaatattttaaaatattaaaagagtgctggctt

SEQ ID NO: 117124 - DNA, 1041 bp, Homo sapiens
gaagcattatcttatttaaatactattatttggttactgaattacctagttcttactaggaatgactaagtttttattaaatactttttgtcattcattattacagttatatggtttattcttcagttttttgatgtaattaattatgaagacacctttcttaatattggtccattcttatattcctggaatggactcaactgagtaaactattaaacatttttgatatattgctgaaaattatattttatttagtggcattgaattatgtgtatttttggtccactgtcatgtttggttattaaaataatgttaacttccaaagtaaattggagagattttaatatttttctatgacctggaatagtttaaataatactagaattccttgcaccttagaaattagatggaactcattggtgaaatcacttggttctgttctctttaaaaatggtagcttttaaattcttctttcaaactcttctaaggaaattattcaagctttctacttctatttagatcagtttttaataacttttatatttctctagggaattatctcttttctctaagttagcagattggttgccatatacttatatacagtcttaaataattattttaattactcaggaatgcatttttttcttgtttttaatcatacacacacagacatagacacacacacatacacaaacgttttttacacaaacagattcaaaaggggtttctctattttatagaacttttaaaatataagcttttaggttgtttatattggctattatagtttatttttatttcattacgttgaacttttttctcgaccaattttatatttcatctttttgggcttattttcttctattattcttctgattttataagatttttactaagagtacttctgtagactgaattgtgttccctgtccctcccccgaccccatgcatatattggagccctaacttccaatataatggtatttggagatgggacctttgggaggtgattagattatgaaggcagagccctcatgat

SEQ ID NO: 117125 - DNA, 1094 bp, Homo sapiens
caaacactgtttattgacttaactaataatattagatgtgagaggaaggagtggtattagaaagctaaatcctcatttgttatgagaggcagtacttaagggctgtggagctagactgcctgagttcaaattcttaatagttctataaactctgaaactttgagcaagttaattaacatctctgtgtttcagtttcctcattagtaaaatggatatgacaaaagatatatttctctctctctttgtattgtacttagaattgtgtgccttaatattagctgttatgatgatgataattggtagtttttggataatatctaaaatcgataaatcaagaaatagaaaaacaacatatattgtatggttatatggagataactaccagaagaaatagccaaaagagttaaagtgattgcctccaggatgtggtactggggagtacatctgggaacaactgtggcattttaaatcttatggcactatttaatttgacatatatacatgtattactttgataaaggtttagaaactgattaagtttgtgtcacagtctcatggtgatggtaaagagagaagaacattgtattaaacattggaaaatgtcctaaaaccacctaaggcggagtaactaatcacttggctctatgggattcaaggtagaattctcgtggcaacaagaaagatggtttccagtgatggaagctaggacattgaagaaaccactgacgacagtcaacttaatggctttttcagaaatggccaccagatttctccactctaaagttattatttttgttctctttccatactctatattctttggaagcaaggccataaatccagcccacactcaagtgggaggaagagattaagttccaccttcaggaggggggagtatttacatttattatttggaattcttttgtaaggaagatttgtttcttctcccccatttatttattaagtcatttatttatatcattctggactctaatttgtactttgggttataacccagtactgtgttatttattttcttgctcagattgttcaattttagccattgggagctctttaagattggcttctgtgtc

SEQ ID NO: 117126 - DNA, 1051 bp, Homo sapiens
cgcgcccctgtaatcccagctacttgggaggctgaggcaggagaattgcttgtacccgggatgtggaggttgcagtgagccgagatcatgccactgcactccagcctgggtgacagagcaagactatgtctcagaaaaaaaaaaatcacaacagtatattttttctaagtctatccttcctccactcctaaagccagttataagagaatctagtaaggaaaacaattttgcagggtatgggaatattattgttatttgtacttgaagcagtcagacatggaagatgttatctacttctgttttggagatgaaaatgtattataatgttaatcatgtaaagctatttctacttttattggttatgttggatatatagtttcagaaatctgacaatgactttatcttacagatcacgttagtttctttaaaatgacagcagagggcactatggtatttagttttccaaagccagttttaaaattggaaaattgttgccatttttatgtgtaatgcagtgtatctattcaactagttgaatgaatagctatgaaactttttgttctttgctttttcgctatgttaggagtataaaaattttgttgagtattggtaaagttgaggtgcactatttttctgggttccacatttgcttttgtttagtactctttaaaaagagtacttgtaaatctgttcactaatctttaaagtttacttatttgaatcaccttgattaaaatcagtactgtgagaaaaaagctttcagtgaatattatataagaaatttaattaaagctttgaaagatttttttgtaggtcctagcatctctagtcatatgtcagatataattttattagcccacaggctgtcagagatagtatgcccagagtgatacacattacctttgtattacagcatttgtttaggaagcaagtcagtcttagtctgacaggaagcccatgtatttatttctacatccttaatgagaaaagaagaaaaagcttatttcacagaatttccttggggaaatgatttgaaggtttcatttatatt

SEQ ID NO: 117127 - DNA, 1981 bp, Homo sapiens
tttgccagtctgtgtcttttaattggggcatttaacccatttacattgaaggttaacgttgttacgtatgaatatgatcctgtcattatgatgttagctggttattttgccccttagttgatgcagtttcttcatagcgtcgatggtcttcacaatttggtatgtttttgcagtggctggtacttgtttttcctttccgtatttagtgcttccttgaggagctcttgtaaggcaggcctggtggtgacaaaatctctcagcatttgcttatctgtaaaggattttattgctccttcacttatgaagcttagtttggctggagatgaaattctaggttaaaaattcttttattcccactggctgctctgaaaagccatctttgcattgttcctcgtccgcctccttgctcgcggcagcctccttgctcgcggcagcctccttgctcgcggcagcctccttgctcgccgcagccgcctccgccacgcgcctcctccgccgccgcggactccggcagctttatcgccagagtccctgaactctcgctttctttttaatcgcctgcatcggatcaccggcgtgccccaccatgtcagacgcagccgtagacaccagctccgaaatcaccaccaaggacttacaggagaagaaggaagttgtggaagaggcagaaaatggaagagacgcccctgctaacgggaatgctaatgaggaaaatggggagcaggaggctgacaatgaggtagatgaagaagaggaagaaggtggggaggaagaggaggaggaagaaggtgatggtgaggaagaggatggagatgaagatgaggaagctgagacagctacgggcaagcgggcagctgaagatgatgaggatgacgatgtcgataccaagaagcagaagaccgacgaggatgactagacagcaaaaaaggaaaagttaaactaaaaaaaaaggccgccttgacctattcaccctccacttcccgtctcagaatctaaacgtggtcaccttcgagtagagaggcccgcccgcccaccgtggacagtgccacccgcagatgacacgcgctctccaccacccaacccaaaccatgagaatttgcaacaggggaggaaaaaagaaccaaaacttccaaggccctgctttttttcttaaaagtactttaaaaaggaaatttgtttgtattttttatttacattttatatttttgtacatattgttagagtcagccatttttaatgatctccgatgaccaaaccagccttcggagcgttctctgtcctacttctgactttacttgtggtgtgaccatgttcattataatctcaaaggagaaaaaaaaccttgtaaaaaaagcaaaaatgacaacagaaaaacaatcttattccgagcattccagtaacttttttgtgtatgtacttagctgtactataagtagttggtttgtatgagatggttaaaaaggccaaagataaaaggtttcttttttttccttttttgtctatgaagttgctgtttattttttttggcctgtttgatgtatgtgtgaaacaatgttgtccaacaataaacaggaattttattttgctgagttgttctaacaaaaaaaaaaattcttttatttaagaatgttgaatattggcccccactctcttctggcttgtagagtttctgctgagagatctgctgttagtctgataggcttccctttgtgggtaacccaacctttctctctggctgcccttaacattttttccttcatttcaaccttggtgaatctgatgattatgtgtcttggggttgctcttctcaaggagtatctttgtggtgttctctgtatttcctgaatttgaatgttggcctgtcttgctaggttggggaagttctcctggataatatcctgaagagtgttttccaacttggttccattctccccatcactttcacgtacaccaatcaaacataggtttggtcttttcacat

SEQ ID NO: 117128 - DNA, 1099 bp, Homo sapiens
ttgactgcatgataccaagcaggctagcttacacatggatacacaaatgccaggtttttcttctggcttaaaaatagatattttttaaaaatagattttctaaaacacataatagatttatcacagcaactgaatctggttaatatgaaataagttctaagtcacatgcaaatcaaggtatttcatcatgaaattattttgcatgtttttaaaacataaaacatatttttgcctattttggaggtatacttccttttctattatgaatctgatttttttgcatgactttttttttcagaggagaacacaattttcttggtggtgtgtgacagattcctccagttaaaaaataaataaataaataaaagcttaaaatctacacatggtggctgagtagggcgaggcagctcacctgagcacggctgggcccagtcctgggctggggccggggctgggaatggggcgcagtgaggctgtgagccggccctgagccagccctgcgtcgggtgagcggggctcagggggcgccagagctggaggcggaagcgtgaagtcaggactgagtgggtgaagagaacctgggctgagcagacatggccacttatcaccaagaagggcagatgcagctgcccctagctgatgccattcgttcatgtctcatcgatactttctcatctagcatttgcaaggcttgagccaagctgtgccgtggcacactatcagggagttacttcatccttcccaccagaagaaacttatgttgggagatcaacaccagctagtgtgcttctccataaagcctcaacgtataggacagatttcacatgcccagaggctgttgagcaggcttcatgtgcgctgcactcagaggccacctctttctttgtgggccggatgggtccttgagtgtcctctcttcacaaacttcgtcatcttcctcatctttttgaatatgatcgtattgatggttgaaatagaattgctggaatccacaaatacctaactgtggctattgaagctgagcttggaggtggcaacttggtttatcttgtttattttcatcctggagatccttcttatgtggctatcctagcttttc

SEQ ID NO: 117129 - DNA, 1099 bp, Homo sapiens; identical to SEQ ID NO: 117128

SEQ ID NO: 117130 - DNA, 1099 bp, Homo sapiens; identical to SEQ ID NO: 117128

SEQ ID NO: 117131 - DNA, 1035 bp, Homo sapiens
ctaaaaatacaaaaaactagccgggcgtggtggtgggcacctgtagtctcagctactcaggaaattgaggcaggagaatggcgtgaacctgggaggcggaacttggagtgagccgagattgcgccactgcactccagcctgggcgacagagtgagactccatctcaaaagaaaaaataaaaaagtggacagagttcagagttgatgcatattttgcagaaaggactgacagaatttgctaataggctgtatatggggaggtaagggaaatagtgccaaatgtagattttttttttaagaaaacacctaaaattggtcttttaaaacatttattctccctgccttaaaacatgatagttaatactagtattctacatggtaaatgtttccttgacacttttatcatttttatttatttatttttttaggcttatgcatctggatgtgacattgtaatactgggaagcgattttgaaagattacagataatcccaggagctaaacatggaaatattcaagtgggatgtgtagactgttcaatgcaacaaggcaaggtttgtaatcttcttctaatatacaaatttgtttggaatatggtttttgtcaggataatctctgaagtgtgtatttcctattgaattagagacttggctttgtttcaaagatagtgtagctagaagaatttttggctgtctaagatgcattctatagagtgccagaaattctcttcttatataattttaaattatagcatcatcttctctgagaaagaaatacaatacttactgatatagaatgagtctaaagcttacgtatttaaaaggtgattggactgggggaaaggagtaacaatgaatcttcaatatttacaaataaactaaaggaaatgatttagaatatttttttttttttgtctgtgaacaggtagttatctccttgtaacttctatgtaacaagggctgtgtaactttttgtggaaatgaaaaactctttgagagtttataatattctaagcccataagaaaagtgaaaaact

SEQ ID NO: 117132 - DNA, 2457 bp, Homo sapiens
aaaacagagccaggaaaggttatgatccatcaatttaaagagtaaattcaaaggataaaatagaatatgttttaaaatgtactcagggagtttccagaggaatagacctaagttatatttttgaaaagttaatgtacactgacagaattgtcaatttagaggatggatgacgacaattaacatttactgtgcatattgtatgtcacttattatatgttaggtgttttacaaatgttatttcaaccctcaatgctgttaggaaggtagtgttgtacatattatgaacactgtaatggaaactaacgtttggagagattaagttgctagttaacgtagtaagttgcagttctaggattctaatgcagatgtgatagtcttcaaaactgacattcttaagcatcagtgaatgaaattgtgtgtattggcatatttaaagttatagtattcatttctttgctttttttgattcataagtaagttaacatatccctaataaattctttttttctttttaaaagattgcagcgtcttatggaaatgttatctccatttttgaaccagttaacctaccaaaacaaaagaaaaatttggtcagtaatttatgatttcttcttttaggaattgaaatgttttaagtattgaaagagtgtaaaatcagagtgatcattgagtaaatcggtattacttatatactgtaattgaacctacatgttaaattccattttgatgttaaaaatatatttaaatttttcattggaatagaactaaaataaattgtgccaatgaattgttgaaatgctttattattttatttctgacatttttaattttataatatttcaagagtcagtaacctaaagtttggcactactttattgctagtatcaaataccgttgtccagccatatgtggtactctttcctttgttttataatctacctttatacaggttttctgcctcttcagggcttaactttcttgcattatttagatcatgtaatacagtcgttaacaggtcaatgaatgtttttctttataagcaagctgtactcagaaatagttctgaaaactggttacccaataatttataaatattcgaatcatgttagcagattttataggttctttaatgcttgtgcctgtaatcctctctatttgggaggctgaggcaggaggattgcataaggccaggagtttgaaaccagcctgggcaagattttaaaaaaagtttagccaggcatggtggcacatgcctatagtctcacctgctcaggaggctgagatgggaggatcgtttgagcccaaaaatttgaggttgtggtgagcaatgatggcaccactgcattccagccagggtgacacagtgagaccctgtctctaaaaataaaaataaaagcaaaccgtctgaaagaagataagtgtagtgtcattgaaagagcagtgtaagggagctaaatgatgagaaattatgaacacaaggaaacaacagacactgaggtctacttgagggtggagtgtggcagaagggaggggagcagaaaagataactattgggtactgggcttaatacctgggtgatgaaataatttgtacaagaaaatcccttgacacgaatttacctatgtaacaaatcttcacaggtactcccaaacctaaaattaaaagattttttttttttttaaaaaaaaagaaagagcagtgtattgggagtcataggactggtttctatttctgggtctatctagctagttggtcttaggtaagtcagccttaagaaattctttgcttaactctcaaattgattactatctattcagtcttgatgggaatattattaggctaacatgtcaaagatggtttaggaatgtattaattataaaggactaaactgttttaatagcagacatacctttatatatcttttgatagttttcatgtcatcttcacttagctcattagtattttacaaattacttcaaacctagtttgtgcagccattatttcttctttttatgaataaggcagtagagtaggctcaaagaatatagtgacttgacaagtgaagcagctgttaagccacagaactaagagtaaaaccatctgtattgattcctaggtgtgagtgttctttccttaccttgtgttaatgaaaactattttctgagttaattgatatttatctttaaatttcatagaaatagtgttcacacttctgatttctatttgtttttatagattgcctagtgaatccactatttgagcctcttaaagccttaagaattagtaattggcagtactaaaaagaattttttaaggcgattaccccacccagcccagaacagtgtatttcagtactcaataaatatttattaaataaaataagtagcttttgaaaatcagtatgttatgttaaaatgcctttattgggaaggatagaatagagaatttcaatgtttg

SEQ ID NO: 117133 - DNA, 1006 bp, Homo sapiens
ttaacgtttcattgaaaaggagcctttggacctgagagtaaacagactttagcaatgagagttgggtagatggaacaggaaaaaagtgaaatttaagaaaatatatgccaggcgtggtggctcacgcctgtattcccagcactttgggaggctgaggtgggcagatcacctgaggttgggagttcaagacccgcctgaccaacatggagaaaccctgtctctactaaaaatacaaaaaattagctgggcatagtggcgcatgcctgtaatcccagctacttgggaggctgaggctagagaatcgtttgaacctggaaggtggaggttgcagtgagctgagctcatgccattgcacttcagcctgggcaacaagagtgaaactgtctcaaaaaaaaaaaaaaaaggaagaaaatataatgaatatatgtatcagttatctatttctgcattagaaaagcatcctccaaaatgatggatggcttaaaacatccatcattttattgcttatgattcttttggtcaggaagactctgtgggaatggcttgtctattgttccatgtggtagtgactgaagcagtttatctgcagctaaaagatccaagaaaggctttgttcacatatctgggccttgctgcttgctatctactggaatgcctttgttctcctccacatggcctcttctgtggccctctgtagcagggcagcctggattttacatggtggctgcattctgagagtgaaagtagaagctgcaaggaagtcccagaatgttattgctgccacattatatggtcacaggtccagctaatattaagggttgggagacatagactccccctcttgatgaaagatatggcaaagtcatattacatggaggcatcaacacagagagacataatttattgggagccatttttaccattctacgaaagtgagggaaggcacagagagagaaagcataagatacattataataaggattagtatttcactgggctgagtctc

SEQ ID NO: 117134 - DNA, 1055 bp, Homo sapiens
ttcctcacttttcctggcacttttactacaggtacacattaatgtctccttcctgtgggcttccataaagctttgcatgcatttctatcatgtatgtaacacttccacatggtatcatatttccatgtctttctgctgaaatatgaactcatgaaaaacgacaatgttttgtttgtcattgtatttccaatgtctagcacagtgcccgggacaaagaagatgctcattaaatacttgttaagtgagagattataagatttcttcctttctatctcaagctattttaacgaaattaaaatacagccttctcctccgttcttcaaaattttttttgatatttgacttttttttagaagttgttttatatgaaattcttgagcatgtaaattaagtcactattaaatacctaaataataaatgaggaataatattttttttaggcagtcgtcttttaactggttccagctatttgcaactctggtccaatactaacttggagaagccaactgaagatgaaaatttaaataaaacagatcttaactttggagattggaaatgcatttggcattgcaagtaagcaattaatcaggggagtaaactgataaacctgttgttctatgtggttttattataaatgtattttagttgtgtaaaaccacactgacataaaaagtattgatttttagtctatgatatgctttttcttatacacagataattctctatttcccgtgttctacaaatacattttttaaaaatgtcaattaaaataggaagaaacaaatgtgtaaggcttacatgaagaccattaaatacaaacttgccaaattatatgaaaagatagatgactttcatgcttttgaatggaagacttcctattctgaagaaatctatttttcccacataatctatatattgaacataatccttgccaaaatctgagtggaatttctattaagcatagttctaaactctacttaaaaggacaaatatgggaaagtcagagaaattctgaaagaaaagaagaatgaagatttgcagtatagtaaaatgaa

SEQ ID NO: 117135 - DNA, 1030 bp, Homo sapiens
tttgagagtccatagttacaggacttctgagcctatgaagattagagtaatattaaatcgtctctggcctgcacatctctggctgtggctcaactatgtttgatgcttaggataagagccgtattaaaggagtttaagctgggatagtttactccatatcagatgtctttaagtcacagagttgtacatattttctttttctttgtgttttgtgtctaattctgtcatctattttctccagattgttgtttgtttatatttttacataaatactctgtcgtcttgtaccttctagtatgtcttccctggttttcttcttttaaaaaatagctttattaagaggatatatcatgagttcttgtatgtttatttgactacacccagcatatgtgaggaaaagagagagtaggttaataccctaccttattcttctttgaaacagctataagtttaaccacaaaagcacacagtgacacacacatacatatcctcagtatcttcttttttttttctgtagttctggaaagagttaatgtaatactgaattttagtaggttatagagacctattacttaaatacaggtataaattccctatttttgtttgttttttatgtgtttttgttttgtttagttttgagacagggtcttgctttgtcacccagactggagtgcggtgccccagtcatggctcactgcaacctctacctcctgggctcaagtgatcctcccgcctcagcgtctcaaatagcggggactacaggtgtgtgccaccatgctgggctaatatatttttttcttttcggattttttgtagagatggggttttgccatgttgcccaggcttgtcttgaactcctgagctcaggcgatctgcctgcctcagtctcccaaagtgctggaattacaagcatgagccatgtgcgcagccagaaatcccattttgtactatatggccattttcaacttggccacaccatgtggcattttttccctagcttttcactgttctatgaattttgctgactaga

SEQ ID NO: 117136 - DNA, 1396 bp, Homo sapiens
aaggggttggggaaggaaaggaaaaagatgctaggaagggagaggtaggggacagaaggagagaggtagaaagggaaggtggcctggaaaggctgtgaaagcaaagaatggtgggagagagaagcccggagaggaggtagaaagggagaagaaaacaaggaagtagacagaaagaggagagggcgccagagggagagagatgcaagaatggaggagggaaggagaaggagagagcaaccaatacaaattatgctgttctcccttctgttctgcaacttcttttttagtcagttaggtaagtttaacaaagtggctactagacaatattttgatttctcatttactttaactcactgagttactgataaaacctgctgattgttccgtttttaaaaatcagatatgtatgctggaacaagttactactacaaaatattgtgactttttctttctttcttctaaacttactgaattccctgatggaaggtagtccttgctgatagggtttcaggctttgagctcttgttgcttgttggacttattaacatatatgtaattgatttttgcttttattttaaggaggtggcaaaaaggaaattaactgaaagtcaaggatgactaaggagggggaagtgtttagtactttatcatgaatattcaattcttgcatttcactgctttgggcatctgttaggtaaggagagaataagtgtactcagtagttactgtagctttttgtgacagtgtgcaggtgcctttataggaagtagaaatgaagcatatgatataattcaaagaactatccactcaataaatcagaaaatcttattagaagatgtggttatttcttatgtgtcaactgagagattgtggcttaatctcagtctttgtttttttagatgtaaaaagaatcttattgagtgctgggatggtggcacacacctgtaatcccaggatgaggcgggaggattacttgagccagaggattgcttgaatccaggagtttgagagcaccctgggcaacatagtgagaccacatctcttaaaaaaaagaaagaacgtttggcaacattattgaaacaagaactactgaattctaggcagaaaagaaataggttggcaagcatttgctgtgatgaaatctgtacatattgatattttcttcattggtaccttagttggtacatttaagtaattacagaaacatcgtagaatttctgtgatactatgtgaaatttgtatttttgcttctaaaatcttttcattccttagggcttctgtatgtaatgtactgttgacttgctgcaaagataatgtgtgtcgtctttgggtagagacatttttaccaaatgattgtttgctatacggaggtgactgcagccattggactgaatca

SEQ ID NO: 117137 - DNA, 1043 bp, Homo sapiens
ctatccagaagctcggtaattcttaatttatagtaataacctgtttgtatttacttggttcatgaactcttttgcttatagaaactgatgatggtgttgatgatctgaaaataaatcccgaaaagaaggaattaggctgtgataaaatggtaccaaactcaagttttacatcattatcgtcagctgccattgatcatcagattgaagtacttctgtctgaatggagtaaaaatgcagatatgctatttagtattcatcccatggatggttctttgctagtttggcatgtggattggctggatgaataccagcctggtatgtttcgtcaagtacaggtactactgttatttctggagagctacttccttgtttatgtgggtactattttctaatacctctttatataattttatatgttctaacacttgctttcttgattctaggtgtcctttgtttccagaattccagtagctttccccacaggtgatgcaaactctctctgtaaaagcataatgatgtatgcctgtaccaagaatgttgacttggctattcagcaggggaaacaaaaaccttctggcctcacccgttccacatcaatgcttatttcttctggtcacaataaatcatctaatagtttaaaattaagtatttttacgcctaatgttatgatgatatcaaaacatgctgatggttctctgaatcagtggctggtcagttttgccgaggaatctgctttttctactgttctcagtatttcccacaaatccagatattgtggtcatcgttttcatcttaatgatttagcttgccactcagtattaccattattgctgacaacatcacaccataatgcattaaggacaccagatgttgataacccagagcaaccttttgatgctctaaatattgaagaatgctctttgacacaacaaaataaaagcactgttgacgtggcatttcaggatcccagtgcagtttacagtgagcttattctgtggagggttgacccagttgggccattgtctttttctggaggagtttct

SEQ ID NO: 117138 - DNA, 1061 bp, Homo sapiens
aactcgtgtgctgtttatgcaatttgggagaagacaaattttcttgaatgatatgttttataatgaaaacttatggtttggccattggataaatatcatgaagtcatccattatagaacttattcatttgaaaaatgtttggcaccaccatttcatcatgatatgttgagttgaagtacatattacatagttcctatctgtttagaaatttcctacttcttatggtttaatctttgtgaacaatttgatgatgatgactgtaaacctatcaattcaaacatgaaatagcatacatattattgtaaaaattttaagttaatacaaattcatgtggtaaaggatttgaatatattttataataccacttgtgtttgaagccttaggtaaaagtttttaatcttctttttttaaagtccaattattttaacttggcatgtttagcaagttgtctcttttacacatagtaacagtgaaaaatatcattaataccaacaggcagctcacctaatggattttctgagaagttctacctaattgtaatagaatgcactcaagacaaccgttcactgttacacatgtggaatttacatctaaagtcaattcctgtctcattaggtgagtcttttgtgtgtgtgtttgtgcaactttaataggtgtaagttaacaaattacacaaaattagataatttgggacatatttcttaaagccattctcattaaatggtgataactgtagattattcaattaattcaaaaagcttttcttattttctttctgtgaagaatcatattaatatgtttactattttatcttttacaaggcagttttggattgtaaaatgtaacaatcgtaatatttatagggttcccctgcctcagtttttggttcttttcttatgttttgtagatgaaaaagtagatacaaaattatccgaagcggtttggcagccagaagaacattattcttcttctccagagaagatcctatctcctttttcacaaaagtatcaggcttgcagagcaaatctccagagtaccagcaggttgactctgttttcaga

SEQ ID NO: 117139 - DNA, 2999 bp, Homo sapiens
aagaattgaagtaaattatctcagagttccctttcaactctaggttttggtgatactttctttttatatacctttctgatgtcattaaaagcctctttcttactattcttgctgcccctttttaacttaaataaatataggctgtctattatgcagtttaaaaaacatacagccaagatgcccctttgattttgttcatatttatagtagttaatacaaaagactaaaatcgtaagtacataaaaacagaagtatttaaccaaatttgacattttgttaacggattatttttattttaggacatctgagttcatcttctatatatcctgcatgcagtgctccttatttattggcaacttcatgttcagatgagaaagtaagattctggagatgcagagtaacagatggagaatctgccacgtcaaagaatggaaaaattgatcttgcatacatttgggaagaatggccattacttattgaagatggacttcagagcaatagtagtataactgtacctggtaggcctgtagaagttagctgtgcacatacaaatcgtttagcagtagcttataagcagcctgcatctaatagtagatcttcccaggactttgtgatgcatgtaagtatttttgaatgtgagtcaacaggaggttcatgttgggtccttgagcagacaattcatttagatgagttaagcacagtattggattctggcattagtgttgatagcaatttagtggcctataataaacaagacatgtatttatctagtaaagagaatatcacatcaaacacaaagcatttagttcacttagattggatgtctagagaagacggttctcatatcctgactgtaggaattggatcaaaactttttatgtatggacccctggctggcaaggtacaagaccaaactggtaaggaaaccctggcatttcctctctgggagagtaccaaagttgtgcccctttctaaatttgtactattacgaagtgtggacctagtttcttctgtagatggctccccaccttttcctgtttctttatcgtgggtccgggatggcatccttgtggtaggaatggactgtgaaatgcatgtgtattgccaatggcaaccatcttctaaacaagaacctgttataacagattcgtacagtgggagcactccatctataacaagtttaataaaacagagtaactccagttctgggttacatcctccaaagaaaactctgactcgatccatgaccagtcttgcacagaaaatctgtggaaagaaaactgcattcgatccttcagtggatatggaagattcaggtctttttgaagcagctcatgtactttccccgactctacctcagtatcatcccttgcagcttttggaactcatggatcttggtaaagttcggagagccaaggccatcttgtcccatcttgttaagtgcattgctggggaagttgtggctctgaatgaagctgaatctaatcatgaacgccgccttaggtctctcacaatcagtgctagtggaagcactaccagagacccccaggcattcaacaaggctgaaaatacagattacacagaaatagattctgttcctccacttcctttatatgccttacttgcagcagatgatgatagctgttactcatctttggagaaatctagtaatgagagtacgttaagtaaatcaaaccaattatctaaagaaagttatgatgagctttttcagactcaacttctaatgactgatactcatatgttagagacagatgaagaaaatacaaagcctagagttattgacctttcacagtacagtccgacttactttggacctgagcatgctcaggttctttctggccacttacttcattctagtttaccaggactcagccggatggagcagatgtctttgatggccttagcagatacaattgcaactacaagcactgatattggagaaagccgagacagaagccaaggtaaaactaaactccgtactgataacatttttacttactttcacagaaaataattttaaataatttttattaaaatgatgccattggctaggcacaggggcttatgcctgtaaattcagctctttgggaggctgaggcaggaggatcacttgaacctaggagtttaagaccagtctgggcaacatagttgagacccccatctctatgaaaacaaaaaaaaattagccagatatggtgcctcatgcctatagtcctagctactcaggaggctgaggtgggatgatgcttgagcccaggaggttgagctggcagtgaactgattgtgccactgcactacagcctggacaatagagcaagaccctgtctcttaaaaaaaaaaataccatgaaggttttttttggaaacatctttgctaccttcacaacagttttaactttttttccccccgagactatcataaacagcaaactcttaatatgcactatttatcctgtaaatcatagtactatgagcgagtgcacaaagactcgttatgctgttcatttttactaattttctgctcaatagtataaaagatccaactgaatctttctgagtttagcaaaatttaacagattcttattaaacaattattttaagtacctaaaaatgtggtttctgggttttttcccctcattttgtaataatccactattaacaattataatttggtttttaaaacattgagttttttttaaattagcattaatgtatgctcctacctagaaaagcataatgtaattaggtcttttcctcacccagagagcatttaaaaaaaaaatactgccaagttatgaacagtttgccataaaatctcaagtaagttctgaaatgaacaaattgagccttgtagaccatatatacgtcagtatccctttgaatgaaacttgaaaggaaaatatagggtaaatttaatataataacaaaatttaaatttaagaaaaattaagttggttatgaatcttgacacttttagag

SEQ ID NO: 117140 - DNA, 1033 bp, Homo sapiens
atactatttttgatgtgaatatgttataggtgttttatgtttttagtttttgcttcaaggaaaaaatatcaggccctcccaccatagaactgtttctcccagtgttaacagcagattattggggtggatgtatgattcgaacaaactgtattggttaaagataatactgtacatgtgccacagaaaaggttaaactgttcaaaaatcagtcacattttaatttaaataagatttcagtcagaagaggtcagtttataaagagtatcagattctctttattctctttattatttttccaattgtttatactattttttctgtaatgtaaaattctgtagaaaaagataaatgttagaaaatattttacactgataacttttttcttggtcaggttaagaatgttatatgcctatattgggtgttcttttgcttacaattttttttttaatacattgcttcccctttctcccattgcaggtggagaaactcttgatgaatgtgggttaaaatttcttttggctgttcgactccatacctttcttacaacttcccttccagcctatcgagctcaactccttcaccaaggtgattttgatagtaatctattaaagggaaataaagcgagtagaaaatgagagacttgggagtttttaaacttgtttttacccaaaaatgataatgatgacatatttaacatattttaagtttcctttatttgttaaaatgtttattttgtcataatctttgcttaaaacattggaatttttaatggtaggcaaaaggagttaatgaagaaacatactggagatgttctgtgttatgtttttaaatgcatgatatgttcaaggcaaattagtattgtttcattttctttaatttcttctttagattgtcttttctctccttttttttgacatttatctaaattcagtttttccaccaaacattgaataacatttgtgttataatacattctcaaattttaaatatttcacagagtacagaatattgaaagtgtaaatttacccacact

SEQ ID NO: 117141 - DNA, 3737 bp, Homo sapiens
tcttctctgccattactccctcttgtttttgaagcagcaaaaggcttttgaatagtctttacatttcatttataacgtgtttcaaaatatctaaagttttaaaatgtatattctaattcccaagtttttaattgacaaacttgttagtagtatatgtctgatttttacaaaataatatatatgtttagaaaaatttaaaaatagtacagaagaacttgtaatgaaaggcaatagtcctattattctctgtatccattgaagccaccactgtaagtcacttttgttattattttatatatacatgcacatattattcatatacatatttttaaaattttattaaacattcaatggatatgtgccagcctttcatatgaaagaaattacttgttcaaaactgtttctgtgaaattttgatcaatattttttgattataggtagctaaagcagccttttatagaaagaatgatcctttagatgctgccattttttaccttgcaatgaaaaagaaagctgtgatttggggattatataggtaggtaaaaaaaaaaaaaaaaaagggtgcttcaatgtgaaaacctgttcataagaagtaaatgaatgaagtaagatttgttgttcttgttgatgttgattcatgtagattcttagttgttttatatttaaaagagagatttcgtaaggaaaaagccccaagtgtttttcagagtggaagaaacctgatgaggtcagtttaatttgttttcagatttatcaatccagaaacaatattttgcttaagaacttctcattatgctcctataaaacaaaggtaatgtattagtccgttttcatgctgctaataaagacatacccaagactgggcaatttacaaaagaaagaggtttattggacttacagttccacgtggctgggaaggcctcacaatcatggcacaaggtgaaaggcatgtctcacatggcagcagacaagacaaaacagagcttgtgcggggaaactcctgtttgtaaaaccaacaagtctcttgaggcttattcactatcacaagaatagcatggaaaagacttgccccaatgattcagttacctcccactgggtccctcccacagcacttgggaattcaagatgagatttgggtggggacacagccaaaccatatcaggtaactaaaccagaaacttatgcttgggacagggaagaagatgaattaaatggtggagtctggaacaggcatttacctctgcactatgggccagcctaccccacaaaactatctccttcctgtgggccccaccttctttctgagctgaattcacttagaatttttctctctcacttctgagcaagactggtgaacatgattatcataaatagttcatcatttgttttgagtttatttccagatgacccacatgaacagcgacctttgggggaaaaatcacgataacaaatcggttttctaagagacttgatgatttacggttgttttgattcaaggcacattctttagatttttatctcttaggtcattctcagatggcaggggtgaaaagatactgatgagtttcaatggtggcacccaagttaatataaatcaaacattttgcatggatttaaaagtaattttcacagtcctgctaatgtagttttctttgtatttagaaagaaaaattttttgtaatctctgagacttatataacaaatgtttacctaatataatttttactgggaaaagaagcagatacatagtaagttatgaactggcagatgtttctatttagacttagccaaatcttaactttagaaaattgattctgatgtaaagaaaattgtattccaaaattttcacaccattttttttcctttatagagctgaaaaaaacaccaggatgacacagttttttggacacaattttgaggatgagaggtggcgtaaagcagctttaaagaatgctttttctttgctaggcaaacaaagatttgaacattctgcagcattttttcttttagctggttgcctcagagatgcaattgaggtaatgagtgaaatttaaataacaaagtatagcaatgtcatcttttaaagctccttagtgcttaaatttttatttttttaaattcaactttattggaaataacacaaggccaaatatctgaaataactgttaatatttaataaagacatttaaaattttgactgttaacttgaacggtatttatacagaattaagattaaccaaatggtgtttgttagttggtagagataggtaattgatttgactcttgagaatattcaaaaaattaaagggtttgtcctaccagtttaaacatatttgaaccccatatctggctctctattatttgatgaatgttagaaaatccttaactgattatttcttagtaaaccttaaaaaaattatgaatatttaagatacaacatttctgtctcaaattgcccttttgctcagagtttcatacaagtaattcaaaacaaccttttaatatggagactaaagtctccaggggcggatggagaatagtagaggttcaagacagaaataaaataatatagcttaaattgacgtcatttaaattatccattgtttcctcatttagtttaatttttgcacatatatatatatttagtactagaaggtaggtttgcagttattaaatgttgtcaagtagatttgctaaaatctaaaagcaagcagcatatgttttgtttcttatccttctttgctaattttggatatttataagcctttatatttttctagttattagtgagttaacagaatttatcctaaaatgaaacctgctcctgcttatttaaaaacaatatttttttttaaaggtatgtcttgagaaattgaatgacattcagttggctcttgtaatagcaagactctatgagtctgaatttgatacatctgcagcatataaatctattttacgtaaaaaagttttgggaatcgattctcctgtcagtgaactgtgttcattgaacataaatatgcatcatgatccttttcttcggagcatggcatattggattttggaagattatagtggtgctctggaaacattaataaagcaacctatcagagagaatgatggtaagctgcacttctaagatgttaatgattaagaatattattggtaattgctacatgtgcagatcactctattaggtggtaagggtaatacaaacaaattgaattcatggtctttataacagtttttggttggttgtttggtttttttctccagaaagataaatcctttgaaaacaaagaacgttggattttctgtttttacaaaatagatttacataaatattgaacataaatattgtcaacacttgaatataaacattttgaagaaatactgttataaagccagtttttaaatcttaggttgaatttagtgtgtttgtcaatcagttttagaattcttacagtgaaaaatgtgttcagtgtaaaaacaagttgacttaagtgatgtgataagaaaatctttagctagatgaacttttgactgtcttgttatgaactggtagagcttatgtactcttttgagtctgctagtaccttttcttttagaaatcctctttgctaaagctttcttagaggccagtataaaatggaattttttatatagatgcatataaaaatgagatttacttttcagatatgttttcatagattgaattgtgtttggtagctgataaaata

SEQ ID NO: 117142 - DNA, 2949 bp, Homo sapiens
ttttagattgaacaataggtagatgatatggggaagaattgttttagatcatggagctttctctgataaggtgaactttgatcagagaactggttgaaatgagtgagttaatcagtatagatataggtaaagagtggtttgggtcaagggcacactaaataaaaaggccccaaagcaagagtttatacacataagtaaaaatgaaatgtaggcctttggatataggagtttaggttttcagtgtgaagttgggactggagatagagatgatgtccaagttatcagtgtgtagatgttattgaaagtcatggggactatatgaattcaactcagggaatatagatagaaaataagtcagcagttgaaccctaggagactctcagtgttcaaaggtagagaagatgaggaggactagcaaagcagactgaggagaagtgttcagggaagtaggagaaaaagaactaagagtctataactggacgttttaaattatcctagaatattacctgaagagacttgtttcaatgggaaagcatcataatctttgttttcctactttgttagaacatgttcattataaatgtgttgttgtctcttcagtgccatggatcattgtggcctattagtaaaattttgtcaaaagactctttagataaaggtgtcatagtagatagagaaaagacactacaatagaaacacacagttcataacttttcttggctcataaaatgaatttactttcagatcaagttttatcagccagtaatcctacagtttttaatttctacaattatctaagaacacatcctcttttgctgagacgtcattttggatcatctgatacattttccacacatatgagcctaacaggaaaaagtggactggcaggaacaattaatttaagtgaaagacgtttattttttaccactgccagtgctcatttaaaagctggctgcccaatgttggctttggaagtattatcaaagatgcctaaagtcatcaagaaaacaagacctttttatagggcttctagttttctggatactagtaaagactgttctccttcttctccattaaagttggatgcaagggaagataagtcttctgctgttgattggtcacagtcactgataaatggttttggatcttcttcagagggttcctcagagaagcaatcaaactccactctttcttttgactggagccaaccaagtgttgtgtttcaggatgactctttagagttaaaatgggacagtgataatgatgaagaaaatgaggatgtccctatttcaatgaaagaactaaaacctttacagagaaaaacagataaaaagttggatgacataagttctaactacacagaatctttcagcacactagatgaaaatgaccttttaaatccatcagaagatataattgcagttcagttaaaatttagagcatgtttaaagattctcacagtagaacttcgtactttatctactggctatgaaatagatggtggaaaattgcgttaccaactataccactggcttgaaaaagaggtgatagctcttcagaggacttgtgacttttgctcagatgctgaagaactacagtctgcatttggcagaaatgaagatgaatttggattaaatgaggatgctgaagatttgcctcaccaaacaaaagtgaaacaactgagagaaaattttcaggaaaaaagacagtggctcttgaagtatcagtcacttttgagaatgtttcttagttactgcatacttcatggatcccatggtgggggtcttgcatctgtaagaatggaattgattttgcttttgcaagaatctcagcaggtatgtaatttacttgatagtcaaaaatggtacatgtctaaaactgtttttggtgtttcttttttggttttgaatactaagacttgattttctttattacggttgctttagggaaagctcccttttgtgtggtccttcatattatgaattatagagttgtgtatttatagtagttacagacgattcagtatcaggccttatgacctgcttaattcacactccaaagtgttgtctgaatgcctttgtagggtgacagacttcttattgcaagaggatattgtcttattttttttttccctctctgtgcccctaaatgtcttatttttaaatatgattattgaaatgctgacttcttcacatcccttctaactctaagtttctattatgcttttattttttaattgttttgaagtgttttaaagagcccttgatttactgaagtaatggtttgtaactgtaaatagttggttaaccttttatccctctttgtttttaaggaaacatcagaaccactattttctagccctctgtcagagcaaacctcagtgcctctcctctttgcttgtacagccaatgccaaaacagtagttgccaatccattattgcaccttagtaatctgacacatgatattctccatgccataataaactttgattcaccaccccaccctgatatccaaagcaataaagtaagtatgcttggtttcaagcttttacttcatctgtacaatgataaaactacaagataaatattaaggcttttttttaagtaattttaaacatcagactaagcatagcaattgttacattgccaagtttatgttgattcctattaaagaaatcttctggttgtagactggcttatcttactcatgttacttacacccggtagagttcttgaattttttatcacaatgcctagttatttagtctagctgctttaagaaaaataggtacgtatgagtcctttagtagtacatttaaccaaaaagctcattgttttttaaatatagaaacttaatattttaatgtaaaggcactaatatgtaaacgaagttttcccttgttaatactaaagaaatccacattttaaggataatgtgaactatttgcc

SEQ ID NO: 117143 - DNA, 1019 bp, Homo sapiens
agattgtgctcattttagccaaactatatttcatatttaaaactaattatagcatacctgtggtgtatcagttaccttttgctgcttaagaactgtcctgaggccagtgtggtggttcacgcctctaatcccagcattttgggaggtcgaggcaggcagatcacctgaggccaggaattcaagaccagcctgaccaacatggagaaaccttgtctctactaaaaatacaaaaaattagccaggcgtagtggcacatgcctataatctcaggtgtttgggaggctgaggcaggagaatcacttgaacccaggaggcagaggttgcggtgagccaagatcgcaccattacactccaacctgggcaacaagagcaaaactccgcgcccaccccccgccaaaaaaaaaaaaaaaactgtcctgaaacattagtggcttaaaaagccatcatttattttgcttataattctgtgagttggttcattagttctttggtttgggccagctatactaatgtctggactctctcattcatctttggtcaactggtgggttagtcaggttctagatgatctaagaaggcatcatttacatttctggtggttggcgcatgttgacagcactgacaggagaatctgggtcatatgtatctcatcctccagcaggcaagcctaatatatttgtctggattcaccaaagaaacagaatcagtaggatgtatgtgtgtgtgtgtgtgtgtgtgtgtgtatatatatatgtgtgtgtgtatatatatatatgtgtgtatatatatatgtgtgtgtatatatatatatgtgtgtgtgtatatatatatatatatatataatgagagagagatttattataaggaattgttttatgtggttttggaggctgaaaagtcccaagatctgcagttggcaagttggacacccaggagagctgatggtgtagttccggtccaaatcagaaggcctgagaaccaggagagctataatttaagttcaggtcagaaagtcagca

SEQ ID NO: 117144 - DNA, 1047 bp, Homo sapiens
tagcgtgttttctttaaattttctgtagtaagactcatgtagataaaaatgagtgttgtagaaaaaaaggaaatagttcatgaaggcaaagaatcaaaaattttttcattcttttaaaaatgctgattatattaggtcttgaaaaaaaatctgcactttaaaaaggttatacttaaagtaattttgtttttgttttccaggtgtatgtaatgcatactttagcagcttcactttctgcttgtatttatcagtgcctttgtggtagtcataactacaggtaactatctttttatgaaatttaagaatgcttacagtaagcaatgaggtttcatattttgtatgttagtggtttagaactatatataacagtcttttaaataatgcaaaaagcatatggttgaggttttgagtactttttgttcatatttgaaatttttatggcagatgaatctcaaacccttattctgtataacttatttagcagcctattactggtcactgccttatgtcagacattgtgattggcactgagaattttaacgcaaataatatgataaagtctatttcttagggccagtctagttagagacaaacatgtgagttgataaatgatatgtatataatatggcatagtactaaaatggtaactataataagacagtagatagtaaaaggctcagggaccacatgggagggagtaacttggaattgagaaaaattttaccaaataattgatgtataggatatttctctgtatttctctttatgttataaagttttactgaaatttatctaggcttcaaaaaaatagtttgttaccctctggggtctttctatatctatctttagttgtttgaagtactctatttcttcaagtattgtctcatctctcttctatctttcctattaaacagatattgcaacttctgggtcatttcttaatgttctttaactttcccctcctatattccatttctttatctctttttgtttcatttcaggagaaattctagcttcattttccaaacacggattcattattcagca

SEQ ID NO: 117145 - DNA, 2685 bp, Homo sapiens
ccattttctgtcagaattatttcatagtttatgtcaagctgcaggtttttttgttcattcatctgttagtcttagctttgcatcttttacttggggaagcttatcctgaattctcaaattgtgtgaaatactcctctgtattgccttgatagcgtcatatgcataggtttcatcttttaagagtagtatgataacattatttgtgttttgttccactattaaattttatggggacagagacattgttattccttatatgcctagtacctgctacagtgcctgatgtagggtaggctagccattatacatgaaagtgagcctaaacggacttcattttcaaccagataactatgtttttaagtcaaatatgtaatcttgctacttgtggtacatagcgatttagttttctcatttgtacttattctgtcccttaaaatgtgttttaatttagaaaatgtgtatatttacacttaaaggatactttgtttttatatagcactagactgtacattatattacttagatgtactagcagtataattaataaacaaaaattgatactcttgaaagtagatctgaaacatgaaaatattatataaaatttatcatagatttaaatattgtttttttctcttagttcatttcagacgaatcagtttactggaatggtatatcagacagtactgcttcctcatcgaccttctttgaaaacaggaagcttagatgaagcattaactcccaatacgtcaccagctcaatggccaggtataatttttatgtatagatcagttttttcttagtcttatttataatcttagataagtagaaagacttttagttttgccacatgataatcattgttaaatactgttagaattgataccagttaagtattcaccactcattctgaattacagttacttaacattagtattcccttgatcattatactaatataactcaaatgttttgtaataccgttttttaaatcattttgcttttgacatactagaaaaacccgtctatgaaaatttatctatgacatcttagtcatgaaagattttaatgtttaatattaaagatttttaatgtttctctcaagtaactcatttgtgcttaactataataaccgctactagtctgtgaatctagggaagaaaatacagtattaactcctgatgcaatacattttttcctgaaattagaaaaatatagttaatttttaaaattttaaaaatttatagtcagtgacagctatgtttgtttgtcgttctaggaataacttgtctaattcgacttttgaattcttctggcgaggaagcccagtcagggcttacagtcttgctctgtgagattctcacagcagtgtatcttagtctcttcatccatggcctggccacacattcaagtaatgagctatttcggattgtggcccatcctctaaatgagaaaatgtggtctgctgtgtttggtggaggtgcacatgttcctagcaaagaacagacacattcaaaaactttacctggtgagtttaaaaaatttttttaggactgaagctttatttatctgagtgatatcattctcaaacgtaattacattttaatttagttatagaaagttctggttagagaccatttgcgaaaagcataaacaaatagtcatacagtgaaaatgcagtattaaagtttctggtgcagtttttaatctttaagatattcctgtaccaataattagaacgatcttatgtaaatttattaaatattttactactgaaactttcatttgttttgaaacacactgtaatattggtttttgttctatcccaaatacggattctttcttctttctttggcaggaaggcactttgctatgcctagcccccaccaggtagtggtattctccatggaatgtgtgggcttttccaaagctctttcagccatcagttctcatagccctcccagtcttgcaggcaagatatgagctttagaaataggcttttatcattcagcttgctttgtgttgttttgaggggttggggtacagtgggacagttttattttgtttggcatttatagaaaattgagaagtttcctttgatcaagccatatttttgatttaaaacaatgattagcagtttagaaaactatctctgctattttattctgcttttaaattctttgttttttatatttctgtcccttagactttaacattttaaagtgtgtaaaaataaaacactgtcagtgctaatcatagaaaatcagactatggcttgaaatgactagaaaaacatttcaaattaggctgctttatgatttgcatattatgattccggccattggagtttttggatttctaagtgttcataataccatgaaaagtaaatattttaaacaattgtatccccgtttaaaaactttctaatgttaaaactgtatttttttcatgtattagcccatgtgtgataatcttagttttccaattatggagggcatgaggagtagctttatttttaatacatagtacttgaaaacttatttcattctatattggtgttgaataaattgaaaatgttaaatgtttttccaaaaaaaaaaaaaaaagccctatgcatacatttgagagaagctcagcaaggttatttatctctttatgagctttcattcacttcttccctgacgttta

SEQ ID NO: 117146 - DNA, 1039 bp, Homo sapiens
gtctcactttgtcacccaggctggagtgcactggcatgatcctggctcactgcaacctctgcctcccaggttcaggtgattcttgtacctcagcttcccaagcagctgggactacaggtgcacaccacgacacttggctaatttttgtatttttagtagagatgaggttttgccattttggcctggctggtctcaaactcctggtctcacgtggtctgcctgtctcagcctcccaaagtgctgggattacaggcatgatccactgtgcctggccagactttttttttttaatcactaatcttattctttgatgattaagaagtaccttcaattaattgcttctttaatccttttatttttggaatatttgaagtttacttggaaaatcatgttttacatttaattttgaggatttgttttatacttagtgttcacgtacatttgtagttctcaaactttttacctgaagataaaggttaacatatacctcttaggagactgaggacttagactgaattggcttgctgaaagcaagaaataaatttgaaatctgtttgtcttaaacttgcatgacttttatcttttccatatttggggggctcagttagaaggtccagactaatgtgcctcctgaagcttcgtgtatactctggcacactcatgaatagctctgtggatatgggtgccttagattgagaaatagagagtgagacctgctggttactttaagttcagttattttgttgtttgttttgttgttgagacaggttcttgttctgttgcccaggctggagtgcaatggtgtgatctcagctcactgcaacctccacctcctgggctcaagtgatcctcccaagtggctgggactacaggcatgtgccaccatgcccagctaatttttctatttttttgtagagactgggtttcaccatgttgcccaggctggtcttgaactctaagttcagtttttaaagaaatgacatttaaatctacattcagaatattaatttcattgtgctgattttaaatgataaactga

SEQ ID NO: 117147 - DNA, 1076 bp, Homo sapiens
tgcattatttttcccctgtctaaaatgcttttcttccctcttattatatggcttgttccttcttgtcatttagttctcgtacttttcaaagaggccttccatggtcagcttatctcaattctccttattctccatttcttttctttgtagcacataatacagtttgtatttagttttctgttatttgcctatttttttccagtaacatgtaaaaagtaaatgagggtggtgattgtatctgtcttaaaaattcttaaatccggtagaattcttgccgcacagtggatacttaataaatttttgctgaatggatgaataaataatggaatagtatcaattgatgtcaaaggcataggatggtaagataatagttacttaactctcttataatgaagtatctgcaaatgagatgaattattactattagactgtatgtttgaatgtattaaattagatatgtggctgctaaatttcatgatttctttattttagccttttctaccctcttctcaaagtagagccgaatatgattcagaggagagtctgggaagtgatgatgatgacaatgatgatgatgatgatgttttagcatcagatttccatctccaggaacattctaattcaaattcatataggtatggtatattttattttaaatttctttttaaaaataatggtgtatataaataatatttttgaaaaaattacatgtgaaattaatagcttgttgactttataacacattataacccagatttctttagttgaaattgttaaattcctttccttaacaataatttctctgttgactttataacacattgtaactcagatttctttagttgaaattgttaaattcctttccttaacaataatttatcacatacctttggttgtccattaatggaccatccgtaatttgcatcattcctcacagatcttgctccaagattataccttgcattttgggctctaacataaacaagttctactgtttttgtctggaaaatatattttcagtagaacactagtactataagatgtcaataggtactatcttcaaaaagtactctgta

SEQ ID NO: 117148 - DNA, 1046 bp, Homo sapiens
ctagaatagtgaaatacataaagaataaaaataaaatagtggttttcaagggctggtggtggggggagaatggggaatgaatttagagtttcagctttgcaagatgaaaggaattctggagttggatggtggtggtggttgcacagcaatgtgaatgtacttaatgcccctgaactataaacttaaaaatggccaaaatggtaaattttatgtttttgtattttaccattaaaaaattactaaaaattcaatcctttaagaaataaatatgttccacttgaaataaaagagaacctgacttttttaaaaatcaaactatataaaaatgtgaaatcacaagttttacttaaacttctctttactctatccaatttcttctgcacatcctctacagctaaccacttttattagcttctggtttatccttctgtttgcaaaaataagcaaaagcatctatctaaatttattccccctgctttcttgcagagagggtggcatactacatacagtgttctgctacctgctttttatttattactacataccgaaactgactccatattaacacttagagatccttcttcattcttccttatggttaccctaatattccataggtcaaaaatagttattcaacaagtactctcctcatggacaattttggttatttctacacttctgctattgtagataaagctgacatgactacctctatgcatatattattttgttttcatagaggggtatgttcaggttgattcctgatagtggaatttgttgagtcaaagggtagtatactcttctaaatccctatagaaatagttaacagatccatcgttgctttatttttagttggtccttgatgcggttggcgatggtgcaattggtgctcaacaatttgaagactttttatcccttcgcaggtcatgatcttgcaggtaataaatagctcaacatgagctaatggtgccattgcttttgacttactactctgttgtttttttttttttttttttggtctggactggggggaaaatttagtgatt

SEQ ID NO: 117149 - DNA, 1060 bp, Homo sapiens
attcaaagctgtctgggccgcatgcagcctgtgggccatgggttggacaagtttgatttaaagcgattaattttccccacatacatattttcataatcttcagatacatttttctggtaatattaaggtcaaaagcagtaatgttgaaatacttacacagatttatggcataccttttgtaatccactgggtttctttgcccacctcaccttgcacatcttccctgccaaagtgtatgttaatatttcatctcagtctttttttttttcctgcatctgctctcccctctctcatttcagtctttcttaaaattgaatatggcattttactgcataagattaatatgagtcaatgttcccattttagagcttccagttagttcacctctttgtcatgcggttctaaaaactcttcaatgttgggaacaagttcttctccgacgacttgaaatccatggtgggccacctcaaaattatatcgcaagtcataccgccgaagagagtttgtctgcaggtcctgcaattcttcgccacaaagctttactggaacctacaaacactcctttcaagtaggttttcttatgaatgctatttgggtttttttgtttgtttgttttttgagatggtgtctcgctctgtcatccgggctggagtgcagtggcacaatctcagctcactgcagcctctgcctcctgggttcaagtgattctcctgcctcagtctcctgagtagctgggattacaggcgcctgccaccacgcctggttaatttttgtatttttagtagagatggggtttcaccatgttggccaggctggtctcaaactcctgacctcaggtgatccacctgcctcggcctcccaaagtgctgggattacaggcgtgagccaccgcacctgccctgaatactgtttttaagataggagttttactttttgtgctgtacattcttgtcataactactcaaccctgccattgtagaataaaagcaaccatagacaacatgtacacaaatatattcagtttttgtccaataaactttatttcttaaaatggtaggta

SEQ ID NO: 117150 - DNA, 1065 bp, Homo sapiens
gctgaggcaggagaatcgcttgaacccaggaggtggaggttgcagtgagccaagatcgccctgttgcactccagtctgggccaaagattgagattccatctcaaaaatatacatacatatatatatatatatatttttatatatatatatatatatatttatatatttttatatatatataatttcttaccttcaggttatgcatataagatgtatatgaaacataaatgaatttttaatttagacatatatattcaaatatttcaaaatctgaaaacatatgaaattcaaaatacttctggtcccaagtactttagttaagggatactttacctgtacattatcagacttgagtagttgtgacagagaccatatggtccacaaagcctgaattatgtactaatcctttaaggaaatcctttaaggaaaaggttggccatatgatctgcctccagtcatacagtctgattgcagttaatttattataatttatatggcaccaaggaattgttatcaagttagtcagaaatttctgaagtttatcattaaatttgctgtctctctctgtagatccaaacaccatctggcactgtctgtgaagaggctttggcagtatttggtgaagcaggaagaaattcaggaaacctttatcaaaaatatattcacaaagaaacggtgtctaaatgaggtctgtataagttaaaacctgtttactattttattattgaagtcttttatattatcatgtaaccattaaaatgagttgtattttacagattttttgaaaacacgtatcataaacataggcaattaatgcttagaacagtgtaatttataaaaggggcagtattttcataaatcaatttaattaattcaaatgtatttgggacttttttctcgataaaaatgtttaatattccgcatcttgttttgaattgtcatgatcatcaatttaagagacaagatagaaattttctatgattttcatgtgacagttaaaagaagtctatcttagaagtttaattgtaacttagaagtttaattgtatactgaaaattttttatt

SEQ ID NO: 117151 - DNA, 1048 bp, Homo sapiens
ctaacctgcccatcatcatctaatttctgctctgtatgcagatattttcttctgcctcctctaacagagtgaactgttaccctttttgttcaaggccagaactttcacttgtgcacagttcttatctgctttcacctacccaagaacttgtcttcagttcttaataactgaagcccatctccctctctccttgtcaataaatgtttacctctctcaaattattctcattagcatgagcaaatatattttaatgttttgcctttaaaaaatactccatttctctagtctcctatgtagcaaaattcacttagagttgcctataaagtccttcaagatttaaacaataatgttgaaacaccataaacaaaccacccagcttaagaaataaaacattatcaattcagttgaatgtctctgtgatcctttccccgtggactccccttcttattcaccagatatcacattctctctaatttggttattatctccagcccactccactgagattgtcctagacacagtcaccactgacttccagtatactaaatttagtagtcaattatctatcttcatatgattcaacttcttaataatcatttggtagtgttgacgcataacatttttctaaaattgtttcctcacttagtttccataatatcaaactaatctatttcttatattagctaattgataactactgaattgtcctttttcccatccttgaaatattggttgccccagaattcagttctctaactttttatctttcctgtctttactctctccttgggttatcttacggtttaaatattaatataatttgtatgctgacaactctcaaatctctctcaactaatttcccgaactccagacattgcctgctccgaacctactccctactgtttccttcacttctgtccatctcagtaaatggtacctttactcacccacctatcaggcctgacactaggattcatcctttttctttccttcttttattcacactatgattacagtccattaacaaaatgtatcccaattccagcca

SEQ ID NO: 117152 - DNA, 2063 bp, Homo sapiens
aaattatagtgaataattattttaataatagaaccactgccaacctttattacataagccacaaccgtacctcaattatttattacctcatcgtactcagtttgtattttattactttttttcagttggtcttttatgagacacattaatagtaaacataggaaattattattagtttttatattctaaggcagaatatatgtgttttcagttaatcttcctaggaatcttaaaagtttctcttccttcaaccaagaacttaattaatggggaatttattggaggtattgattctggtgggttggaatcaatactcatactggtgtgtgagtattccaagttttttaatatttttttttaagttatgcccttcgtcaaattgtcctactacatagtaacaagaataatgcatgttaattaatgggtattcatgtcccccagtttaatagcctattaaaaactttagaaacttttctcttgggagatattctgataaaatgcagttaacaaaatcagtattcttttctgcttcatttatgataaatgctcaaataatctattatcaaagttgtgtacgctgtacgaaacaaggctcaagagaaccgtatatgtaaaatgaagagaataacatctgttacttatgctagaggtataacataatataaaaaatttgtctgttttcactacatcaaatttattcatcgctagaagtgtgtattttttacccacaagtttaatgtcaggtgagaactaaaaagcagtcatgaagcctatagtgtaaggagtcaaaatgtgttttatatataaaatttaaataatattattctacatcaggaaatacttgatattgcttaaaactaccctattctatgcagtctggttggaagttttctgagatactgaagggacttcatttttctctcagtcccataccatgtgtcctggcaggtgtaaatatcctataccttaatcccataaacttaaagaggccacgctcaaagcttcaaaggtaattgatggacctattgtcagaggtgttaggtagcatcaattactgctgtcttgagagataaatcctttctctgtttagagaactgccaaaactagcagataagacacctgaaaaattaaaagctaattactggattttttttccagtatatcttttcatgtcacaaacaagtcccacaggtagtaatttagtttgataacaaacacttttcgtgttgtgaaaatgttatgagacaggatttttaaaaatattagtctgaagttcagatacctcaagatagctgttttctttccttggaatagatcttttgaaaaattcttaaagaactttttagaagttagcctagtacattttataattttctgagtagaaaacacactgtttctctatgctgtcatgtacagttctgataccagatgtgttggcttttgtccactccaagccattctccacctctccaagtactggctgggtgccttataatttggtttaattatgacacagtctacctggagttagaatcatatcctacaggttaagggctcagtcccacaaaactgctccttacttcagacaccactcgcaggttatcagttttcacctacacatctggcatactggctataaatcagagtgcccacagctccctccttgggtttgattaatttgttacactgattcacagaactcagggaaaatgctttacttacatttatcagtttattataaaagaaacagatgaaaagtacatagaatgaggtctgtaagactcctaagcagaggagcttctctccccttggagttagggtgcactacaaacctggcacatggatgtgttcaccagccaagaagctcatcagatctccttgttcaagagtttttatagaacttaatctccagctccctttcccacccttttctggaggttggcgagtggaactgaaagtttcaatgctttaggctatctgtgggaccccatctaagacactgcattagcataaattcaggtgctcttccatgggttttagtagctgtatgccaggatccaggg

SEQ ID NO: 117153 - DNA, 1032 bp, Homo sapiens
taggcaacaagagtgtaaaactccatctcaaaaaaaaaaaaaaacaaaaaattgtagccagagcatgttggctcatgcctgtaatcccagtgccttggcaggctgaggcaggaggatcatttcagcccaggaatttgagaccagcctgggcaacatagggagactccatctctacaaaaaaaaatttaaaaaattagccagacatggtggcacacatctgtagtcccagctactcgggacattgaggtgggaagattgcttgagcccagaaggtcgaggctgcagtgagccaagattccaccactgcattcttttttttatataaaaattagtttcatataaatttgttggttacttgtatttgttgcttttataaatttaagaaccttctgtgacagcaaggtttaaaggtcacacagttatatatgacatattttttattgttagcttttgtgtcactcagaagtaatctttttttttttttccagaaacgtatgtttgtgggatactcttgtagcacctgccaatagtttagtccatggtaagttttcaaagcattttataaattttgaaagtcaggaaattcataagctaaatattatttataagtggatttgttactgatgacacatatatttattaacccatgagatttcttttgcccaggatggcaggatttgaaagcaaaaagatgcaatatacgtaattaactcttcactataccttgatgggggacagtgagacatcgataatataaaaatcatttgtctttactttgaatctgatagccacaggttatcgttgtaaacatgatgtaaactcaatattatgtcccctcttaccactcctattcaacattgcactggaattcctagctaatgcagtaacacaataataggaaataaaatgtatataaatggaagggaagaaataaaactgtctttattcacagaaaacataattttctataaaatatcccaaagaatctacaaaataaattcacaagtatagcaaggtcccaggatacaaggt

SEQ ID NO: 117154 - DNA, 2545 bp, Homo sapiens
ctaaaatttttatttggtttcttttcttttccttttttttttttttttttttgagatggagtttcactcttgttgcccaggctggagcgcaatggtgtgatcttgggtcactacaaactccacctcccgggtcgaagcagttctcctgccccagcctcctgagtagctgggattacaggcatgtgccacctcgccgggctagttttgtatttttagtagagatggggtttctccttgttggtcaggctggtcttgaactccttaccttaggtggtctgcctgccttgacctcccaaagtgctgggattacaggcatgagccaccgcacctggcctcatttgatttcttaaggtcatcatcaaccctaattttccgtttgttcttaatatctttcagatttggagtctctctacctttggtcttctccatacttttgtcagtgaacatgctcggcagtccatttttagaaatattggaactggagtgatgcaaattgagacagggcctgcaaatcacattttctcctgtggagctgatggaacaatgaaaatgagaatactgccagatcagtttagccctttaaatgaagtgttgaaaaatgatgtgaaatttatgctataacatttttacaataagatgtacaatttattacctatatggaagtggccaacagatataatatacagtgatcattctctatgccacaaattagctaatgctttcttgtttttatatttattttatggagctttgcccttgatgcactgatgccttaaaaattaacaaggtcattcagaagtagattacattgcctaaagtagaatgtgtaagtaatgctgtaataatacatatcatagtatattataatcagtatgtcatagtgttaaaggtgttttgttttcttattgatacttttccacaggcatctctgcatgaatttcttccacagtaaaaatacgttttttgtaaaggcaattgtacataatactcatcacttaattcaccacactctcacttcctttattagccttatacatctcaaactcttctcttaattaatgataggtatttgagtaagaatgaaaaaaataatgaacatcttcattaaaattgtcattgagacgtcagtgataaatgagctagatggctcaatatgtaaggttttcagtagtttaccctccggaacccaagttgtatgtatgtatacgtgtgtgtgtgtgtgtgtgtgtgtatcttacacatcttatttgaacttagttgtatatattagcgaaaactggtttttcatgtgtttttgtgccataacaactattgccaccagaataactttttttttgcaactgtgcttttcatttttaaaaaatttttgaattcccatcctaattttcaaataagtttcaaggagactatcaggattattattttaaagattagatttagtcaaataagtcttagcaggcaataaagtttctgtggtggcatatatcatgtaagacacttaaagtaagtttgtgaatttgtcaactttcgagcatcaaacaaatattttacttaaattttattttatcttatttttaggtgcttttaatctcaaaattctgaaaagcgaatagcagtgttttcagaaacaaatgtgaaagcagtcaaattaagtagatactatttagaaatgtaaaatactctccagatctaccattaatagaaaataaactaaaccttatattttatttttgccaaaatattttattataaaatatgaccaaaatatttaaaatgcacaatgcttttaacttaaatgtgctaaccctgtttctgtctgttttgtgctgtaccttttctgattcagaattatagaaaacttgataaatacttgattttaaccaatgagactacaggcagatgggactaagtgtttatgggacaattatgtactatttaacttaaatatattttgtttaataggaaatatataataatagcattttatgtaataaaatatgggcaacgattatcttggaaattaaagagtcaaagcaaagaaatgaagggctggtaaaatgaattttgtaatatcctcaggatacttttatcttaaaagtatgttgttaaagattttgtaaattgtatttcaacaattttaaatgtgttgagcaagttgcagtgcaaacactgtcattatgtagagagtttatatgcacataataacctgtacctataaatcgtgcaataaccatatgcgactattttgccatggagaaatctgacagcattgcaaacaatagtattgtttgatgtagttaaccttaagttatttttcagtaatttcttcacaaatcaagattcaaacagctttaaacacttccaatgagataaaatatttactattatgcttattagaacaaaaggtgtttaaggatgaactaaatattttaattgagcatttatatggataatcatacattatgtaagcccatatgtatttacatccagagtcataatattttaaataaacaatcatgcagaaacttttttagggggtatacta

SEQ ID NO: 117155 - DNA, 1088 bp, Homo sapiens
acgcatttactgtgtgtggggcttttgattttttagtgtagacacaagtttccatcagggattttttttttgtccttcagcctgaagaataaaaatttttaatattatagctcacgtctactggccacagatcctctcagcttgttgtttgtgcgcacacttggcgtctgtgtgtccagctctcctcttataaggataccaatcaaattggattggggaccaccttaagactaattttaactgagtcacctctttaaacattctgtttccaaatgcagttgctttctgagatattgggagttaagtcttcagcatatgaactttttggtgtttcttagtctgtttgtactgctgtaacaaaatatctgagactgggtaatttgtaaagaacagaaatttattttccacagttctgggggctgggaattcaagatcagggcacccacagattcagtgtctggtgagggcagctctgggcttccaagagggtgctttcttgctgtgtcctcacatggtagatgagatgggaggtggaggggcaaaaggcactggggtacacctttcaacatcttttgtaaaagcactaatccactcataagggtggagcccttatgacttaatcacttctaaccacctcttaataccaccaccttggggtttaggtttcaacatatgaattttgaggggagatacaccttcagaccatagcaggagggacacaattcagatcataacaatcgggatgttttagactgcaattaagcaaatgccaatgaacagtgatttgaatagtaaagacattaaattgtcttatatgaagggcagtctgggattgggtagattcaggattggatccttggctaaacagtgtcatcagggaccagttctatctattctcatccttagcatgttacatttttatctgcagacttgcctctttgtgggcggaaatagctttctcagcaacaggtatcacaggttcctgccaacctctttttaagacaggaagggggagagagagagagagagagagagagtgtgtgtgtgtgtgtgtgtgtgtgtgtgtgtgtgtgtgtgtgtgaagggtg

SEQ ID NO: 117156 - DNA, 1070 bp, Homo sapiens
atagttcctcttgcaggaactatgccacctagccagcttgcaggggcttgctggagggcagtaacagagctgggttccagaggctgcaggatggagatcttgaatattgtagaacagttcttcaacagaaaaaaaaaatcttttgaacagatttttctcagagctatttaaaaatccctgatttaggccaggcacctataatcccagcactttgggaggctgagatgggtggatcacttgaggccaggagttcaagaccagcttgaccaacatggcaaaaccccctctctaataaaaatacaaaaattagcccggcatggtggtgcacgcctgtagtcccagctccttgggaggctgaggcaggagaatcgcttgaacccaggatgaggaggttgcagtgagccaagattgcatcgctgcactccagcctgggtgacagagcgaggctccatctagaaaaaaaaaaaaaattctgtagcataaaaacatgactctaagtctcacagcctgagtagccccaggtttataaatccattgtcagggctgcaaacaacttgagagcaacctgccttgctgataacaagtcagcagtgttactagcatttgcttgttaacaatacctcaataagggacaagaagaagggaggtgaaacttaaatgtgccaattttgaaacttgctaggcattctagtagtgagtttggtggagaaagaagttaaaattatctaaaaataacgtttttgaatttcttactatctgtgccatctctccatatgttgtcagaatctttttttttctaatttaaagcatcatttatacccagaggaatatcatagagaaattttgcttacatggtctttttgaaatagttaagcaaaggacgcagccattatttggtactaggtaatgggaaaagctctggacaggcgagcaggaggaggcgagcaggcgagcagactgggtatataatattgctgagatgctcaacccctctgggccataattggtatatctaagaaatgtgagttgtcaactataaatcatctctaatccctcagtgtgaaaattct

SEQ ID NO: 117157 - DNA, 1072 bp, Homo sapiens
ttggaataataattttatttttaaaaactcatggattatttttagcttcaaagagtgttcttattttgcgtaagttaaactaatgaggcagtaccagccacggagtgcaggaagggctgctttcatctttgaatagtgaaaggcagcctctttcatgcatatgtttatgggataaaattcctttttaggatttggggcagagttttttccctcttatgccccttagtttgaatggaatagtcattcattgtccttgtattttcgttgcccgggtaagtatttcactcaagagatagtttcaagaaagttggagatttcttctttcaaactagcaaagacatttttgcttttgtctcttgaaaatctccctcaaactaaaagaatgaaaatcaggaatgcagactgtatccttataaaccttggagacatctgtaaccctgacccatacaggacctaaagatagaaagcagatgaagtgatggcaaatgcatttgcagagaggagaagtgaagtcaagaataaaatgcctgcagggctcaccgggagaggaccggaagcgattgatttgctcacagaatgccaggaaggctcagaaatgagagttccccagttccccagaggcataggtgaagcagaggctttaggatgggagtaggggtgggaaagtctgcaggaggtaaaggggagccccagaaggacttgagaagggaagttccctattgcagctctggcccaaggagaagagcccatctagaatagagctgaaggaggagggctccaggaggagtgtttctgggaggagcaggaatgaaactgattagaaaagaagaaaaaaagaagaatgggccgtactgggtttgaattctttctctgtcaccaatgaactgtgagtatgaggaaattagttaatgtctttggacttttcatttccttatttattaaataaaacattatatcatatggtattttgttattctgttgggtaaaagacagtacaaaacccagcaagtctacttccagatgtctaccccaaaaaatgaaaacatgtccatacaaatacttataagcaagt

SEQ ID NO: 117158 - DNA, 1059 bp, Homo sapiens
ccaagatctcatttaacttttttgtattggggaagatatgggagaaatgaaagtctaggaactagagaggtgtgaaacagatgttcctaagaattttctagtttatcttcaggaatgaaggtaccactttgattacataatttccaaggtcctgtcatgctctgaaatagttttagttgtttcagtccccatctcttagcaaataagggaggagttggttattcactcaccagatattttgaatcataggaccattatttagttgtcctagttggggtcaggctaactggccagtgcattgaacttgaccttcaaaccacctgttgaatttggttttaaggtatagcttccctgtaactgctcactggtactttatgagatagaagatctgtgctctcaagggtgacaacctcaagaaacttacattccaagagagagaatccagaaatatggacatccttttattagagaaaatgatttctagagaacactaaatagtttttttctcctctatttttagtatgtttcctgctagaatcccattttctcctctgcttctagtatgttttcagctagtcactgggtaaatgtaaaagtaaaaattcacctgtctttgggaaggatgttttgaaaatgatttatttttctcttgagaattggctctgctgaactgtcaaattattcacctttatcatattgaataacatcatcttctgccactccttttaccccacagtctttcagtggacatttcgtgagctcatctggagggtgttgctcacttgaccatcatcttttcattaggttagctggatcagtgcgttaatttccattcataattaacacttaaagcttatgacctaagatcgttcacctgccaaaacaagcaaaaacaccaaacagcaaactctcttatcatatgctgagatgaaaaggagaatgctttttatatattcctgggctttctctctgccctaattttgcatcattgttgaaggagagatgcttcctaattgagatttcccattcctgagtggagacattattgcgaattgttac

SEQ ID NO: 117159 - DNA, 1015 bp, Homo sapiens
ggcttggctaacccagcctgaaattcttaaaagtgctcctcctgctttcagaatcaagttcaaactccttcaccaaacatattaaaggcctctttatctggttcctgtccagctttgcagcctcatttcctcctgcttttccaaaggcactcactctgtgcttttgccattctgaactgtttcttacctctaaactaaacacacaattccctataatggtccctcagtgacccacagggaaacctgatccccttccctgataccatgcacacaccataggcaaagtccttaaaacttgcaccttagaattacctgaatatgatgcctagtcctcacagttactctctggttgggaatgttgtgcaaagaccacgattgcatgagctcacttctatgagatgaaagtaacataactgttcctgttttctttccagaggataatttcctgtcagtgaaactgatactatccttttagaaattattttcagttatcttctatatcaactgtgtagcacaggtttcccttttggatgcatcaggaagcaaatcagcatatttctgtttaatacaaattgattgaagtgataaattctaactctgtgtttgaagctgcattgtaccagaacagaaaagtcccaaaagaatggtgaggtgaaaattatctgaaaaatgatatataattaaaatcatttatgaatgagtcagtgtaatctgcattctgcttgacataaagagaaaataccacattcctgggagggaggagggaggtgaacgtcaatctgtaaactccaagctggaataacagaggaagagctattggaagtgtagattccagtgctgtgaactcccagttataagatcactctgtaagcagaatctaaataagctgatttacaaaggaaaataaaaggtttcagaaaatatggggtatcttaaaaaacctctttgatagtcattttcgggctttcttccctcaaaaatgaactgatttttcaaatgactattttcttaattg

SEQ ID NO: 117160 - DNA, 1021 bp, Homo sapiens
gcgtgctccttgttgctccatttgactcatgctctctccagttatctatcatagcctggtaaaaaggcaaaagcagttgtgcatgtatgtgataaaattgctaaactgtttcttgttaactgtcaagtggcattgaaggagacagttatttacattttcagttgctttttgtgaaatacaaagatcaaagacctttactgcagtttcctcctctactcaaaccacaacttccttcctctgtgttaaaagcctctgcaacatgcattggtattctactttctcaccttcagtgacaaataataattttattgtgccaagatgaaatgtggtcacttgagggcttttctgtgggtgcctctgcatctctgaatggacacctttggaagacacttaccatactttcagcagcatttttagtttttatttgttaaaggaaaaaaagactgtagaagtgttcctgactagatttcaatccttttttggtttctggacccttttgagaatctgatgaaagcttgagggtggtgatgcttgtcacaggggcagctgccacaggggcagctgtggctcgctccagcacattctccaaaagggattccctttcaacagttgtttaaataagatggcaagaagatggctctcaagactataatgaaaagataacaatagaggaaatggcagaagagcagggtgggtagttctgcacgtgatcgaagcatcggtgttcagactatgggaggagcaggggaggcaatgtgggagcattcagagtgactccccactcacaaaagacacatcaccccagtctcaggacattctgataaccccaaagcccatctaggggctgctagggagtctgtgggcctcaggttggaaaattctgctcttgtcttattggcatttaacatgcgggctcaagaagtctggggcggaccattacctgaatttcagctctaatgcttcccaagcgtgaggctttggctagtcaagtcatttgcttctttaagccactgttttccca

SEQ ID NO: 117161 - DNA, 1041 bp, Homo sapiens
agcagctgttcacactgcttaactcactactctacctggccttgtgaggtcttttgcctttctgttaaatagaaaggtgttcttcctattttccacacagtttgctttttgtgctttctgtctggtgaatcatggatgcttttgcgatatgatatgaagagaaaaaagccagcagatgtaggctcatatcccagcattctgctgaacagatatgttaactttatggagctgggtttccacacctgtaatccgaggataatgacgcccacctcccagggttttggcgaggagtgagtggaccacagtgagagcaccatgcacactgtggacatctccaggtgcttagcagcaggatttccccagccttgtctagacatggaccatgcaagtccatgtccagacaaggtttggggaaatcctgtgctgtgcaaggcctcctttatgtgagaagtgagtctgaccatccgccgtctctgttaggccatctggaaaacgcttctgagcatattgtttatctcagtccctgagtctcctggaataattccttctcagcctgccttcctccctgcttcaccaatgactctttcctctttgaagaagaggagagagacaaagaggagtaagttgaatagaggagggggaagctataattagcgccatggtttaggcacgccattgaaagagttagcatgggcaggattcagcatacgaggagggtacagagaggactgatgggaagagaggaaggttgaacagaaagaaaatgaaattaatcttggcagccatggcattaagcactagggattagggaacgtcctgggaatgccaaagcataaaggccaaggtgttttgtagacatttccagttctgtctgaggctgtagaattagatgaaataaacaaatgaaagtatctttttatgcagacacaaatgtcatcactcttttgatgattttgttgaatgtgcttctgataaggatgtgggtagctataaaggaaatatttttcttggggtatgtgataagcagttgatgaaactagg

SEQ ID NO: 117162 - DNA, 1066 bp, Homo sapiens
gagaaccgtagtggcagagtggcgcgtaggagcttgtctactctgttcctggtaaatttcactcttggatatcagcacatcctgaccatgttgccatctagtggaactggctgaattgcctgtgggagcatcaccaccttttcccaattcaggataaactctagtgtgatatcctggcaatagggaaacgtacttctcttttgcctaggaattttaaatgaacgagagagaggaggtgagtgctctccccaaatcacattaatttaaggaatttctcatagacagtgtctggagtccatggcatgactgctgagaatgctgggtgtaaatgtccatcagcttaaggtatggagcgagcaggaagcagtgcttgggaggttctgcagtggagtgaaagcataccgcatctcgctctgggccctttatgtttcacctgggctggcttgtttttgtcatgtggttacagagtccatcccaatggcagagagagccctctgaccataagcaccacaccccacagaccccagaccaaagacattgtaaaggtctgtaatccttctgccctcccttccagccatccatggacatatctattcagcaaatacttcttgaattatgtcccaggcaccttccaggtactaaggcagtgaacaaagcagatagaaatccctgctcttggagagctgatattctaggtgtgggcaataaacatcaacaaaataaataagtaaaatatataataagtggagaaccgagtgctaagtagaaaaagatattttcaagctgaagagggaaatagggattgttgcagggggtgagggggtggaggtgggtaattgtggttgcaattgtgagtgaatcctcactgagaatgtgattgatattagactcacctgagaagtgtgaggaagccagatgtggatatcctgggggaagaactttccaaacagagggcaagcggctgcaaaggccctgaggtgagaatgggctgatgtgttccagaaacagtacagaggcttaagggagggggagagatgagtcagagaggtggtgaggggctagatgg

SEQ ID NO: 117163 - DNA, 1008 bp, Homo sapiens
gtgctgtctctgctttctcaacaccagatcattctgcaacctcttgcaatttggctgctatctctagtcatgttactaagttatctttctcaaagaatctccattggtcacccaaccatcatagccattggtcttcagccttcacttctgactggttattctctacctgggggcatttttctttcttttctccctctcttcctcttctttggctggcgttacttttttcagtctctgaagggaagctcactcctaggagacttgcttaatagaatgtttatcgcctgcatgtctttagcaaagaggtgtctggaattcccatctgggatttattagtctaaatattcaggtggtccagtgccggatgttagttcttaacttaaaggaaacaaagtttccaatccgaggatggtgagattgctgctgttctacagtgggcagccgctgctggtgtcttgcttgccctggaaatgccatcaactgaaatggaattttgttcaatccatcttattaatagttcctaaagcaattgtggtggggttgataggtggctagtaaggttgcctctgtaaagataagcacaatccattaattaagtctggagtccactggacttctaccggggatgtttgcatttgctcggcactctgtttataaggatgtcgaaggaagtgcgtccattctgtgcatgttgtaaaacagaaggtttgcagctgtcagatttatttttttcttggctccttttctgacagaacttttgtaaacttgatagttttatagattgtcgaaaattactaacctcggttctgcagatgccatgcagattttcttgtcttgttttctttctttgaagatagcagatatttatgtacatagtttcttgtaaggtactttttggggaagaggagattaagattattcttatatgctatcataattcagtattatgaaattattaaatgattattttattagttatatagtgctttgaaagtgtccagcatgcat

SEQ ID NO: 117164 - DNA, 1805 bp, Homo sapiens
ttgctcttgagctaaaacagagcattcttccccaaggtgactgcttgcttgcatttaaatacaaaagaagtttctctccaggcttcctgaggccgatggtgaatgttcaaagatcaacgaagctaacatgaatctaaaatgaattataaggctgacggagcgcttgaactattcattcagcagttgtaaaacaagtagcacattaaaggacatgtattttaacatatcttatgtggtttgtccccagttggacttgcaaaatgacatttaataaatatttcttgtaagggtactttctaaaagaagagagtgaaagtaattctgctgtaggcagattgggcctgaaatttgggttgtctggatttgcataatcatcaccttgaaaaggtgttgctttaccccaattatagatcagtggaagctctcttgtgtagcacacggccctggtgagatcccttaagatctcttgtggactatctgtggacatctgggttgcagtgaggaagggcaaggatagatggtatagggagagaggggcagaatgttgacttgggcaggacaggaaaagccacttgtgactggtgagggagcatttctttgggttcagaatcatcctcatctcagtgtatctccccataagtctgagattactgagtgcaaggtatacatatcagcagctcctgactcaggatgtgtggcagaggggaccatgaagttaactgtgactttcggaagggtgcagtctgttaccctttcggtggcgaggtcagtttccgggaggctctgcaacactgatattttccagatgtttctcctcttctcccttctctggctggctatatcttcctcccttcatcctgctctttcagtgaaattgagataacatgttagaatcttaggcaggttagaatctctcagcagtaggatgtgatttaatatctagacctcttacattaatatttataatagccttcactgcttgtgaatagcataagcactcttttctgttcaaagtcaatactgaaataaaacccaagagtatgttttataaaaatttacttttaatggtgcaatggtaataatctatgtagtccttatggttttcaaatccctttgtgcttatattaccttatttaatacagacataaatctgtgaagtaaataatactatttttatcttcattttacaaatgaggaactggaggctcagagaggttaatttgcataaggtcatacaaatgatagatggcagaactggatttaagttcagactccttaaatccatgtcttttgtacgttcttttcactaaatttgccatagtgtttctattggtttttgcctatataaaatcggaaacgaagaaaaagaaacgaactggaaaataaatttgtcaaaagagtatatttttttctcataatttccaagcggatctttcagatatgttatttgaggactttttgcctcagactggcgataaaacaagtgttctacaaaatacctccgtaagacaggcctatcagtggcagctcttgtccccgctttgcagaagggaaaaccaaggctccacagagctaaggggacttcctctcagccaatttgtaggggcctgtgggccagacccgggggcagaattgagatctgttgtgaaggctgtccggcttctttattctatcagcatttcaaatcctgaaaacctcccctttggcattttgaaggaattcatccccagtttttgctggtagccgggagggaaccgtgctctccccctgaggaaggccctttggagtaactgcagcaatgagtg

SEQ ID NO: 117165 - DNA, 1017 bp, Homo sapiens
ctgttatatttggtagtggtactagaatagtatagaacctaccagcaaaagtgtctcagagtaatattgtctgttgtttcctttctatttttttaaatggcaccatctatccctatcttgtgaactagttaaacatgttttaattgtatatcttttaaagcttcagttagccagatttttaaaaaaatgtttgatgttgttttttattccatgaatgactcaattgactacatgtaggcagctactaaacttggcagtttgttgccattagcatgcccttggacaggaagtattcagtatagatatgacaaaccagtttccaggcttaaaaataaagcggggatttctggacagaataggtctttgtcactcatttcaacatgtctgatgagtgttaaagttcaaagcctatccctttgctttctcattttttttcaggccatcactttacctgacatattctattatatagattgaaatttatttcatgatgctggtgttttgttcagtttttaaaaatgaaataagaggatatttgaatagtcatgagaatcagctagagtcagtattctctccttgttatctctttcatgtttagttccttttaagtcatctccccactgaggtaggtaatggtgaaataatgtttccctgcctgtaaagcagcttaaattaaaagtagcaagtgtgtgccaggtacactacatgacttctcttcttgaatctgtggtccacttgaaatagcatttttttccccaaaagttgcttcccatcagtcttgtagttcttaatttcatttgtcaggtagtcacttagcaacttgggaagaatcatactattttgacagatactaacaggttttttggcatcttgttgcctacagttattgctttatgacttaaaaagtaagttcatactttttttgctatctcccgaaataatataattttccctcctgtctgttaaaaaaaaaaacccacactttctcttctttctttcacttacctattctaagca

SEQ ID NO: 117166 - DNA, 1051 bp, Homo sapiens
ccaaaaacctggccgttcaggcacaaaagaagatcttgggtaaaatggtgtccaaatccatcgccaccaccttaatagacgacacaagtagtgaggtgctggatgagctctacagagtgaccagggagtacacccaaaacaagaaggaggcagagaagatcatcaagaacctcatcaagacagtcatcaagctggccattctttataggaataatcagtttaatcaagatgagctagcattgatggagaaatttaagaagaaagttcatcagcttgctatgaccgtggtcagtttccatcaggtggattatacctttgaccggaatgtgttatccaggctgttaaatgaatgcagagagatgctgcaccaaatcattcagcgccacctcactgccaagtcacatggacgggttaataatgtgtttgatcatttttcagattgtgaatttttggctgccttgtataatccttttgggaattttaaaccccacttacaaaaactatgtgatggtatcaacaaaatgttggatgaagagaacatatgagcacatgagttaagattgtgactgatcatgatttatttgaagatggagcactgctgatttatgaaggaaaaaagaagaattttctaaagattacacatatttcagaaagactttacccaattcagttgtcagacataatgatttatttgaaggcttgttttatttgaagaaaagcatattgccaaaaattctggttaaaagcttcctaacgggtaacagaccatgggagagatatgtggttgggtaatgcaaatgtagttatacaaagaaaaatacagatgtctccagacctgaggactttttaatagggcagttgttgtgttggtggcacattggatatttctaacatgtacaaagctatgtattttgatttactttcatttcttgctatgtatatgtacttttcttaaaatgccaagaactttctcttgctatcattgctccttttgaaacaattcaattttcatgtctacagctgactgttttgttaagattgagtcatcgac

SEQ ID NO: 117167 - DNA, 1074 bp, Homo sapiens
ctttaccatccctaagggggactttccttcccaggggctatctctggaagcccctcaaggataggggccgcatgctgtttctctaggtcagcaactaaacccagaaaacgtttattgagtgaatgatgaaacgacaggtgaatagatgaacgcaaggtgtcgagttaactattcttctacacaagtcctagcagctcccattgcttccagccgcagaaatggcccctggaaggcaagtcttccagcgagtggagtcactcttaactacatttcccaggattccaagggagccgcgcgctctgcgctcatcttcctaccagaaatcggcaagtcactgaccctcgtcccgcccccgccattccccgcctcctcctgtcccgcagtcggcgtccagcggctctgcttgttcgtgtgtgtgtcgttgcaggccttattcatgggctcaccgctgaggttcgacgggcgggtggtactggtcaccggcgcgggggcaggtgagcatgcgaaggttggaggccgcgccccttgctgaggcgcagctggctgctcttttcgggccggcatacgcgcgcagccgcagctgaggtcaccccgctgaggtggtggggaggggaatggttattcttgaggcaccgcatctcttgaggaggaaagagccggaaacacctggtctctcaagcaggtacagcccgcttctccccagcaccccggtgtgggcttcccaaggtcctgcctgagaggagaggccaggctgggctgctgattgcaaaactgggtgaaagttctccctgacccttatctgtgggcatcgattgttactcttcctgcaattaactctcttagatctttgcctagtcttttaaaggactgaaaagccgcgaggggcgggggctggaattcgccccctgaagcgcagagatgtcagctcctgaaaagtcattcggtcgttcagtgtttgtttccctctgtcgtaagattttaagttcgtgagaggaccttctttaaagagggcgtctgataagagcccttccccgttggagtttgtatgcttagcaagtcacaatctgttctcga

SEQ ID NO: 117168 - DNA, 1042 bp, Homo sapiens
ggattgggccgagcctatgccctggcttttgcagaaagaggagcgttagttgttggtaagttggtgtgtttttctttttaatctgtagctgataactgaaatacaatctttacaagctatctttgtctttctatcaaataatttgtcaaggttgaattttattattaatttttacttttgccagaaggtttttaccccgactaaggctgtctgtctaaattacttttaaaagggaaccagtttcacagaattcccagcttaacagaattgataacgaagggctagggggtaggcatgctggcttgtggctataactccagtgactcaggaggctgaggtgggaggatcgcttgagaccaggagttcgagcctgcagagaactatgattataccactgcactccaatctgggtgatggcgcaaaaaaaaccctgtttctcacagaaaagggtggggacaagcatttattgtataaaaggaaattcttgacttcagtaaattgtaggctgtaattttttgagacaggaggtttgtctactggtgcgagatcaaaagagagcccctgtaagtgtattgataaaagtaagaaataactgaattttgagaactggaagtttggagtcaaggaatctaaagtatgggtttcttgactctttcatcaaaacttttcagctggaagtgttttaaaaaaatttaattgagggggcagttacatgagtttttgtttgtggaggggtcagatggaagatactgtattgaagaatcctaaaggtgggaggttttagtaatctgcatggtttggactgatctaatgtgcttgacagttggtgtggacacagaaacgaatttgtccacaactgagcctttctggggaataactaaatgggtgctaagtgcagggggatatgtaggacccagtacttattagcatatttcctgggataaaactgtgggcccacaatgatcttctaatttcagctttctgacatcttaacgaggcaatacagagagacgaattttcatcagtttgttcagggagacac

SEQ ID NO: 117169 - DNA, 1050 bp, Homo sapiens
tcgtaagaagctaatgacagtacacatagttgcttttgataggtgcagtagtaccaaaacagagttagagttgcaatgttatcaaattatggaaaagatgatattgagagattgattttctttttaggattattatgacttcatcagcttcaggaatatatggcaactttggccaggccaattatagtgctgcaaagttgggtcttctgggccttgcaaattctcttgcaattgaaggcaggaaaagcaacattcattgtaacaccattgctcctaatgcgggatcacggatgactcagacagttatgcctgaaggtaagtaagcaagcttatatttttcagtgctgttacttacaaacctatgtggaatgagctttacaaaagtatttaattttctgaatacttaaaaattattatttttttcaatttcgaaagcattatctgtaaattgtgttcattgtggaaaatttagaaaagcacaaaggaaaaaataaaaaatgacccataattctaccacatcgataaaaactttcattctttttctctgcatattcataattttttttttgttttacacaatggggtaatattcttcctgtttcataataattattgtaaaaatacattattttttagagcagttctagatttacagaaaaattgtacagagaattcttctatactttacctcccacagtttcccctgttattaacatctttggtcagagtggtatatttattacaattgatgaaccagtatggagccgttatgataagctaaagttcgtcgtttacactgggattcaccctttgtgttgtacaaatgtatgggttttcacaaatgcataaagttatgtatccactgttataatgtcatgcagaatggttttactgccctaaaaatcccctgtgcttcacctgtttgtctctccccttttcttcctgaattctcagggattgaagctcatttctttttatttttcagtaatattccgtggtatgaatgtactacaatttgtttattcatacacctattgggggagatcttgg

SEQ ID NO: 117170 - DNA, 1052 bp, Homo sapiens
ccctttcaagaccctatctattcttcctgtaggtagtccttattcaggacttgtcctgttttattcagaactggctattccttcagacagcatatattgataatcatcctcccatgtctttgacttcccacatgctcgttcttgctgtttcagcagagaagtgagtgggagggagagctgttttggaaaaagatgggttgagcctattctagagcagcaggcaagttctccaattttcccatgtaattattttcttccatgaagcaggagacgtcaaggggagtgaggaatcacattggacaacttactgggacagaaattgcagctgatctatgggaattattccgctttagcccaatagttattttagatagtaaaattattttaaatagttattttaaataactatttaaattaaatattttaaatagttaaatagtaaatttacttggcttcaaccctctcctaccccatctctcaaaccttgtgaactccaaatttgagaattgctttatggcattaaaaaaattgtgaaaatttctgtgtctcagcttatatttagttggctatgggtatcaaaattaatccaattaactgaatcagttaaaaggttgctatctctggagggcattgctgtagtagtataatatttttagaattaatggtcattttctctaattgttaaagtggcttatattcttgaagcatttttgagtgtcttattgcattcatttaaaaaaggaacataaggttttgcagtaaaagctatatctggcactttatcaataggaaagctctagacacaggcatttctgtcattcccaaagacaaatcttcagtttaacaatcatcagtgtctgactattatgtttaaataaggttattagtagttgtttatacctctggtttttaaaaagaaaacaatgttaaaaattctccttatgcagcagtaatggtttttatgaatctgtgcattctaactgacttcttgtggaaatagaggtagagcaaagagaaggtaagggagaattatttggggccacctgttacac

SEQ ID NO: 117171 - DNA, 1109 bp, Homo sapiens
atcacatgattaagaagaagccaaacagagatagataacttggagagaaatgtgagcctgtggatggtaaaatgtcacttgcgagtaacagtatccataggcagaacctgtggagcaagaaagtttgctaataaaattttgtttaccctaacataggttcttcatggagagcagtacttagagttatataaaccacttcccagagcaggtgagttattgatatactaattccataataccatacttttatttccagattaaccttttaaacaacatcagtgtgttaaactggtatagagtgacctaatgaaacatatcacaaattgttatgcacatgtgagccattagagtagactgatgttaactagtatctgttttggtcaccttaagctttgtcctttaatagtcttaaaaatttatttcataatttatctctgttgatgtatgtgttattaacaactgaaaggaacgttcgtgtatgtgctctagacttagtgattgcatataatctgttatggttcttatgattattgttcttttctcaggtatttatctttatactgattttcataaagcaaacaatgttaaaagatacagaatttcttgtaattcatttttttctttttttttggagaaaataaaaacaagtctttaataatcatttttacttttctcaaaaatatcttacttgtttagtaaatctcttttaatttttttcactataattggatatatttatttctctactttgatgtttgaatgttgtctaattatatactggtcatataaggtggtagaatacaaaaaggaatgttttgttaatatttgtcatttcatgttatacaatgtagaggtcggcaagtagctagaatcctacttgaatatttttcttaaacctttttatttttctaaaaaatgtatgagatttttattgcttgaagctgaatagctttatttcagtgtaagtattatagcataaggtttcaaaacagctctttttatgtgaaacagtacactttgtggtgattgtgcattgatcaaatatctgctggatacccagtatttgcaaggcacagtattaggtagtaggtaattttctaacctgtctg

SEQ ID NO: 117172 - DNA, 1152 bp, Homo sapiens
tttcttcaaaatacgtagaagataagctttggcagtggtcattattaattgaacaatgcttattttgtgttatgattgaatgggtcaaacatctagtcagttggcttttgtcatttctcataatgaaccttttttgtcttcgtttaactctgttatctatagaaagcaatgctatcattgaaataatgtgagatatttcatattaatacgatttcttcagaacactgtattcatttataggaatgatatatgtgggataagaatactagtactaatcttagaaacttggttgtttgtattgttgctataatctttaaaaaataactaacatttattgaggtattatttatcaaagataataccttgtaagctttatcccacctttttccaactactctgtgagagtaagttctgttagcctctaaatgtttctaaatgagcaattgaggcttcgaatggtgaagaaacttgcccattaatggtagagctggctttgaatctagatctgactagtaccaaatcccatgatctagcatgtgtttgataatttcctgtcacaatttcaggccctgaaatgtgtttttctttcatttgtatacatcatgatatatatttgctaacattttattatataaagtgcttttaaaaaattatcatttacttctcttagcatctcatatgggaccttgcaagtcaccagtattcaataattgtttatttgatttcattatattaagaagacatgtaaaggaaagaatattgagtcattgggaaagtaaataatctatagaaccattatatggagtcatggggaaggaaaagagcttattggaattatacaaagcatattaaaaagaatgatgctttcttatgaattatagaatattttctataaataaaacttgttaaaaataatcagtagtttaaaagtaataaaagatcagtaattttaaaaagatatggctagtctttacacagcatttcagtagtctttggaaaacagcacagcaattaatgagaaagggaagaagtcttgaggctgacctaaaagggtcggtcaagtttacagatacattaaatacacttactattagctgtttggtgaatttcttcctttcagtgctggtaagtgctttctaacttggaagaatg

SEQ ID NO: 117173 - DNA, 1181 bp, Homo sapiens
gtctgtctcaaaaaaaaaaaaaaaaaacaaaaaacaaaaaaaacccaaaacttaagttttagagctgtaaagaaattcagacttcatgtaatttagtattattttataaataaaaaaaatgagaccatagaagttgattaatttgatcaggatctttctaaagttagctaaaacataggttgtccagttcctatttttcttttaaaatattatttctgaattctaataaaagtaaaatcctgttattaagaggactgaggttctgagtgatgtatacaaataagaaagtatgaaagacacattgtatgaagaaaactgacttatgtacagagttttaaaaaatcttttttttgcacatgttttataatcacttttctccatgagttatttttacagaacttttaaagtttattttgttgtcgttgttagggcgggaagcttcagagtacctttgtatttgaggaaataggacgccgcctaaaggatattgggcctgaggtggtgaagaaagtaaatgctgtatttgagtggcatataaccaaaggcggaaatattggggctaagtggagtaagttatagccctgattttataatattctaaggtaattcttagtaaataaagtatctttttaacaattaaagacctttgaaggtaggtaaatcttacctttttaggtaagttttttttcttttcccgtgggaatgaataggtttgggaatgtccaaaggggggtgtgtgtgtgtgtgtgtgtgtgtgtgtttgtgtgtgtgtgtaagagatgtagggaatcaattgaaatgaaaataacctgttttaagatttcattgtaatccttgaaagtagtttaaacagtcatcttggctatatgcatctttatctaatcttcagcttcttaaacataaggcaaattcatcaagtcaaaatgaagtatttttaagtcatgatatttgacagttacaaaattattttattcataccaaaacaataatttggattatcttaattatcaatataaaatcactattttctagatatatacagattatggtcaaaggtgtttgtttatctaatctagggaaattatctattagagtgccatgcacccaatataaaacatcttgccgcagaaagaaagcagtcatatttcttttcactgatgtggaggtccaaagagaccctg

SEQ ID NO: 117174 - DNA, 1054 bp, Homo sapiens
gttgttgcattgcagagtgaaaggaagacctcaattaaggaaatagtaataatggagaggagagggcctatgtggaactattgctaagattgaattggctaacttagctactgattatgtctaaaaatcaagaggaatgagaaagagtcaaaactaatactgtggttttgagcttgtgtgcttgaggatgttgactgcattactagaagtatgaaacaggtagaggagggaggtttgggagagaagaaggtaagttgtggtaccaacactgtagccaaccaagatctggactagattgtggggactgtgggcctggaatttaagagtaacttcatagctagaggcagagagttggaaagcatatttgaggaattagtagttggaaccaagaacgttggcttcattcaccaccttgcttcatgacatgcaggaagaaaatggaaggaaaatctttgttggtcctgctgttcctgttcactttatggaataatggttctaaaatttccatttgtctgtaaacaaaatgaatatcatagaatttggcccacaggttttaaatatgcaatttgtcagtattttaggcaaagacaatcctatactttcaaatagaaatatattgtttgtatgtatccaatacctgtaaaataatattactgaaactttttataaagatttatttccatgtgttgaatacaatgttgctgagcaaaatctgttttgttttctttaggatgataggtttaagctggttagcattgagcagtttggttgttttcctcctgaatttaaatttggtttcctttcacatgtttgtaatcatttccattataggaacataagtggaatttacatttagttggcaagatactatggatttttgtttgaatattgtttttgtttgaataaataataaaatgagccgagttttaaaaggcacgtactataattagttgtgtagagttaagtctgcatatctggactaaatccaagcctccattatgtactatatatgtactgtatgatgatgtgactggatgaggatgttctttgactg

SEQ ID NO: 117175 - DNA, 1062 bp, Homo sapiens
aacacaccagcttttgcttggtaatgatgaattaatactctcttatcacatgtcaaactactaagctaagcactctacacattactttatttaacacgcacaacagagttgtgttatttagggactgttgttatgccttttatagatgaggagattgaaactcacagaggccacgtatctaagcattttctcaagctcaccttgctattaaggggcacagcctggattttaactcaggcattctgatgctacagctgtgatctattcaacattgtgttatattctctaatttgtcatttcgtggctttctagttcatgaaactgtagtaaatattttaaatctgcttttagaagttctgaattgaatatttttattaggaatacagtgtagccttttattaatatggtctcaaattgtaagaacataaagtaaagccagaaacgtaggttgaaacagaactcccagatccatgagttcagataaattattgtatagttttctaaaatacacaggaatgatttttcttttttttagatgtctaaaaaaatgtgctatctgtagttattaaattgtcattgctaaataaaggttgcctttgttgtccagaattattagctcaattgtattcagtctgaataatcttaaaaaaaaaaaaaagaaataaactataacatggtaacagttggcactctttttccctcctctccttgcaggcattctttagtggcaggctgaaggccagagggaacatcatgctgagccagaaacttcagatgattcttaaagactacgccaagctctgaagggcacactacactattaataaaaatggaatcattaaatactctcttcacccaaatatgcttgattattctgcaaaagtgattagaactaagatgcaggggaaattgcttaacattttcagatatcagataactgcagattttcattttctactaatttttcatgtatcattatttttacaaggaactatatataagctagcacataattatccttctgttcttagatctgtatcttcataataaaaaattttgccc

SEQ ID NO: 117176 - DNA, 1088 bp, Homo sapiens
ttgaatgagactgtatgctcagtacttcgtttcctcttccagttagtgtcctatttctttgcttccgtttacagcagaacttcaataaagagctgtttatacttgctatcctcaattcttttttctgctttttcagtccattctcatcagacatttgttctcaccaccgtcacttccatagtgtgcggtgtcgacaaaataccatttctaccacttatccccctctggtttctgcttctattcaacaaaataatgtcatccaaagtcttaaagtaagctggaaacataaggatcgagtaaggacctcacagttagatacagaaaggaaattctttatcccgtttatgagcaagtcactgtttagattacacacagtagtgtaagggatatttcatattttctagtaacctatactcaagtaagagagctaagcaacactcacctgtgttacagaacaatgtgtgaagaatgcctccaaaacctagtaatgcagaaaagtttccaaaggcggcaaaatgaaatgggtgatacttgtccttggtctttagggatcttgcacaggaattgcagtcagtgattcaggaaaggggaagaagtcattccaggcagagggactggtataagcaggaaagggctagtagcagaagaacccgtgggtaatacagggataagtaactcttcactgatgggaacttgtgagatgaagaaggaaataaaactgaaatatattctctgctgccagattaacgagtcaggatttcagttgacagtggagtacaggatatgctgaagagggaagctgaaagtagttactatttactcataaacatacattaagcttgtgctttgtgccagaaagcgtttggtgggctattttgcattaggttacctgtgatgtatgaaagatcagagtaatgtccctgggatttcaaccccagggagcttcatatcaaattttgtaatgactttgatgatggaaatgacaggggatgagtcattaaagactcttttcacacttagctaacttttgttcttcttcaaaacagttaaaatttgacctttaggaaaccttcattaactcctctcgg

SEQ ID NO: 117177 - DNA, 1002 bp, Homo sapiens
gcctgggcgacatggtgaaaccccgtctctacaaaaaatacagaaaaattagccaaacatggtagtacgtacctgtagtcccagctacttgggaggctaaggtgggaagatggcttgagcccgggagggggacggaggttgtgatgagtcgagatcacacaactactctcctgcctgggcaatagagccagaccttgtttcgaacaaagacaagaaacccaataattttgttaactatgaattacttcaaacgtatggaaaataatgtaacagatcttcttataatctacttcctatgtttaggaaatgtcagtgttttgctatatcttaatatttaattccacccatcttcttttctacctcagaggtaattattcctcttggtgtgtgtttttctcttatatatttttcacaattttagtaacatacgtatctatacccagtgtatagtattgtgttgtatacttttaaactgcatattgttttacaaattataaattgtagtagtctccctttatccatgggggttatgttccaagacccccagtgtatgcttaaaacctcagatagtaccaaactctgtcattattattattattattattattattattattattttctgtacagtaatgggcaggtaacggatacagcagaaatacactggatgtatgatttacatcccatgtgggatggagtagtacagtgagagatttcattatgctactcagagtggtgcacaatttaaaatttatgagttatttatatttggaattttggctaaccgcaggtaactgaaactgctgacaacaaaattgttggtgggggggactactgtattttattcaccaaatgttacttttcaggttttatccatgtaatacctacagatcttttgcattgatttaaaatactacattgctatatgctttatttatatacgttattttctctctcatgctacattttgttaaaatgatgcaatgaataatcttgtgtgta

SEQ ID NO: 117178 - DNA, 1037 bp, Homo sapiens
gtatattatcatctcatgcacctgcaaagttcagcaattagaaacatttgttaatatattttaatgtgcagttcatcgcttgctattagtttattttatgaataacttaactttaaaaaatgtatcatgacactgtataattctgtttatgcaacgtggccgttctttttttttttccttaagccttgtctgtgtgccttttcatttatgcaaagtatgatttttttttctaaatgggtctttgaaacaaattcctaagaggttaacttatctagcaggaaagaaacctgattactgtgcatttttaaaatatattatgcatttgaaacagtgaatagacagtgtgtattgctacatttctggtcatttatttaaccaatatttattggacacatactgtgtgccatgcactatgttaggtgttaagatgcagtgttgaataaaaccagatacttgatcaacttcacagaatttataacctactggggaaagacacattaaaaataatcagattaaaagtaaagtattaagttaccaattaaaggtacttgtgaccctctcagggaagccagaaaagacttcacagaaatgacaattggtccaaaatcaggatgaatagatgttaacaagttgacatgggaaaaaagaacattctgaccagtggaaatggtaggtgtaaaggctttgtagtagacgtgagcatggtgaggacaggggactgaaaggccaatgtgattcttctgagagcaattggacaccgttaaagagagttacttaaaggtacgacattggatatatactttaaaaaattttattgcgatggcattgtggataactgattggagagaggcaagaagaacaggtgtggagaaaccggttaacagtaactcagccaagattgcaaaaaggtcaagatagggaaaaaagtggtacaatttgaaagataattaggatttaagattaataggacttggagattcattgtgaaggattaagagagctacctctaaagacctttaggtgtataactaaaagga

SEQ ID NO: 117179 - DNA, 1391 bp, Homo sapiens
gcctatagctctgctttttgttcttagagttaaacattgttctccagtagggtgatttaaattatgtatttgtatgtgtgtgcatgtgtgtgtggggggggggcatgtatgtttacatgcacatatgcttgcacacaatgcccttgtgtttgtggatcttcttttaaaattatacttgaaataatttgttactaaaaataatgaaagatttgttttataaatatgtaaaataaattgctaattaaaagctaatttgctaattaaaatagtcattcaacaaattaaattcctaccattatgagtgaggctttgttttaacggtgggaatacaaagatgaatatgacaggctgtgatttcagggaactcactgtttattatattccaagcccagcaagatataagtgtaacattaaaatacttatctcgggtaatactgtgactttttaaaaaattataacttgtttttcttaagctctcagacacatttttagactgttgatttattccttcactatttatggaagaggtttgatttcatcaagctacgaatatagttagacaataaaagtagttaaagtggtagactaagtctcaaatattaagactcaaaataaagtgtgtttgttcctgaagtaagtgcctttcttctaattattgctttattcttcaaaggttgtgaagatgagaaaagaagtgaagagaattcgagttttagttatccgaaaacttgtcaggagtgttggccgactgaagtcaaaaaagttagtcatttaaagtaatgatcttgtgactaataaaatgtcaaaagttgtttttatttgatactttaaaatgtttagggtgggatatagagaagtaattaaatgtcttatacaccatttttgttttgtatgcggagatgatgtgagtgagatagaatgtgctgtgtcagcatgcccttctatggtttggaccatcattgctcaagatacaggatgaatttttttgctgcttttgcaaaactctcttttggtctttttagaatgaaattcccttgggcttgtgtgttttgtgttatcagaagttattttaagatactgatacagcttaacaaatctagtaataccttaagaatcagttttgaagattttatatcacattttttcttgaattgctaagtaatttgaaatcttcagtaccttatgaaagtgtttattagaacattgtgttccatgtaattttttggaaaaatacaatattttgtattttcagtatcactagtgttagtgaaaaagtattttatttatagttctttttatgatgtaagcatgaatacttagtcttcaagtatgttttgttcctgattaatttcctattctttcataaatatgtcagaatatagcccttcttt

SEQ ID NO: 117180 - DNA, 1330 bp, Homo sapiens
gtcattaatacaatggcaagacagtacttatttttgccattttccaacatatgggtttggttagtaaattgaggtgtgttttgggagtgggggaaatggacagtgtaggatagtggcgtgtttgttatttagagatttattacgcttttctaaaaagaaatgaagtgattatccattacactataagtctaaaattaatgctttgcctggctacatatcgtaatgtattttttgcaggggtactgaagatgcactgttaaaaaaccaaagacgggcgcaaagattgcttgaagaaatccatgccatgaaggtaaggacttgtgtgggtgtgtatgtgtgtatgtttctgagtatcctgttatcctgcattttgtttgtgtgtggtattgcttatttgaatattcccgagagttgcgtaagacatcttgtatcagtctgtttggtgaagaatgtagcacatttagaaaattgtaacatttaagcttgcatttttctgtttttgactgaatttgttaaagtgctaggctaatttgagtcaaaattgtgccaaactaaattcatctatgtttaataatgcctcctgcctcaggtttttatttttactgtaactttagcacgaagtcagttcaagaattaaagtcttcatgctatttgggaatgtggatggtgatattggtggctgacatcatgctttccttgttgccagctcaataaatttttatgtattggtatcggcattttattcagttctgtagtaacttcaaataaaattagtgttagaccaatgtgatcccatatttttgttttttttttcagtcagactcttcactagcataatttttaggtcttcttgctgctcttactttgaggaaactttcatttaccaaatgacatgacattaaatgtctgggagactgttttactgtagaacttaaaaacaacatttggtcccagcaattttcttaattgcagggtcattttgcatgcatgtttgcctattatattttggtataactttcaagttttgaattaagtaaaagagaaataaaactctctaactattttaattgagttaagttatcaaagattctcagcctttcttccttttaaacggatagtaaagtgtttaataggacaaagttatcccagttaatctgaataaaaacatctaggaaacgactctttgatatgaagtatatttgtttcttgtgttcttccttccctctgctgcacactattataaaattcatggaatccatctgatataacttttatttctcaaggttataattccctttttattcagtccttcaggaaaaaaaagtcttct

SEQ ID NO: 117181 - DNA, 1050 bp, Homo sapiens
ttactcaattaattgttcctaacacctagtaatgtgtctgatacatagtgaacgctgcttggctagctgactgagtgacttctactgcaattttttttttttacatgttggcacgtttacagtgttgaggttgttctgagtctctaaagataaatggaatactatggaactgttactaagaagaatctgtaatcagaagcttttctttttgcttattaagtatcagaaacaggaggaaaaaggttcttcattttatacagtcaccttagccaatgccctgagaccatataacttcaaatttaatgttttaaaaggtagaacttttgtttctaaaagagcaaacaagatgccctggtttgttagccttctgtacttaactgtgacctttaaaattataaacaggaaatcatagcgctattttaaaagatcagtatataatgctctcctcacactcatgaaacagcatttagtaacagatcatcatactgaaatcccagtttgctttctggcatgtagtttctacagctttaagttactattttgtataggtcatattcctgaaattcttaacacttttgcatttttaatatataggagtcatgattttcattggaggccatatttatataaagtctatgattgccttaaaatatttttgtcttctaaataagaacatatgtgaaaaataacgatagtatgtattgtctgtttttgaaccgcttgcttctgtttgaaaacaaagagcaagttgcaggcctttgttggcaaaagagatgaaaatgctattactatttactgagtcatagtatacacctaagttttaaataaggaactgattctaaggagctgattctggaattcttcacctagataagcctacttcagaggctactgagtgtataaacaagattcagcagtatgaagggagaaagcagtataacatggctttttttttaatgtttcccatttatttttgttttgttttgattagatttttttgttttgtaattctggaaatttgaacctaaaccttagccaaacatttcctaa

SEQ ID NO: 117182 - DNA, 1088 bp, Homo sapiens
ccaaatgcttttctgtttacaataaatacccatatacccaaataaaaattttccattaaaaggtaaggtgttttcccttttttatttaatttatttgaaatggaagaaactggaggtacatgaaaaccacagtttccagagaattttccatggcaaacattatgtcaactttaaataaggaaagctgtggtttccttcatacctcccgatattgggaagactttttcatgcaggtgtaaaaactatttgttcattgagattacttagtagccttttaagcttcaaaataaatttatttaagatgcatcagtgtatttttattccctctataaatctccattttctatctcacctatgaagcctatcacattctgccttgtattagttatttgtgcatttgtcttagccttttaaattagagcaacattgtgagcttcaaaagttgatctgtgtgtcctcatgtgtaagacagtgtcttcacataataataagagttcagtaaatataaagagggaagaagttaagtgaggaaggaagatgggcaagagagaaatgaggagggaaagagtctgttctactcattcttgtgagtttctgcagtaacccagtgcagtaagcaaggtgcaaatattatctcagtgcaacagagacccaaaacactgccaagggaataaacctgagcccatctgcttcaccagctttcttttttaatgcttatatttcatttattttcaaaaacacatgaagggagctttacgcaatttatagtgtaaaaaacatctggagttgggtcatgaaatgtgaaagttatctcagagttgaaaacttgttgagaatactagaccgaattcagaaaacagattttgagttctagcttgttcctaattggctaggtaatcttgaaatcaagcctagaaggttagtctaattgattgataaaatctttggtccatttcccctttagatcttgttgaaatttgaattttaaaagttaaatgtaggattttctaagaataaaattcttaagaataaaattaaagatttaaaatgaaaattaggaataaaattagaagctaaaaatattaaat

SEQ ID NO: 117183 - DNA, 1050 bp, Homo sapiens
ggagttatgaagaacagtaaaaacatcacagaatacaaataaaagggaatggcaactttaatttatataataataatgcattattataaactgtgctttcagacataaaattcagtatcatgtgacaaaaaaatttcattttatagatatattttataataaacatatataaaattatgttcctaagtggcgaaaccaaaactaatgagttatgtcaatattttaaaaaaactattcaactttatcttgtatatattatatataaaaagatatatattacgtattatacgttcacatattagaatttactaaacaatacagatttggtttttcttcagagatcacactttctgtattttcagacaccttccacactggtaaatatttgaaagaaacttatatttataatagaacctcaagagttaaaataagtgaatagccattatccaaagtctacaaatacattaagtacatggcttaaaagtcatttaattcataccttttagcacatctatctttttcttcagaagaggatgtactgctagtctggcaattgctctttcagttgcagtagaatctggctgcaaatttaaaaatataataaacgtatgggaatgaaataaaaatgacactattgaaagtgaataaaataaaatctatcatagtctttaaaattagagttggagaatagaactagttaatattctccttagataagatatctgtataatcaatccatgctaaagacaaagatcatcctgacaaaaatattactgcctttgaacaactaaaattatcacttaatcattaataaatattctttggatacgatacttaatattctcagaattgtgataagcaccatgtgtaacatcaaaaaaagaacatagtttttactatcaaagagcttgaacaatctaattaagaagactaaattaatatcaaagaatcaaataacatattagtgctaaactgggtgagactactgtaatacttgaagttccatttaacagagacctagaaattatctaacgctctatatttctattt

SEQ ID NO: 117184 - DNA, 1714 bp, Homo sapiens
cgccacttaggaacataattttatatatgtttattataaaatatatctataaaatgaaatttttttgtcacatgatactgaattttatgtctgaaagcacagtttataataatgcattattattatataaattaaagttgccattcccttttatttgtattctgtgatgtttttactgttcttcataactccaagacatgaagaaaacattttcttttcattttcacaatttaaaatgaatacgtctgagcatatcttatgtttggtttttaagaagtcgaaagatttctttgtgaattcagaccgagtatatgtatttaatatcaattccaactgccctcttaaatcttttcaaataattttttaaaatactgtcctaaaacagtcatgttttatatgtttcagtgctaaaatgagtgatgcactgtttctcttgcagctgctgtacaagcctttaaagaagcaagacaaaatgttgctgaagttgagtcatcaaagaatgcttcagaggacaatcattctgagaatactttgtattcaaatgataatggaagtaatttacagcgtgaagcaactgtcatcagtgagcaaaaagtcaaagaaaccaaaatattggcgaagaaaccaatacataattcaaaggaaaaaatagcaaagatggaacatggacctaaagcagtgactattgcaaattctccatcaaagccttcagaaaaggattctgtagtttcccttgagtcccagaagacacctgctgacccaaaactgaaaactctaagtcaaaccaaaaaaaacaaaggatctgatagctcactctctggtaacagtgatggcggagaagaattttgtgaagaggagaaggaatattttgatgatagcacagaagaaaggttttacaagcagtcttccatgtctgaagatagtgatagcggtgacgacttcttcattgggaaagtcagacggacacgaaagaaggaaagtagttgtcattcttcagttaaggaacaaaaaccactagaaaaagtgtttcttaaagaagatacaggtgaaactcatggggatacaagaaatgacaaaatcaagccaagtacagaaaccagaaagttagaatcagtgtttttccactctttatctggatctaaaagctctagaaggtaagattctttttctattctgaaataatcattagttcttttttaaaaagctataaatgtctacttgtccatacatgaagagactataattctagtttgtacaacccatcctgtttttagacatggccctctccaaggttgtagtggggtattaggtacagatacacatatggcaatgccacatttgcctagtttcatcagaaaatgagatgttatagccaaataatatgccagctaatttaaattttattccttcacttatcaaagttttgaaactttgaaatcttttttgatgaaaaacttttgaaaatgtttcatgtatctttctaaacagaactttctgaaaagaatatggtgttttttcttgatgatccaggaccattattgtaaacatcagtcattttactgtctagtaccatttcagtatataaggctgcttgcccttaaactgagtttctccatactgctttttatttgatgatgttgctgtctccatctctgttgctcaccacttttcatagctgttctgttataaaacagtaagtttaactttatttgta

SEQ ID NO: 117185 - DNA, 1032 bp, Homo sapiens
ttctgttgcccagactagagtacaatattgcaatcacagctcactgcagcctcaaactcctgggctcaagtgatcctcccacctctgcctcccaaagggctgggactgcaggtgcatgcactaccatgcccagctttctcaccccaggctctgcagctattacttaaactcgtatttgaataagtctcttggggagaattatagaatgtttgtttttgtatttttttttaaagtaaattcaacttacgcttatataagcctttcacaaatccaatatgtacttaaattgatttttaataatatccctcagactgtttcccttatgaagtaatttggggattttagtgatctcatattttctctttagtgcttatcatgaaatgtgcttcactggttcagctctgttgtttccttaaacataaatgtcaatatatatttaaaataataatggaaacataggaaatcagctatttaaaccagatcacccttgttaaaaatcattcttgttagcaaactaaaatagtaacttttattatggatgtacagataaatattaattttattatagttttaagtacttgtgatcatgtactttttgattctaaaatagttgtctaggacaattttgggattcttaattatattttagttaagaaaattgtttaaatatagcaatacaaccaataatttgttttatgtttcactgcatataaatatttccattaaatcaagaatgtatattatctagtttttactatacttattttaaaatttttgaggaatcatagattctaatttttaagaacaaattctgaaggtggtaggattaaaagaatatttccactgatggctaagcaaagaagttgtaagatgactcactgaggaagggactgctttatacatcacagtactgctatttaaaaggaaaacagaaatttttaaatcccttcaaatgtttcacttttgctatgctgggaaaaattttgaagttcttggtaaactgaataatgctaatccatgtttcctgcacat

SEQ ID NO: 117186 - DNA, 1381 bp, Homo sapiens
ggtgcttgtacttccctagatctctggctgcttggttttccgactaccacatctctttgttggattcaagaaaatttatgattttgtaattttttctattagaatttttagagtggaaataatgatcattccagcttactatattctatgccccagtttcatttttatggtgtcttttgtgctgtataagtgtttttatgtaaccaaatttatcaatcacttcaatttgccatctgtgttttatcttatgtaagagagcctacccttgttggacaatgcaatctaccataagccttgagcttccacaggttctcgctaagtataccaagacctcaaagccctgttcaccttttacctgggtcatttttcaggattttatttgcactgagcaagcttgaggaatgagtaacatctcctccaggacaaaaatcagtcaagttcaatactcctctcctacagtgaatctacaggtatcaaacaaacgatggtcctttgtgttttccccataggacttgggagaatacaagtatacaggaaggggttaactcagctggccagggttgctcaaactctgcacgttcccaagatatgcttgtcttgcagactggttcttggtcagctcctgggagatgagctctgaactaacaattctttctgataagagcatttttgtatgcataaggccttggaccttctgataccactttgatcagctagttttatctaagtgatttatggtgagtactcatctgtgctctgggagactggagtctgaatagctgaggtcaatcatacaggtgatttatatctatgtgactgacccccccattaaaaaccatagaccccaaggatcaggtgagcatcctagttggcaacattttgcacaagttgtcacacattgtgctgggagaaataagtacatcctgagaaaggcctgtctttgggactggctcttggacagctcctggaagatgacctctgagccttttgcgaacgtagtaccgatttgatcagacagtttatgttaacaatgtgatttatggtgaacatttctttctctgggaggctagagatggagtagctgagttcagtcctgtaagtgatttacgcctatgtgattgaccctgtgtaaaaaccttgagcaccaaggctcaatgtgagcttccctggttgacaacattagtacatgttttcacacatcatttttggagtgtgtccatatgacccaactgggagaggacacctggaagcttgcccctgcccctgttttgtcctaggttttgccccatgtaccttttccctttgctgattgtaatctatatcctttaatctgtgataaacgatgagtatgaatatagcagcattttctgactcctgtgag

SEQ ID NO: 117187 - DNA, 1386 bp, Homo sapiens
gcactcactgggtgcatagcatggttagaggggctagagatggacagtcatcaactggcggatatagcggtacatatgatccttagccaccagggcacaagcttaccagtagacaatacagacagagcttttgttgagctgtaactgagctatggaatagcttctttgatgtacctctttgccttaaattgctttttagttctaagattgtagaatgatcctttcaaattgtaatcttttctaacagagatattttaatatacttgctttcttaaaaaacaaaaaaactactgtcagtattaatactgagccagactggcatctacagatttcagatctatcattttattgattcttaagcttgtattaaaaactaggcaatatcatcatggatacataggagaagacacatttacaatcattcattgggccttttatctgtctatccatccatcatcatttgaaggcctaatatatgccaagtactcacatggtatgcattgagacataaaaaagactgtctataacctcaataagtattaaaaatcccattattacccataaggttcatcttatttcatttttagggaataaaattacatgtctatgaaatttcaattttaagcactattgtttttcatgaccataatttatttttaaaaataaattaaaggttaattatatgcatgtatgtatttctaataattaaaaatgtgttcaatccctgaaatgtctgccttttaaatataacacctactatttggttaattttgacgatttttttttttcaattaggaagctaaaaatactactttattccttatatgaacattcatccccctcctggcacctctaaacacacccaaataactcacaagtactgatttaacactctgtattactgaacttctttgaactattttgaactttgaatctcttctctgaataactgccgaaactcaaagataataattagttgatgaaggttatcaattaataaaataacacagaccagtcttaccaaactctaaatacattttaaaaaataggaactggcaatgataaaaagaatgttgagtactgacaggagattggcttttacactaaaaaagacagaaaatggactaaataggaacataatttcagagtttatgagtcagtttacaatatgccatattagcgatctcatgatgattcagaccacagtctgggttaaagatgtcttgacctctgaggctagcataacatatatgagaatacaacttgcctatttccagaaaatctgtatatttttatagaataactttatttacaatttctatcatccaattactcactaggcattatttgtagtactttttttctctttgaaatctcataggatag

SEQ ID NO: 117188 - DNA, 1417 bp, Homo sapiens
tgcctctaaatgtgaagagtgtaggcatcaggcatctctgctgttgacatagtcactttcttcaaaccattattaaaatgatgtactactgcataatttcacaacatgattgctgcttaggtggagggaaactgttgcataaagtttttaaaaggttgactttaaatttgtctgttgtactcattcattatattatcaggttaataatttgtcttattttgtcttcttaatctaggtattagaaggcaaagcaaaactcccaatggataaatcagtgcctggtgttctgaagtgggaaaaaatagactaacttcagtaggatttatgtattttgaaaaagagaacagaaaacaacaaaagaatttttgtttggactgttttcaataacaaagcacataactggattttgaacgcttaagtcatcattacttgggaaatttttaatgtttattatttacatcactttgtgaattaacacagtgtttcaattctgtaattacatatttgactctttcaaagaaatccaaatttctcatgttccttttgaaattgtagtgcaaaatggtcagtattatctaaatgaatgagccaaaatgactttgaactgaaacttttctaaagtgctggaactttagtgaaacataataataatgggtttatatatgtcatagcatagatgaatttagaaacaatgctcctactgtttaaatacatatggacacatctggtgctgagaaagaaacaaacacattaccattggtgtcaagaaatattactatatagcagagaaatggcaatacatgtactcagatagttacatccctatataaaaagtatgtttacatttaaaaaattagtagataacttcctttctttcaagtgcacaatttcattttgacttgagtcaacttttgttttggaacaaattaagtaagggagctgcccaatcctgtctgatatttcttgaggctgccctctatcattttatctttcccatgggcagagatgttgtaagtgggattcttaatatcaccattcttgggactggtatacataaggcagccgtgaaactggaaagtcattttgatgactgatgtgatacatccagaggtaaaatgcatttaaacatattaaagtatttgccaaagatacaattttcttgctgacataaaaatcacacaaacaagtcccccccaaaccacaactgtctctcaaatagcttaaaaaaattgaaaaacattttaggatttttcaagttttctagattttaaaaagatgttcagctattagaggaatgttaaaaattttatattatctagaacacaggaacatcatcctgggttattcaggaatcagtcacacatgtgtgtgtgtctgagatatagtctaaattagcaaagcacatagtattacatac

SEQ ID NO: 117189 - DNA, 1101 bp, Homo sapiens
caggatttatttatatcaggatttgcaagcacccttattgcatctgggtagatgatatggtctggctctgtgtccccacccaaatctcatcttgaattgtgattcccacaattcccgtgtgttgtgagcagaatctggtgggaggtgattgaattatggaggtgggtctttcctgcattgttcttgtaacagtgaatgagtctcacaagacctgatggctatttcaagggggagtttccctgcacaagctctcttctcttgtctgccaccctgtgagacatgcctttcaccttccaaggttgtgaggcttccccagccacatggaactgtaagtccagtaaaactctttctattgtaaattggccagtctcgggtatgtctttatcagcagcatgaaaacggatgaatatagtagatattgtgaaaattaagactcagaaacccatgaaattattatctgtttcagagtctcattcaaaatcatttggaactcaaaaatccaaaagcttacattggtctgtaatttatgtaccacatcctaggactaatgtttctctaagtgaagagtcactgtgtttatattgttctgcatttgcagcacctgccttgctgatggaataagaaacttccatgctatagaaattaggcctagaatatggatcgactatgtctttgatcaacagactcagatctctaacctgtgttggtcttaggtataggaagattaattagataggaataagtgtgacttggtcagtaagtattggtgatctaattacaccctgggacagggacagaattgaaactacagttccacatcttggttattgtgctggttactcaaactcttggtagtcatgttcaggctcatgaggggttacagagagattgatgcattacagttcacaacaaagaaagtcatcttatggctgatgatgtggggccaacacctccatacaacaatttgtagggcattctgacactattaattcagcacgaaatcagctttcccaaccaagtcttctatttccaactcataggaatctcaagtgtcccagcttcccttgctttgtagggcttccttctttagggaatgaaaag

SEQ ID NO: 117190 - DNA, 1035 bp, Homo sapiens
cagtcgttcgggtgagcgaagatggcggccgagagggaacctcctccgctgggggacgggaagcccaccgactttgaggatctggaggacggagaggacctgttcaccagcactgtctccaccctagaggtgagaccgcgtcgctgcgggtgctgcgctgcgtagctgccgcgcgtctcacctttcccctgccccgacttgtccctccccatcccccgtgtttgcaaggaccgtcttggggtgacacctgtgacgcgagccccacctccggtgcctgtcagagggatgtgcttgggctgagcgcagggcctcctcaggagagcagcctgcggcccgcgggtgccgacctaatcctcagaggggccagaaccgaaccgagcattgcagcggcgctttcccagctcagctggccttcctcggtgtctcttgcacgtcctcctcttcaagccggagaagggcttgctctgcatcccagtaaacctccaccgagctcttttgaaggggtgctcgcttttcctttccagagggagggtgtgccgctgccaggggagcgcaatgaagtgagcgctgaggggccgagggtctgtggggaacgaatgggtgcactttcccaggaatggcccttcacggactgctggttcctcttgagggagctgcttctgatttggactgttaaataggtaaatgcatttgcctctttttgtttgtctttagttcctagacttttaaaaggtcatagtatttataaaatgtaaagctgaaggcaggattagtccaggaaactgctgttgtgtgtgtgtgtgttttcgaagttaccaagggagaaatagaaacagatctccactcctttttcctcttttctcgcttgatcagcgatctctgaagctgtgtgttcctgtttttgtcaaaggaagcaccctctataaacttaactgtattgggccctccttatatccagttccatttgaattgctttgcgtttgatgagagcacccacacctcacagcctaattttaagtgtgtgtatgtgaatta

SEQ ID NO: 117191 - DNA, 1057 bp, Homo sapiens
caacccttgcttctcaagtagctaagacttcagacatgtgccactatacctggctaatttattcatgttttgttgagatgggatcttgctatgttgcccaggctggtcttgaactcctggcctcaaacagtcctcccacctgggtctcccaaagtattgggattacaggcgtgagccactgagcccagccagaaaaatcttcatagtgttttattctacctagcagtctatactaaattctgtgaatcaaatatggtgaatatcagtgtttgttttaaaaaaagagagagatgggaactaaagaacaataaacatagtcatctgtctcctttgttaacccaaaaatagaaacattttttatgctttagctttcatcttaaactcagctgtatttcataatgacatcattaagtgactgaagacctaatctgatcatttttgtatgaatgaatgagtattacacttggttcttatttataatacattttaacaggtgtagcattcctccttctatggaggagtatggttctaggaaactataatagggagcagcgtatgttactgggatggtgaaaactattgtccagtaatgagaaacctatactcgatttgtccctcctataccagaggagagaatatagatattgctgtagtgacattgacataatcagttcatacatgtctcaaagtatgtctccaaggaaaaattaatctttacagttagcacctatgaagcatcttcctgaacctttaggtctgctttaaattaaaccttatgaatttgtaatatattggtttacttaagctaaaaggtgtcatgaagaaaatttaagacagattatatatatatgttgaatctaaatcctacaatttttgaatgaagcagcctgttagtgtaaataacacaaaactcagtatcagtaaagtaaaatgtgattaaaaagtttaaatgactttatctgtactgatttcttaataaagttactatctctcacaatattttgcctgtgagtctgttgccaaagaacagtgcctctttcagattctggggtttttg

SEQ ID NO: 117192 - DNA, 1402 bp, Homo sapiens
ttttatttttgtcatcccaaagtaaagaattttaattattgctcatgagaaatgaaaatgttaattgagcttaaatttattgatttgaaattccattatgtatatcgggttagaaacacattttaatttaccaggagtataaaatacaacagataagggatctttttgatgtaagcttttctgtaaacaaaagcagtatgggtcagaaaactataaacattttatctgttctctcatgttttaagtatttaccaagtaaagatgttaacgtatcatgagatttaattcctcaaaacgtttttgctttttagataagataccagttacaagtttagggctgttaagttcaaattttgagtgtattttaaattatgaagaaatgattatgaaagactttcacagcaatataaagtcatcatgaatctcattcaacttcttcaaagggatgaccaaggtcaaagtgggtaaagaagactcatcatccactgagtttgtagaaaaacggagagcagctcttgaaaggtaattctagacagctatattttattactctcatgtttgtaccttaatataaatgtaattccattatatggcaaaactgtgttttaatgattaaattttttccaaagtaccacttggtggcttttaagactgctttaaacttttttaagaaaattacttctttcaacaaagtactgtataattgttctgtataatttttagtaatcctcatcaatagtctaacaaaataacacttgtttttctattatatgctacaagcaggagcatataatagaaaacatataaagacatgagttagctggggatagaattgtatcataggtagtcaccaagagttactaagaaactgctaaacttggaaaacatggaagttgtgaatggggggaaaaataaaaatttttggatgcaaataatcccactttggtcttatttaggtttctgggaagttataccacactcatgtactgtgttggatagtatagctaattatagttcatctaaattaacttttctgatgagtttttacttagtaagaacattattaaatacagtgagaagtacagtttgtgccccccttgtgtttgtataattgatttttacttgaatgtacaaaagtattagtctttgcttgagttgactatatacagttgaccctccatatctgtgggtgccttatttgtggattcaactaactatggatggaaaatatttgaaaaaaataattacatctatactaaacatgtgcagacatttttggtcattattgtctaaacaatacagcttaacaactgttttcatagtatttccattatattaggtattataagtctagagatgacttaaagtatatgagaggctgtccataggttattatgcaaac

SEQ ID NO: 117193 - DNA, 1026 bp, Homo sapiens
ccctcatcttaagtacccagggacacaaacactgcggaaggccgcagggtcctctgcctaggaaaaccagagacctttgttcacttgtttatctactgaccttccctccactattgtcctatgaccctgccaaatccccctctgcgagaaacacccaagaatgatcaattaaaaaaaaaaaaaaaaaaaaaagaataaaggtagataatggtctgccttgatttcgcttagtctttcctgaaaatgtaaccatgaccctttgagagacctttcaagtcttatttttctatgagtaaatttgaagtatttcagatggcatgcttgataaggaacttaatgaagatttactgtaccaaggacatataatttgattctacctttacgtttcttccaacttggctgcattgcatagtacttaccataccttcatgtactatgaaatgttgaggagagttttaagggatattgaaacttgaccctgtttgtataaagacactttctttactgataaatgctacttgttaaatggtaccatagtggaatttgcaatagtgaaaaaaagaaagaaacagtatagtatgagggaaaagttcattttcaattagaaaaaaatcactgaagaaaatataggcataaaggtgtagaagcaaaggaactggaatggtttcttttaatctaatcttaattcttctgtgcaagctaattttcctgtacacatttattttttaatctgtacaggattctaaaactgcatttttcttgccctttcatatagccagcttttctaaagtgatttttctgtgatatttcttaaactttaaacatcaaacaggtaccatctgtgggatacccaacccagttggatctggtgggttagggaagcatttttcttcgtattattttattcaatagtatgatatttacgtattcgttcaaacttagataatccagatgactaccttgaatgaaaggataaatatctggtattaaaggttaggaagagaaaaggagtggttaaatacccaa

SEQ ID NO: 117194 - DNA, 1389 bp, Homo sapiens
cgttccagcctgtcgacagagtgagactccgtctctaaataaataaataaataaataaataaataaataaaatgtagtgtgtcaggattgtgttcatttcaagcatctaaaaatccaactggcctaaacagttaatgtagattaattaatccactctttcaaatcaaagagtttggagtaggcagctgttcaggattatctaattcattaggaaattctattgcttctttctgatatctgataatacaaccttttctcaccagtctactgactgagtccaaaggtgttaattaactgcagtagcctcctaattggtgtccctgattccattcttggcacttctactttaatacagaactttacagtagtcattctaaaatataaatcagatcattttaacccctccccacgctggccccatgcccccattttactcaataaaagccagagtccttttaatggactacaagactttatatgacctgcacgcctcactctgttacccatttgatctcatatcctccgtgatcactcactctgctttaggccagactaaccttttgctgcttctcaaacaccctaggcattttcctaccttagtcttttcaactgcctgctccctctgcctagaatgctttgttcctaggtatctgcatagctaactcatttccttgttcaagttcgtatgttcaaataacatctttcaagtgaagcctattccagtcattggctttcttctgacctattctatttatattgccaccaaccacatcttaaatacttggtcccatttaccccattgttctgtctttttttcccatagcttttgccaccttgtcacatgctttatcatttgtatgtttattatgtttatagtttattgtctatcttgtactaaaatgtaagcttcaccagggaaagaatcttagtcccttttgctcactgatgtgttccaagtactcaaaacagtgcttaataggtagtaagagctcagtaagtatttgctgaatgaacaagtgaatgttatccaagacccaggctctttctacctttttattctcccattatgtgcatttgtgttttagtttcaagcaagataaatatttgtaactctgttgctctcaagcgttttatataacctgctttattttgttttgtttctggtaagtaaataagaatttgaaagccttgagtgatttttcatcagtaacttgaagtaaatttgaagaacaattactgagcacctcttattggatgtgatattgatcaattccattgtcttttatttctgacttttttcagtgtttctatttctccccatacctcttttcctgtcttcttcctacactcatttaccctttttgtcccgtgtctttcctttgtattaca

SEQ ID NO: 117195 - DNA, 1566 bp, Homo sapiens
gttcaaatgattctccttcctcggcctcctgagtagctgggactacaggcacctgccactgcgcccggctaattttttgtatttttagtagagatggggtttcaccatcttggccaggctggtcttgaactcctgacctcgtgatccacccgcctcggcctcccaaagtgctgggattacaggcgtgagccaccgcgcccagccgatagcagttgtttttaatgggattagatgagtaatcgagaatcatcaaatagttgaccttatttccttttatgaagtcatgattggtaatttattatgggtgacaggcacatgtgagcttttctaataaagggaaattgatttcatagtggtatttctaactttttcatttttattcattttatgtggtattcgtttatttgattttgtatggtatcaaattagataagacatttaccaaaaacagcaaaaccttaaaaatagaaatactgaataaatacctttgaagaggtatggggaaaatactgaagaaaatttagttcttgtcaagtgaggactaaagctaattgtgatcatttaaatatgctgacacgcaaaaaagtattggtagactcttccccattctgatgataatagcagtttaaaacttggttgagtggaatatatatagtaatattaatatgtttcttagaactctaaaattatagttgagaacatgactccacccaaagataaaatgatgcaacaaactcacatacccctttgcaacataatactttgcaatgagaagtttggtaagttatttaacctctccccactcccaccccttgccatttctctttttacgtaattatgaaaactggatagtatatcaattttcaaaagatgaacaaaaacctttttaattattaaattgctgtaagattctaagtaattacagtgagagtagtctaatacgaggtagtgaggacacttttttttcctagtatttctatttttttatcattttgttgaactgtaattcaagatgctactgataaaggagcaattttactcttaaatctaggtatcttcaaagaacagtaaaacatccaactttactacaggatcctgatttaaggcagttcttggaaagttcagaggtattatttctatattaaatgtttgtatatgaatgttctcgttatttgtcattgtaatgtatatgactatatatagtaaataattgagttaatagatggaataaagcaattattattattatgttttgcttagtgctttaattaccctgctaaattagtagcaaaatatctttgctttgatacttgtagggtgattagtccctttcttgaatacttaaaacaagatttaagagagtgatttataagtagtctaactctgaatgccctaagttgttcctcaggcatcatgttgaaataagtttattcagacttcattttagagaaagagaaagttgaatgtgtatttgcttgtctacattttggtatccttattaaggttttgaaatgcaaatttgtgacttgaaagagcctaaattctaaacatgatgctctttttatt

SEQ ID NO: 117196 - DNA, 1033 bp, Homo sapiens
gatttttcggcttgaataatgagatgaattaatgagcccaacaattgcattttaaagctgtacaagtggaaaataggatattaatttgcttattgagtttagttctcagccacatcagttggccaccatggttataaggttaatttgttgctttaaaacaaggaatttagcttgctattggtaacctaatttacaatggtttgttcttcctaaattagctccatttttcatttttttcttagtggtttgaagaaaagcagcagcaatttgagaatctggatcagcaacttaggaaacttcatgtcagtgttgaagccttggtctgtcatagaaaaggtttgtttgccttactacttacgtagttagcaccataaaactaatgaaaatattttatttaaattttatgaaaataaatattctgaagttattgcagaagagagaaaacaatcatttaagacaatgttttctagttcaactttattatgtaaattttttttgttctattttgctttactatctagtttagaagtagaaaaataacgagcttagaaaattatttgttaactggtacagatgtgagctaaaaaaaagaacaaagaaaactatatttgaattttggattaaaacttggtcacttgattaactttttgttaagtatagttacagttaaatggatgaagaggtcttatcaattagtaactttgattataataaaaaaacttgagatttgaaaattgctttttgaaaattttttggaaagtatttgttttgtgtgtctatttcctgtaaaaccctttgaagtattttcttcatttttgaactgcaatattgaaaaacctggaggttttgctaaaaattcatagaaaatttgagttgtaatattttaatccacagtgaaattatagttttttggttttttaaagaatccaacaatgtaaatatcaattgtctaagacatttaataagcaaataatatgtaacattaccagcaatacattttattaaaataattatagaaacttattaatacatt

SEQ ID NO: 117197 - DNA, 2261 bp, Homo sapiens
gggaaaatttccagtgtaggtatgacactagcattttcctattaaagacatcttcaaagcataaaacgctgttataaatcttataaaccatatttaaagccctaaaggctagtgatgaaatgggttttgaatgtagtttttattctgaacatgtttcatccagtgacagggtttttttgttttaagcaaatgaatatggagattattttctttgatattggcatacttactttcagtatcttagtatattagaatagaacttaaatacttggttttattgttttcagtattataacacttctagtgttaagaaagtattttaaatgttactcttacttaatagcattatgtcattcacttatagggtgtgtttgaccatcgaatgaagtgctggcagaaatgggaagatgctcaaattactttgctcaaaaaacgtgaagctgaagcaaaaatgatggttgctaacaaaccagataaaatacagcaagctaaaaatgaaataagagaggtgattactaaatgctttaatctctttacttaagttttgcatgagtcattcatatatacataatttttcataattttttgtaaaccattcaacacgtagctatttttgcatatttttatgaactgtgttagaattactttaacattttgatcattattattaaaatctccagagcccttcattacttatggaatggataaagaagcatacaaggaaaacagctaaaattaacctttacattaataattacacatttttattagatggttaattttatttcagattattattttgtgtctaaaaatggttttagagctagatctctcccacatttagctgtccaggcaacattatcccccatatatatgtattatatatggtattttagtgaatttgtataagtttattataatttatacacttttcttaccatgcttcaataaggaaattgaagaggtaggacaacctttatgttactaaaaataaatgtacctgccctttgaagagtatgtaccagtgttttggttacatagtgggaaaaatatcatttcattgcttaaatcttcagttattttagttgtttcattgttcactaatcacaacattttgttgtttctgtactgaatttaatatttattgatggtcttcagtagaccataattccacatttttttccaatctggtcattttaccattacaaaaatatttttaaaatgtttatcatgtaattttcctaatttaaaatatttccatcagcatataaattttgaagaacacatatccttggatttaacagtattgatatattctgaaataattattgatataaaaaagtaattaagaaaattacactatagcactgataatttattttgtggtgaattttatgcccaaaatctttcctcttagttatatttaattaagctttggacattgtagtttattaagtacagtattgaaatatcttaatattgagcaaatctgtggaatattaaaggaaattaagctaacatgcatttctattggttgacagttaaatgcaatttctgttgatgctaaattgtgcattgccaatattgagctttctcaggattttcaggcattgtgattaaattaagtgagtggtcttgacagtactatacttttttttgagataagcataaaatatttctttgtttttattagtgggaggcgaaagtgcaacaaggggaaagagattttgaacagatatctaaaacgattcgaaaagaagtgggaagatttgaggcatgtataataattttgcatttatcttaacaacatggtcacattttgctgcaattttgtggtaaagttgaatttagctttctactaacggactttttaaaatgtacttcaacagaaagaacgagtgaaggattttaaaaccgttatcatcaagtacttagaatcactagttcaaacacaacaacaggtaagccatttttgtttataacttaaacttctagaatttgtttttggtatactttcttattttaaaaagatgattaatgaactgggcatttaaactcaagaataagaaatggaagacagaaagccagtgatggtaaaggataaaagggtaaactaatcggaaactatctcacgtgttttttttttttttgcctctgcttaacactaaggcagagatagacttttcccagttttaggccatcagaaacctcatgggcaactttcccctttcactgtctttctagtttgttttccttgttgg

SEQ ID NO: 117198 - DNA, 1065 bp, Homo sapiens
tctcaaaatgcctttatttcattgttggtactcttttttattacccagatacaataaagttttccaagtttcattgtacacatgaaatgagtttactgtggaaatgaaaatgcagagtaagtccaacagctagtttatcatcctgaacccagtgaagaaatcaaagctgaataaaagcgactcctagttgttactctcaagggcaggtataatttatgtgcaagactttgtagcataatgttttgcaagtagtggatgttcaatatctacaataaatgaattgtagtactatattgcttgaaggaagtttataacctgtctagaacaactttctcaattttacaactaaactaggagatccagggcttaaatcatgattgaactgattattcctgttaaatttatgtgtgaaccatatgtgaacattctttgaaaatgtatgataagcatttcaagatttctgttttaattattaacatttagaattctaggaaatcttttgggatacagagaacttatttcttccaactgttgcttcagacgctgataagattgtagaagatagggaagctgtagtttactatctagttttttaatgcacatgaagtaatttaaaatgctcttcttcctttcttgtcacatacttttaaaaaattctctaaagattgaataattttaagtatttcttaactgggcaaaatggaaactttgtaactgaagccagtcaaggtgaatacacagaaaatcattttcttattaaggtcagttaatgggataaaccgttttaagagagttgagaaaaaataaagttctattttaaatttatacatgtaactttaataaaaactaagtcagacaaaatttaacaaaactaaattgccttcttactgcttccatagtcagtctcgagttatcttgattttaacctactcttattttctagatcttcatttcaaatattctcactatatatgtgtatacagtgtgtatatttgtgtgtagaagtgtgtgtgtgaatgcaacaggcttttaaaccaaacttaatttctaaattgtagttttaaa

SEQ ID NO: 117199 - DNA, 1030 bp, Homo sapiens
ggggtcccctcgttttctctcccctcccccggcccagaggaagggctgcgcccttggcgcggttgtcaaggaaacgggcgcccctcccgggcacggcggctgcgggcgcccctagcccctcggggtccaaccctctcctcccggacgagctgcagtcctcggacgcggcactagccattctccccgccgcccgccttcgggagcccaggatgggctgcgttcctttctggcacagctgccccctcagtccagacagtagtagcttcgcggcagattcacgctggcttccaagttctgtacaattagttcagctggaaaacctgttttttttttttaaatcataatttgcagctgtttattagccaaactaaacacgtgtattgattttagatgatttccaaagatttttctttttgagttgtgcagttccatgaaatggcaaaattacttgctgagcacctgtttcatacctaggactgtggtcaccgagaagtgtgaaacaggacccctgctctcaagagtgaaggggagggcagagaccagggcatgggccctttgagcaacacgtttactaagtgaattgttggtggagatttcccaatgaattcaaaacattctttcctggacagtcattgctagtgggagaaatgtctgagtgtgtgtacaccttggaagaatttacttccagttgttaaagaacctgtagggttgaagaaagattgcagggcagtctgaaagatttgttattttatttacatcaatcacacacttgctaaacaccagttacattactttgatggagaatattttaacccctctcccctcctctaaatattactggtatttggtgacagtctgtttgggccattgtgttttcttagttgggactaaattaccctctcaaaggaagatttagaatgaaaaacagtgattgaaaaaatagtccaggaagtcggtgggtttttagaattgagtagactgctggatccaagtgttctgaaacaagttgttaaagtgctttccttgggaa

SEQ ID NO: 117200 - DNA, 1085 bp, Homo sapiens
aaaatgaacattatatcatggacgatagaaagggagcagtgtcctgtgtgcaggaggtcagtggtggttagagagtggaaatattttggatacatggggcagagccacattgaggaggtccctgaggaggactacctttgttctttgtcctcctggagggtgggcatctgccattgttgaagctgtcaaagttaacccttagacttttgatgggcactggggagaggagggcacattctggtagggagaatgtatgagttgctttcaggggaggggtggagatgagagaatgccctgtcactgacattactcaagcagtgtcagtggggctgccaagggtatttctccgatctgcattaggtggggatagggccagaaactctgaaactcaataactgtgtgaagaaaacaaggctgtacagaagtttctgaacagcaaagtgatatgaaaatgaggaaaccaggctgattgaacttaccttggtatgcagaatgtttccaaagaggttaattgaaatcaggtatgggactatggctgtggtccaggatgaaggtgtggactgggacagtggcatgggatggacatgagagattctgaaaagaatatctgggctttagaaaactgtagttggtagctgaaataaaaagataaataaaaaataaaatttagtatcctctctctcatctctgcctcactctctactcagcacctctgaaccaacccacccactccccagcttcaggaggaccggggtgcccatgctctgtgtctcatgatcttctgcctacaggaagcctatcccatcccctacccgaagttggttaacttgtgttttttctttccaagctagttctagtttcacttccttctggtagccaatggtgagagttttgattctgcctgagtttgctcctttctccattggtggagtcttcaagccaataggccaatgaatgatgattcctcactggactcctctcttggtggtcctgctcctatggacaggagccctcaggccatgctttgaaagatggccactacacatgccggatgtccactctgttcagatgatgcttgagactca

SEQ ID NO: 117201 - DNA, 1071 bp, Homo sapiens
caaatgagcttttacaataaccagatagctggatcacatcactaagtgaggatgcatgaacctgcctgcctgcttatgtccagctcaacccttctaactgagtgcaaagttgattgttgcctataaaagtggaaaatggacctgataaaaatgtttagtctgcaaggcttcattttatttatcatatcagaaaagaacaatgttttgtgttgtggtcaaaatagaagccgaccttgcttgttcacaaaagctcaaatcctagagataaagggggcaaaataatagagtacaatagaaggagtagggtgtaattatttgtagcttgtcaagtgaagccctttcaagccccaggtgattcaaatctgggaactctgcacaattctgtaaactaaccacaaccagcatcagagaaatctcccctggcccacagacagcaccgaaattgcatccgtttgtcatgcactgagcatgccagcctcacacaatatcatttggttgcaaatgggcctgcccccaaagccctgaaacacattctgtggtatctgactcttggcctgcgatttgtcatgtccctgctgctatcagtgtgcagtaattttaatagattctgatggtttccttgtagaaactcaggatgcagctggtttggacatgggacacaggagagactcttctggccaaagacagcaggagtgtgtgcagaaaaattggagaatcatttaatttcattaaaaatttgttataggatatatggagttatgttttatgattttttttaaaaaacatttcacagtttaatatatggaaatatgttgttcattttatctttaaaatagttgcctttttagagatatattactgacagtatacttactcaactttcagaagtgacagctgtatgaatgaagttagtctaatataatggtttatttggtcccttactgttcaaaatgtggtatggatcagcagcattggtgagagtgtgttagaaatgcagattgtcaggccctatcccagacctgcaaaatcggaccaggggattcatacgcacatttaagtttgagaagctca

SEQ ID NO: 117202 - DNA, 1031 bp, Homo sapiens
ttttcttctgtttgagaagtcacatggcaaaatattaggagtctgtctgacttaatgatctctattccagacatgtactaatttatactttgcggtcatttatctacactggcaatgaatgggaagtagttgaaattgttatctttataactgaagggaacaatttgtatgcagaggggcttgatctggtatcttagttcttagaaacacctaaattctcctgtttataaggaaaattgaattgtatctcaagttatcaatttttattttcctgataatggcacaagaattaaaaatctattgaaacttcttaacaccgtggtataaaatttcaatttaaaagtataactgggcagttatagctcactgaatggtaatttttttttttttttaattttcttttaaggacagcacaattagattttggtaagattgagacttcagtgtcttctggtatatttgtcaggacagattcacaagtagtttgcaagtgttcacgaacaaatcaggttagtaatacattgaaaccagcacaaatagattgtcctcatcaccacatagacaaaacagtcaggagatgggtttggtgctgtaagcacaagtggcacgatataatgaagttgtattccattaagctcttgtgtacggggagcaaaatgtcatcacctgaatgtggctgcatttctgtgatacaacctcatctgttccgtcaactagttttgctctgatcaataagcagttttctgtggcctttcactgctgtcagatgtcattgagtgatgtaaatgcacgtcagaaactagaaacttgacagctcacccagagagggaagggagagaggagagggaaatcactacaatagacatggttgacagctgacatctccttggggtaactgattggatactgtagcagccggcacttttcccatataaacacgaagaaaaattatcctgttatgtgtaaaatacagtgcagatgttttaaaataacttaagggaaaaattattcttgtaaactgtagcatagtg

SEQ ID NO: 117203 - DNA, 1114 bp, Homo sapiens
tgaattgtaaagggccactttacaaaactgatgtttcagcactaggatacacttctttaaaagtcttagataaacgaaacagaaaggcaaaaggaagagctttggggagaaatggttattaaagcacagaagagtaaatgcttctttattttctacctaaatttaattttttctagattataagttattattggcatgctgaaattattttaatatctagaaatacctcatgaaattgcccagaaaaatcccgttaacaggataaacttataaacgttaacaggatattagtgagagattagtgagactgtttccttctcttttcttttaaaggggagctctaagttattggtacacttttctgttaggacggcaagggataatccacatctagttctctggttagcactttttcaatccaggttgacttggaaaataaacagtacaggtgaacacagatttagaccagatgttgccagtgactttacaaaagcaccaaccccagggtgctccaaagagaaacaaacctggagtctggggctcacttccttcccagggaagtgtgtttttgtttatgtgttttgggaggaaacagatcctagtgaggtttcttctgggtacctgatgaaataagtccctactgtgggattaaaaccagcaccccctgccttgcccagcctctgttgaccagtctagaggaggcagcctgtcacatgcaggccccttgctaacctcccaagtcaacacctaggactccatgaccctagcacagcccagctgtactctccggatactcaggaaccagctccacaccaggcacagctgggtgactgccaattaagcctgcccagagcacgaggctgcccgtgcttctggaggcgaggcttgttcaccctgttctctgctctagtagagtttattttcttctgcagaggaggaccctctccccagtgagtttggacagttcttagctattcatggtcaaaaaaaatcctagattttccaggattctctcttctctcagtttctgcagctctattaataattttacctattcttataattatataatgaggtctactagcattaatagaatagaaattcacaaatctct

SEQ ID NO: 117204 - DNA, 1052 bp, Homo sapiens
aaatacttatttaatacctaatatgtgcccaagactctactagacactctaacagtgtgaaagatatgaaagacaggacatggtccctacttttaaaaaagtaccttctaattagataaaatttagggataacagttttatctcatatgtttccaaaatttaagcagaaatctgtattctaaatggacaggagttctaagaacaaagagattagggaagaaagggagctaacatggaaaaaggagaacttgcaatgtcttggtttgaatagatcagaacacacaggaaaagacattcgacatggcaaagataggtgggtagccatttttacctcatataatgaggtaatgggagatattggctcagctgtcactgaagagctcttaggaggagtgaaaaataaagtcggccagtaaaggtgttagtagtagacagaataatggttccctcaaagatgcccaagtcctaatccccagaatctgtgaatgtattcgcttacatgggaaagggggctttgcagatgtgattaaattaaggattctgaaaaggggggttatcctggattatctgtgtgggctcagtgttatcatgagagggaaggacaaggaaaaggggattgagtttatggtgtcatagcatctggtacttatctgcatgaatcagaaaggctgtttacacaaggtgtcaagtcagaggagaggtgatgaaaggagatgttatgatggacacaagctgaagtggagtgactgctagctttgaagatgaaagaggccacgagacgaggaatggtggaaaaggcaaggaaacagattctcttctagaacccagaaaagactcagctacagtcaggtaataaattttaaggctggatgtagtggctcacgcctgtaatcccaacactttgggaggccaaggcaggtggatgtcctgaggtcaagagttcgagaccagcctggccaacatggtgaaaccctgtttctactaaaaatacaaaaaaatagctgagcatggtggtacatgcctgtaatcttagctactcgggaggctgggga

SEQ ID NO: 117205 - DNA, 1032 bp, Homo sapiens
agtaagtaatttggctgttgggcttttatttgtaccgatagtgctagctagtgttgtcatttgttttgtctggaccttcggaaatctaatcaaggagacaatggtgtaaaaaaaatcaacaacacttttccaaattgttcttaattactagagtacaaagtgaactaaatgctgtgatgtttccaattaaagaacctgtttcaagcaagcgctattaaatctatctttcccaatctgataaataagctatcaaagagtggagccagattaatggagagcaattagttctagatttcttataatagggaatgtgaaccaacattgttaatgaatcttgcggtttatggcatggtaactgtgtcatttgtacctctggcatatcaaaaaggaaaattgattaaatgttatcgtatttcctatgatttttagtgccaaaaactgtttttttccaaaatctacagttatataagaaggacatttgccatattctgaatcagagttgacccttgtatttggaaaagaggaaatgattaaattaaaaagaagtacatattgtccctctaataggaagggatagacttgcaaacacaagaatgtctagactaggcagaagttagcaaactttttcttttttttattattatactttaagttctagggtacatgtgcacaacgtgtaggtttgatacataggtatacatgtgccatgttggttgaagttagcaaactttttctgtgaaagattcgatagtaaatattttaggccatgtgagccatatggctgtgttgcaattactccactctgccattgtagtgcaaaagctaccatagatgatacataaagaaaagagatggactgtgttgaaacataactttatttacaaaggcagcagccagacctaatttggctgttaggctgtaattgacccctagactagaggctggtggcagtttgggcagataggcaatagtaaggacttgaatggaaaagcaaggcccagcataaggaagatgtggattcagagccctgag

SEQ ID NO: 117206 - DNA, 1075 bp, Homo sapiens
atataagtaacaaaaaatttatcatgaagctgtttgcccataatagcagaactctgcagatctactttactgggttcttctcacaaccaacctgttagaacaaataattgttttaaaagcatttcagtaactgttattccttataatggaaatgttttattgtatgctatttttcttgtttgtggaggagagaggcaagttcactttgcttgatcccaagtaaatgttagctttgtctcttcccaatatccactcctactctggcaataaagagtttggggttgaaatttaatttactttcttctataacaaaatgaagttgcatttcatatttttgaccttctcttcttctagtagtagaaaactcaactaatttctcaaggttttcacataagagacagtcttgacaagcagaaggagtttaaggtgcaagaggcacacttgaaatgctggtgtgctcagtcgggtgtgtgccttgactaatttacttactctgtgccccttccagtatctagtgtgacagagaatacctactccatgctttgcccctgaaatatgagctttcatttccaaggtgggaaaagagtatttggcatcagccttgtcagactcaaaaggaagttgaaaagaaagaagaccttcactctacaggttgctgttggtggaagaccagttcaagtatgggaacagagagccattgcctctgaaattgccggtgctcatgctttgtcccatacaaatgagagctgtgtccatgaggtcaaagggaatccgtaagcttaaagtgcagatgatatcgtggggaatatacttgaatacttctaaaccaagctcccagcactccatttgcatgccaaagtattgattgtgaaaatattaaagcaaaattattaaggttagaacttgtcttaattcatgcaaaacatatgttatttgtgccaatttagtatgtttttagtagataagtagtatttctaccctgacataaaattagatatatttaaagtggtatgcttaattagcttttcatcagaaaaagtcctccccattctcttgacaacaccctacactgagt

SEQ ID NO: 117207 - DNA, 1037 bp, Homo sapiens
gaagtgatttagcaactcaaaagcaacctgtggccatggcaagctgaggatggtggaagccgaagccaatttgcagagcatgaaagagtgaatgaactggagataagaaagggaaacagcatcggttgaacactcttgaaaacttttgccatgaagagcagagaaatgggctatagcctctaagggattttttttttcctgttgttttatagtgagagtgcatgtttatgtgctgataggaatgattcagcagagatggaaaggtgaagagacagataggtaaatgcatgggtgggtgggtgggtgggtggatggatggatggatggagggatggatgggactagtgaataactaggagaaagaagagcaaaataactaaagaaatgaatatttgagaaagtcaaggagtggattgagagccagagcagagatataggaattggcttctgatggaaggagggacgttttctccgctatagcaggaggaggagaagatcgatggaagtgcagtataggtagagttgttgggataaagatgaggaggatcaagccaggtggcttctgcattctctgaagtgtgaagcgtggttatcagctgggagagagggtggaggaagggatgagggagataaaaggagaagaggataagttttgaaaatgggtaaaggctgattcttctagagcaatagttttcgagtgtggttcctggatcagtagcttcggcatcacctagaaacttggtaacttatttgaaatgaaaattcttaggccccacccaagaccagctagatcagaaactctctgggttggaccaagcaaactgttttaacaagccctctaggcgattctgattagtttgagaactactgttctagagaaaagtaacaagatttctggacaatattttgaggataagagcttaaatttaaagtgaaaccagtcttttttgtattctgtgatttttctcagtgtttagcagcttgggtagaggcatgaatgagagattgctgggattcagccagaactgagctgtccc

SEQ ID NO: 117208 - DNA, 1050 bp, Homo sapiens
gctaaatgtttaatcacctacgatgtgtttcaagttatgtttttcttaagaacctttgtttggaaattggttttaagattataaatatttgatagggaattacaggagtaaccagttagaattaagagtggaggaataagagccctacattgtttcatgcaagtaatcagaatgttttatcaacaatcgtattacaagatttttaggaaatcacgtttcagcaatgatttattgtatagattgtatatttgcttcaaattccacaaagaaatgtttagaagatgagagcagtgcccatttgttcactcttactctgcgtgctattattcacccacactgttagaacataaaccttgagacgtccccgcacagcagtttgatcccctcaaagctagtttgtagtgttttctgtttaccatcgtcccctgatgctgacatgcctgttcttgacctttccagcaaactgtcccaccagcctgtgctgctgttcctcagggatccatatgtcttgcctgcagccagcggtaatcaaacctgtcatctgctaacagctctttactgatctgaccctgcaccacataaaccacgtttttaatacaggtctaacagagtgacattggtcccgggcttaataatctgccaataaaccagtgctcttggtataagcgacacttagaattttaattggggctggcctttcaggaggaaatgtaatttttctttctctcttaccagactattttgaattagagtaataaggaagaatggtatttatggtccttaatttttctgatcatgtcattttggcctctgcttgtttttgtccagatgccaaggttcaaattcaaggctctagtcctttttaaaaatgcctcttcccggccaggcatttttaaaatcccagcactttgggaggccaaggcgggtggatcatgaggtcaggagatggaaaccatcctggctaacacggtgaaaccccgtctctactaaaaatacaaaaaattagccgggcgtggtggccggcgcctataatcccagctactcgggaag

SEQ ID NO: 117209 - DNA, 1050 bp, Homo sapiens
aggaaacaggtgcacagccactaggatggctcaaacaccttttcatctggctttaggatgttttcctgcccttcagttccttctcacttcagagcgaagtcatggacctgcttgatcaaggtttggcccttggtatgaggccagagagtatcccactatcctgtgccatatttaaggctttctttgttcattttaggccctagtgccctgttcccttaaggagttaattttattccctccttcatgtctgcttatgtttgaacatgtcttccccatccctacctcctatagggttctagtaattgattcctctaaggccttatgtttccctttgaagagctgacttttggaagacatctgttgactttcttccttgttttgtctcaggtgtgagcatctatggtgagacatttccagatgagaacttcaagctgaagcactatggcattgggtgggtcagcatggccaacgctgggcctgacaccaatggctctcagttctttatcaccttgaccaagcccacctggttggacggcaaacatgtggtgtttggaaaagtcattgatgggatggtaaattgatacatttttttcctttcaaagctttatatttttattgagagtactttcagtgatttattttaatcttaaaatatgcttgttagagatccattatatagctgactggcctcttcaaaggtgaataaattatatatggtatggcattttaattcttagggtcattggcgcagcagctagggacttgacaaggagaaattaaggactaagttgatttattttactacttgatataaatgtaaagccctttttaatggaaccaatatataccaggaccccatatatacacacaatggaatattattcagtctccaaaaggaaagacattctgaggacattatgctaagtgaaataaaccagtcgtaggaagacaaatactatatgacttcatttatataaaatatctaaagtggtcacattgatagaaacagaaagtagaatggtagttgccaggggctggggatggggtaaa

SEQ ID NO: 117210 - DNA, 1574 bp, Homo sapiens
ttgtcctgccaagattagagagcattactttctaagagagcaatattttccattctactcttcatccataaagccaggaaatgggaagtagcagcagcgtttgtctggggtatgggaagagaagaattattgaagacttcattggccaacactgacagagttgagtcagcctttaaactcaatacctggtacagtgcctggcccatgggtggtgcttaataaatgtttcttgaaagaatatttgtgagtgaaatgcacccacacaatagttttaaagtacctttaattgatgtcatgctcctttacaaaatactgatgggcagggcttttgtatgtgggtcaattctcagattttaattttgacttaccttgtatttgtgcttttccaccttataaccttccactttgcctttcaactgcacacaggtcttctttgatgtgaggattggagacaaagatgttggcagaattgtgattggcctctttggaaaagttgtgcccaagacagtggaaaattttgttgctctagcaacaggagaggtatgtctcaattttatttcctttaaattgggtcttctttctttgaagccaaatataaagatgtcatctgagaaaataagtattaaattagtatgtcagatgaaccttaccacatttgactttattttccaattaaatatgtattatttgggcactcagtgcccttaggcttctggaaattgggagaaaatcatcatcaagtgaaaatatggtttgctctcttttaacttattcacattaatactctacttccataacatatttattttttggtcagctaatgataaatttctctcagtaaaccatagctgggatagaatcaagttctgtaggcattttgtttaattttctcagtttgtcctttctagatcaacactgagtttatctttcagtatggcctctgttacttgttattcaactgaagtaatctctttagaaaggatatggatataaaggaagcaagtttcatcgtgtcatcaaggatttcatgattcaaggaggtgacatcaccactggagatggcactgggggtaacgtctttgcatttttcctttcccatttaccaaaccgaaatctaaggttaagccagtatatgaacccagtctgttgaaatccagagctaaggaacacagttgtaaagacgactgtacctctttgagaaggatggagttttggggactcatctagcagcatctcgacaggtatgagggaggcgtccttattttaagcaggattgttttggtgtttattgtctttccgtaattgagatgtattcattttgcagttattaaaataccagactactagtcagtagccatacagaaaaatatctttcataggaaggaaaaggtgtggaacatgaagctgcgttcccctgggatggcagcgtgcggcagaggtgggcgttgcaggaggaagacgggcctcatgccaggagattgagactagagttagcagcagggtcacagcgcactttcctccttctttcaaaatctttcatcatattgacaaaacagtgaaaaacaagtccaaga

SEQ ID NO: 117211 - DNA, 1744 bp, Homo sapiens
ccaatgccgagtaattttcaaatgactttcaagggcagccttgagggaaaaaacaagtgactgaggtgctcaccccaaagtctagcatggaatccaatatcacctttcccaggaagcccacacttatctccacagataatcaccaccccttaccatgacaccttatctgtacttgtcttataaaatctgacttctcattatattatagcattcatatatgtgttttctgttggactgaagctccttgagggtaggagctttgtagccccaccccacccctggcccagcactgggttttgttcccagaggcactcagcaacatcagagatgaatccagtggtgagagggtttagagtgagagtgtttgctggcagctgtctcacctcctgtctaggaatgtgtgtgcccaggtcctccttgagtatcatttgacattgaatcttttaacatttcttgactgcctcctcctgctgacctttagctggccactggggaactaaaaacactgtttctactccttagggtttccctggctcgacccggagagccctattaacaataaaccagtttagctagaggcagccttgaaattctggctctcacactcatagtagggaaaccttggtaaatcacttaacctccctaattcccacttttctcatttgtaaattagtgataatagttcctgtcccacctttcccagtgtggtgaggatgaattatataagatgatgtgggttacccacactgagaccaccactaagtcatgtttgcttccttccctctttcttcctgctcctcctccagtgtctgcccctttgtttaaacgcctctcctggctgggcgctgtggctcatgcctgtaatcccagcactttgggaggccaagatgggcggatcacttacggtcaggagttcgagaccagcctggccaatatggcgaaaccccgtctctagtaaaaatacaaaaattagccaggtgtggtggtacacacctgtaatcccagctactctggaggctgaggcacaagagtcacttgaacctgggaggcaggggttgcagtgagccaagattgtgccactgcactccagcctagacgacagaatgagattctgtctcagtaaataagtaaataaataaatgccttttctgtctccctcgtacatttccttctgccaccaccccagtgcaggccattatgaccttattcttcaactggtataagagccccagattctctttctctccgtttgagtaacattcccagagcctcgcttgaccttattctttgtcttctctcttttgcctaacaaaactcatgcttacgtcagcatctctcctctgccttctggaactggtgggcagcttctttcctggccccccacccactctaacccctagttgtggtcagaagggcagctttgcttctctgcacacaggtcacatttcctgcctaggtgcattggttccagaaagaagtctgccaggcaaggctcacccccatccttgtttggggagatggctcccctcctcccaggcctgcctcccttcaagccttcctccttagcctcaccgttcctgcaggcctgggcatacagtgtttggggggcatttgtcacacactgccctgtactgtggttatgggtttgcctatcctatctctttattttaaactgccttaggacagggactctcttatacagtttgtgccctcacattgccttttacataaccttgcataaata

SEQ ID NO: 117212 - DNA, 1493 bp, Homo sapiens
ggaggctgctcccaaggcggcagcaatcacaccgggaccggctgcagagttcccagtcccgcggagcgctagctgccgggcggacgcggaagcccgagagtcctggtcttcccgtccaagtttaatccgcgcctacgcggtaaattcctggaggtgctcccagcctagcccgctgcgcccggctccgcgcctgggcaacccgggctccctcccgtccctggcgccctccgcacccgcctaaggcgcggcggtcgagccctggctgcgccctgtgggcgcgctcctccgaatcccaagttcgggtcgcgagtctgaacttgggaggaacgcgccccgggtccccgcccttcccggactgcccgatccccatcccccgcaaccgggagcgcgcaggcgcagccggccggcagtcccgtcagctgtcccagagcctgtgtcgcgcccgtgccggtagcgcccgtgccggtagcgccgctgccaccgctcaccatgggcccgggtcctcggctgctgctacctctcgtgctttgcgtggggctcggcgcacttgtgttttcttcgggggccgagggcttccgcaagcgaggcccctcggtgacggccaaggtgaccgagagcggcgggctgcaacttcccctgttgcgggcggggccctgggggcgctttggatactgggacctcggtgtcagggcgggcgaggtggaggcttcccgggcgcagggggactggaggcggccgcgggactgggtgggagggggctgctcgcgtgctgggaggccggcgctccgggggagaccctgggggagctgggctgaggccagcctacctccgccgcagtctgcttggacttcttgtcccgggtcggtagtccgaggtgaccagcctgggggtaggagaggcttccggaaccggcgggcccgttctccaggaaagagactgcccaagtacttccttcagcgtggcctgggctcgggagcagaacgagaggaatgcggggaggggggcgggacccgcacaggagaggcgctcggagcccagggcttgcagccgcccgcccgctgcgtggtctccacgctggccgcggtggcttcaggcaggcattaaagcgcctggttcagatgagagactaccctccgcctcttttggggaaccgtcgtccttcccgggaaggggaggtgcgccttcaacttcggcgggcgggcggcccctgctgtgggctacgcgaggccgggcgaaggcggcacctgtagacctggggcagcctccactgcggggaaagggggcggggggctgccagaaagtgcgtctttaaggcttcctcgtacttaactccgcttcagttcttttttcagcgtatttaaccaagggtagacgataatgggagaatgcagggagagggaggggataatttggtgcccatgatcaccacttctagaaaacccactggcaatagtgtcttcgaagctgaagctggagggggcgggctgcagctg

SEQ ID NO: 117213 - DNA, 1034 bp, Homo sapiens
caaaatttctgctacaataaagagttaaatagtactccataagacgtgttgcacgaggcatatggagatttcaagtgtgcatcgcagtgtgagcattaacttaaatgtgtcattttatagttctctagtgcagaactatttggtgtacgattgtatgtaacatgcaaatcccatcagttcacactactattatttgtaggattattttaacaaaataatagttccatttcctgtttggtataaaactaaggctttatttttaaaagtggaggaagatgttaatacaaatttctctgtggtttattttccaaaattgatactttctcatatgtagcatgttgttgttgttgttgtttccaaaatccatctttcactgacacgacaagggatgctgagtagctcttcacatttgctagccacagtctgagattatttgcaaggcaggattctctgatgccaagggctgaggtctagtttactgatccccttccatctcagcaaaagtgtatatgagagagaagagagagaaaagccagaataggagggaagctggaaactgtggtgcttactcgttcatctcaggatatggatacaaacgtggtaataatgaaagctgccctttgtttacaatacacacagtttgtggcagcaatctttataagcccccaaatggcacttaataaataaaagaagatacaggttttcttgattagttagatataaatgtttactcaagctttcatgagagttttctttatttttacagagctctctctgctcaaatgaacgcgtgaacgaatgtctgtttttttaatgtgaactcactatatacaaaataagttttcgcaggatccaaattcatttcatttgtaaattatttaatagatgtcaagaattcttgttgactgctttaattaaagatagatttttaaagactggatttaagcaatttttaaatgggtagattgtgtcaaagaattttgcagtctgtgaaatacattaacactgatactaaaaagagagagagagagaga

SEQ ID NO: 117214 - DNA, 1267 bp, Homo sapiens
taataataaaagtttgctttaaattcatagatgcagaaagtagactagcggtttccaggggctggaaggaactaggggaaaagaggaagggggaattactgttcaataggtccagagtttctgtttgggatgtgaaaaagctctggatatggataatggaaatagttgcacagcattgtgaataattccactgaatagtacacttaaaaataattaagatggtgcattttatgttctgtatattttaccacaatttaaaagtttgcttcaaactgtgcctcaaatctgcctacccagtgttcttatgctgaaagttttctgcacaagagtcacttgtcaagtcatttctgaagataacatcttgtcatttcttgattgtggaaatggatcaaaaatgcttcattaaatgcttatagcacctttaccaaaatctgaaatgagtgaaaactaatggctacatttatatcctgagttctaaagataaattggagactccttgaaacttagaattgtaatgccttcatgttttataagattatgtcttgttattcttaatgacaatttagaaaaaaaaatggtttttaaaatttaacagatagtccagaccatggatgtaaattggagagagaattaaaaaaaaaaaaaaaacccaacacatattactagtaccctaaagtaggcttagtatctttttttggaggtaggttctcttactgttggttcatggtcttattaacgaataaagtggtttgtgtaagagtgttaaagtctggctgagtaattttaaattatgacttgaaaatttaaatccatctttgacgtttgtgttttggcaattgtattaacagcatatcccttggagcctagacgtttcgtcgtacactttttctgccacttgttctagtgtacaatcatgcttcttcctagctaatgcgccctctgcttctaggtctcggagacacgcaatccatccatattggcataaatggggaaacagagacagaattactgaagcacctaaatgttctactgaaaccaaaagaactagattgctcactgattttgttacataacctctgtttggcatcaaattagaatctgctgttgttaggaatgtaaccgtagaaaggctgctatatacttaattcccattttatttgcttctctgggggttgtcttagtgttttcatttgaaatgtttttacagatgtaggctcttcagatatgaagttgctgaagtggagactcctcagaagtttagctttca

SEQ ID NO: 117215 - DNA, 1092 bp, Homo sapiens
caaatataataaagttaaaattaagtatatactttaggaagttaccaataacttccatcaaagcagagtaggatatatggtaacattaattttcggtcatttcaaatgaggtatatttcttattagggaaattaaagtccctatatttattatatattttttccttattaacagagtattaatctagtaaaaaataacccagcagtaaataataaagaaattactgaatgagaggataatgaatctgaatcatagcaggaatttgcaatattaattatggttagctatttttctctcattgatttttgtgccacttgaatggaacagaagcaagccttatgttttggaaggtctgcggtaaaatgctgtgactgtttactttcaattgcattgtgtgttgcctgtgactgctttcaaacgctagagggggcctctgatttaaagaaataaaaaggacttttctaaaatggatgtgtagtttattttgccttttgtaaagctcttttggctattgtaacttaacaaataaaatcataattgtgtgcatctctgagttcttgagcagcctgttacttctgtttctaaacagagtgggcatagtgttcgggttttcctatttcaaatgactgtctttttttctcaagtgtttacatactattttttgtcttacaactaggggagtctgaaatattaacactgttttgtagtccttttagcaatacccattccatttgtaagtggcatcgaatgtttttacactgattttgcctaggagttaatgagtatgaccacagtagataaatcagtgagtgggtgcaggcatgggtgggtgaataagtttcctagtaacaggaaaatatcaaatattttagggtaaaatcagatttacctttaaaatttctgtggtttttcatggagaaagtctagtttccatgtttaatgcgggcatgtactgcataggaggggtgtgtaatctaccaggtatatctaataccatgtctgtataaacataggagttcccttgcagataaatcctagtaatttctatctggacccgaattcctgttgcttcaagcagatgtgggggtttga

SEQ ID NO: 117216 - DNA, 1038 bp, Homo sapiens
tatcaagagtagaaatagggagattggaaaccggtgaattttaatctatgctttgagttttcctagcctctgaatggactgtaggtcctgagctgagtttttctttcaggagtatataacttggcttatggtctattacctcagtcatgaccaagaaaacctgaagaaaaatataagtacaaaggtttccagaagtttaaatctacttacagtaagggctcttaagaacccaagtctttgaatgccttgaaattatatcaaaattttagttgtgtatattttttctgggaattgggtccatatatttctttagaatcacagagacatctatatcttaaaaaaaataagttaggaatcgttgatttggggataggaatgaattagaagaatgaggtttgtgtctcagatttacttagctacaggattgtattaagaataaagaaattatatctataactatacatgtgttttaagttagtgtgttttaagttagtgtgactatgcaaatacaaattattttaataattatggcagaacagatataacctatccacaattttttctgatggtgcattgagtataagtaatccctctaggttcatctctggcctaaccctcattcttgggctcatctaatatactagaccttctctccaagacccatggacatgattgcttgtataattgaatactatcctcttatcccacagtgataaaaatatttttttcttttcttctgaggtatggcctcttgttaaattaccaagtagtaggtatacatctttggggcataagtagaagagatcatcttcaataatctcagcagtattattcaacttaagatgcttgagtctagttgtgaaatgtcaacacatttaaatccaagcactagggatttgtaaagcagaaaagaccttgactccatgtagtcatatattactgcagaagatgttctgcacttttgtgaagggaatttgaccatctgtttttcctttcattttattttcatatatttatgggaaaaactagacttgatat

SEQ ID NO: 117217 - DNA, 1059 bp, Homo sapiens
tttttatgcttagtttatttgcattctagtaataagagaaatagttcactaactactaaaaagtggtaaaattcatagtaatttagactattaatcatattattgcactgagattcaaatatactttaagttggatctttttctaactattttgtatgaaattgtgcatatttcaggtcatttccaacttaaatctttttctgataagtcttctttaagcaaatatagatattcttcatgtagcactgaaccaaattcagttaaggaccaaatttagttaagatccaaatttcatgagagaattgtctctgttcctatttcctctcctcatactcagtaaaactgattggtatcatcaacactgttgtccttgtttttgtattttctcttctcaacttccacatcaccactctcccttgtttttctctacctttctggccaccctcaggctcttttgcaggcttgtcttcctttagccgttacatgttggacttcctccaagctcaggacttactttctgcaaaaacaatcttattcgtgatttcatgcccatgatttcagagacagtctacatctgggactttcacatgcagggtcatatccaagaccttacctttgccctctagacccatatatctgattggctttttggcatctctgttcagatgtcttaaaggcatttaaaacccactgtggtccttctctccatacttgaccttctacctgtaaatgttctttgtttcagtgatgggcccctctaatctgctcctcatgttgtagccagaatgatatttttgaaattgggaatcttgatactctcctctttaaaacctttcagcattgtcttgttgctcataggaaaaagatcagaatcattgccttgtcctgcaggcctctgcatagatcagagcctgtctctctgacttcatctcccactcttgtgcctgtgctgtgtactctctgcccgtgcttgtctgccctcaagttctcaggcatgccatgctcacttcaaccacaggatcttcatgtttgctgcattatctgggcctggtgtactct

SEQ ID NO: 117218 - DNA, 1505 bp, Homo sapiens
ggttcttgttctgccctctggagcaactgagatatactctgtcttacatatgactgcctgtcagatagctgaagatagtcattacccacagagaaggaagacatcagttctacataaggaagtgttctgtagataagatcatgctttcactttggtgaagattagtggatattgccaggtagactcaaagggtattccggacacagccccttgaggaaaaggcaaagaagtttgaaatacactctgcattaagaaaattatatgtagtttgatgttggaagaggggaggaaagagtgtgcctcaagaaataaggtaagagaggttgataccctggagaataaatgatctcgtaaatccattatgtagagtttagactagatactgtaggcttttcttagccaggccttcctgagagaatgaagcccttaataccctaagtgatccattattggtaataaattaactttatcctatgcatctaaaatggtagttatgtaccattttaggagaggatggagaaaataattaaatcattttctgtgttttgtggttcagatgataaaccctggttgagaacggtagaaatatcagaaattttttaaatgaagatttttatataaaataattaggttttcattctataacaataattctgatggaggtacagtggctagaatagaggaatgtgaaactaaagtccaggagaccaggaaagcaatatgtataaaaaacgaaagccaaaaactaatagtagtgaaaggttatggagaaaagatgggtggtaaagagatgattttaaggaggtttaggacctcaagcgctaagacgtcctcacggctgctcacaatcctactgctttccctagtcaattcattttctcactcgccagaacagttagtttttgtcttaacaaacaatccttcctcatccttacccggtttatctctgtctttgaaacacttcctctatttggcttctttgactatattttttttttggactacacttttctactgttgtgttccgctgtcttcactggtctctctttcctaattttcatgctagattctcctcatgttggctttattggcttgtcccacagcccagtcctcaaataccatcctttcttctctctgtatactcactccttggatgatgtcattcactctcttggcattatatacaccaagacacccaccacacgcacccccatccctgacttcttccctggactccacacttggctatttagttgcttacactacatatgcgtttcaaatttagcagtcttttgtttccatcctctgtaaatttagattaagtctaacatactagaggatgtggaaatcataatatgtgaataacagttaaaatttgtgtttatcttggagaagaaaaaagaccaagaggaggaaatatgaccatcaccagtctcaaattcataaaagcacatttttttctttgaattggcggatgtaatttgtgactttcctattcttaggtc

SEQ ID NO: 117219 - DNA, 1045 bp, Homo sapiens
taaaaatttaaaatttaacttaacattatatatcatatgccctttatcattaaagataagactaaaaaaaagagaaacaaggctcagtgaaattttagctctaaaagtattgaaatgtctttccttattcctcaccattcatggccattttgtttcaactcctattattgaagaatctttcttaaaaattagcatttttttgtcgtaagtagaagataataaaatcactaataattgaagctattttaatgctgcccgtttgttatgaatattaacttttattgccatactttgtagacagaaagttttaggagatttacttaagtgagaaccttagatactctcaggagtttctgtcagatacagtagtgcttcatttaactttattcatttcttctgaaatctgtgagattagaagaagaaaatacaaaagttggttaattaagagttctaattgtgtgagaaccattcattcaagttttgtttgaccagagtatatttgatttagacaaaaccatggttttgtattactagcattttattttcttctaatattttatcttgttctcatttggttaatgacaaatgctgcatgcagttgtatgatacaaagaggtgctcattatgctcatactaacatataattatcctagaagcattgcttatgtgccaattaggcctagaggcattgcttatgtctagtaaaatatttatgagtatgtacatcccaggaaaagtagaaaaaagaattcagaataaccaatataatcaagagtaggggaattgttaagtatattttactacataaattcatttgtatattttacaggcagtaaaaaaaaaatcacatttttaaattaatgttatgatgtgagaaaatgcccctgatgtaaataggaaaacaagacaaaactgtatgaagtcagcatgcatgtgtgcatgtatatctatatataaataaaacaggagggaaataaactacatattagcaataattacctgtgggcagtaagattttaaatttcacctttataccttttaaagc

SEQ ID NO: 117220 - DNA, 1084 bp, Homo sapiens
tgttctatattaagaattttatataatatatatgtcagttaagtagttttacacaataatttgtttttaatgatgttacatttttatagtcttttgtgcccgagatataaattaaatataatacaataatgtatttagtttggggtagttagcatctcctcataaattttttgggaacaagcattagcatttgcaaaagttgaggaaataaattgttacagtccacttaacactcttcatagaattcatttgatacggactaatagttcggtctttgaatcattttaaggcactttaaaaatgctggccacttaactttttctgttgataaattttcataccatgctctgtattggtatgaaattgtagtttgcagctgtgtcatggaattggttaggtaacactggtatttgaaaagtttcttatctgcatgacttcctttatttatttttcttttaatcactaaatcctgtagtgtggtggtaagcatagggagctgaaactctagggcatttaactttcctcggaaatgacatgatttaaatggatatataattatataggaattgggtgactacatagaattcttcttgttggaaagcagtttttactaatagtgtttaaattttagttctcatatatgaataacaagatacaggattaaatttaaatgaacattataatatctttatatttggctttaaatacaaattaagttcagcagtagtcaggcattcttccatttaatctagcatggctttgtgatgaaagggagaaacagtgttgttatgtcactctcttgattcatccataatacattcgaattgtttgcatccttgcaagattaccataattaccagattaccatgaatgcatccttttggagttgactaagggctttttatcccataaaaaatcaggatactattgtataaaataaaccaggtttacaaataaatttaggaagcatttcttgaatatttatatatggcagaaactgcctgtgtccctgggagtgcagagataaaaaaggtaggacatgtgccgtcaaggaacttcttacacagatgacagattgctatgt

SEQ ID NO: 117221 - DNA, 1033 bp, Homo sapiens
ttaagtttatgatatttaggagaaaggagaaagtataaagccctattttgatttttccctttcatattagattcacctctgctgtggagaccagtcacttggaagtacagaaatacctttaactggattacttaaaaagggcagtacagaaatcaaccagcacccagtcacagtcgaaggtgcttttacccttgaccctccaaacagagccaaacagaagcttgcacctattcctgtggagctagccccaactgtgggagtgtctgtggctctgcagagagaaggcatagactcccaggcaagtagtggccctccttcattcccctggcttcactagtcccatgcatgattacttacaaaagttgaatttcagaagagttaccttcataaggatatatttattaatcttaattagtgacctttgttatatgatacctcctttctgaaaagtgctgtgacttctgttatggtttataagtgattctacccagagccctcttagcctttgagacagtctttttgtgtagtggaaacccacttatggtctcccccacccccaactccagaaaaggaactccagtgaaagagaacatttttagacctagtttctgggaatctgcattactgatatctttttggttaatgcaacctgagccaaaataaaatccttggttccttagtgctttgtagtcctcatactctctttagtcagttttcatgacacagatgatcatttatttggccgtgtattttttttattgtatctattcccagaaatcaactttatcttgttctttcaaaaagctgatctttatgcaggttgtgaattaaagatagaagaaccgaaatgagtgtttaaaagatacatatacatatatttttagtggggagtggaataaaggagagaaggaaagtcatactagacatgtgttttttctctttaggagtatagttctccattgtactgccttggtaggaataaccattcccggggacacctatgcctgacttcttttctcaaatatcccttctt

SEQ ID NO: 117222 - DNA, 1094 bp, Homo sapiens
actacacatgtaagggatctaggttgcgtgctccttatgagaatccaatgcctaatgatctgaggtagaacagtttcctcctgtaactattccccctataccctcctgtttgtggaagaattgtcttccacgaaaccagtccctggtgccaaaatggttagggactggtgtcttagataactttcatgttaatgtgttattatttagcagccatggtgtatgataattatatgtaagccatctcctattgatcaacacattaaatgtttatagcttattgtttaacagtatgctagtgaacattaaaggtctgttagaaaatatattttgtaggacaagaatcccatctcttagtcatatgtagccatgaaactagcaactctgaaaagtaacactcatagtacaaaaggtatttttttggtgttattttcataggcctctaaatttcgacagaatagctaaaaactttatcggagacctcaactaagatgttatatgttagatagcctggattaaatttctttaaaacctttcctcattcataacatagagcctctgatggctgaggaagtatgagatgaaataaaatatgtgaaaataaggaaagctcagtttgaaatatttaatctctttcttctaagtagaactttcacatattctttcatggaccagttgaatgcaatgaaaactttaaaacaacataaatctataaagtcttttagactctgcttttctaagacgactcttttttaaaaaaatagtaatttggtagtaatttggcagaaattcagaaattttatttgagcggttaagacatcaaataaaaaaacattttagcaaatgtttttggaatgtaatagatacactaagcatgttcagtagtttagaaagtaataactgttttctttttcctgaaatgtttagttaattccatgtaccatgaaacttccagaaagacagcctgagtttttcttttactactctttactgggaaatgatgttacaaatgaacccttcaatgatttaatcaacccaaactttgagccagagagagcatcagttcgcatccgtagcagtgtagaaattcttcgtgt

SEQ ID NO: 117223 - DNA, 2490 bp, Homo sapiens
tatatgtatatgtatgtatttatgtgtatatatatgtatatatatgatatctgaattgatgctgctctatatatatgtatatagacgcttcagtatatatattgtcaattcagattgacaccttcaattccattccagcaccgcaagattctagttttcatcttcaccctatttgtaactcccttccctgtcagtgagaacatgtcatacttattttaacttctaagctctattggccttattgtatgacggctgcctttattaaagtgcttaatgggtcagagtctgtgctaaatgctttgctttcattatttgatttgatctttcaacaactctataaaagctttctagaaaaaaaaaaatggagactaaaagagatggatatgggttccctgtgcaacaagtcaaggacagaactgggattggaaccttggtctatgcgacttagatatctgtgctcttaattattatactgttttcagccactgctactgtaagcacaactctttaggattaactcctagaagaaggattgctcgtttatagggtatgcacatgtaaaattttgataggccctgatatatcaccctctaattggttattctagcatgtacctgccaacattgagagcattcactttcctgcgttctcctcaacattggatattatcaattattttagttgtgtatgttttttgttttttaaatcaatttgaaaaaccttgtccctcttcagtctcctcatactaaagcctatttgattatgtcagttttcttctcaaaactagtttcatgattttctcttattcttagaaaactatccaaaaatgtttctggatagcatacagaaggactgtatgatatggcctctgcttatccagccccacctccctctgtatgtcggttctcactctgtgatctggcaccctatgcctgtgtcagttttctcacacatgctttctcttgcttctgtgtttttgtacatactgtcccttctgtctagaacactcttttttttactcccccattccctgttcagctgcccttttcttcttagccatatctagcttattcactttccagtttagattcactgtaaaacctatgttagatgccttttctatgtggtttattaccttaaggttttaaaaatgttactccagaattttacttttacatacagaaagacaatgctggttaagtaaggtttctttggtgagtatgtaagagagtaaaggaaaccttattagatattaactgtattcatgaaaattaccaagcaaattacaaaatataatcagttttaaaaatcttataatggtttatgacaaactacaatgtagtttaatcgtgtttttctctgtaaagtacctgccatcctggctggacttgaccccagggacattgtggctgtgctgaatgaagagggaggctaccatcagattggaccagcagaatactgtactgactcctttattatgtcagtgaccatagcatttgctacccagttggaacaggtgagacttttcatgagattggtgacttacgaataatttgaaaactatgtaaaacattttacctttcaggtattaaaaagacttgcaagtagactttttttttttaacttttgaaaaatgagttcaaaacatgttttctttcatactggaaagaaaacttcttaatttagaaaaaatagattttgatgatcttgattgtaagagaataaatctctcaggatttaggagaatggccatcagttaacattgttttccattgtactgtgtggcattgtaaggactgacatggaaggatttttaaatttgtgaacgatttactttttggagaaacttacaatgtcaggaatactttctgccactaatacttaatgcctatagagttttgggttctattttatcttgtttataaactaataaattaagctgttactgtcatggatgctagcagaagacacaggttcttggatcagaaacaaaagaatttattacccttagtagcagagcaagaacatgaatattggtatatttccttcagttgcccttaccccaggtcccatggggactacacagaggggcccaggtggttgctctacacatagtgggttttatcacagctgaggaaactgaatttggggaacctgccactttcattgtaagcagtaagcaggcctagtctttgtccaggaagacacattaccttatctctcaagctgcttaaacaaccctgggaaatgggctgagtaaaagagtggtctgggccttgcagtcttgccatactctgcaagaatgtccagggatgctcagggctcatggtagattgccttcccaacagcggctcaacacaaaactagctgttattccactgtccctctcaagtccacttccctttttttttccctcctctgccatcaacttggttttacagatctacttttcttgacattatgttgttctgtagtagctgaaatgaatta

SEQ ID NO: 117224 - DNA, 1011 bp, Homo sapiens
tgactagccgtagccccagagaatctagagaaaacgattttcatccaaagcagcacgtcgatggcttttatatatgagctgaacgtggtcctgagaagcgcgttctgatcagcggttcccaataatagcacttgtaagagctttgacttgaatacaggcttcctgcgattccagaagtgttccggaggcaattccctttacacgtcttgctggaggactcaggggactacagttcttaagagggtgtattatacattccttaaaaggtgtgttttggatgaatgacattggtttattgggactcattgagtgtcagacactgtgctgggaatgtaagaatgaaacagtcctgattctaaaaagctaaggatgtagcaaggagagtgtgtcagcaaataattcatcaggatgtggaagaccctaatgaatgaccacctctgtctaaggaaactgcggaagtttcactagaggaggtggcattttttggggtcctacagatgattaggaatttgtcaggtgaaaaaaggaagggcattccaggcaaagagaagagcagggagcacttaaagtatggaaaagcaagacacgttttgccttgcttaattaaattcactcagtaaacattggttaaattcagtgtggttggagaacagatttgcaagaaagtggagggcataggagataacaggtgaattgaggacactttacgaatagtatgttaagaaggagtcatcttgagccagagcagaagcctggctgcattttttcccccatgggagagtgttttataaaggcctggcactgtgtgagggatgagagcaaaggaaacattgtaatcctaatctttgaattttggaacaagagactgaccagaaaagccataaagatttggagcactattaactgttagtttacttattgtttaaaaacataggactgaaataaccttaaaatttggttaacaacagtttttagacttataactgaccatgctatgaggaaacaaatacc

SEQ ID NO: 117225 - DNA, 1242 bp, Homo sapiens
ttttttgagctgtacttagtgtattttgtaattatttacaaactttgctccagttgtatcttaggataaattgtcttattcttttgtatagttaacctttatagttgcacaaaagataaaagataaaaattacctttatggacattggaagaaagatgttatcaaatacattgtgtggctttgacatacattcttagcagaatgtacagacacttctgctttatgtgaactggcatttctgaatatgcattaaatagaagtaattattgaaatgggagacagaaaggttaattttaatgttgttatgaatgacatttttttggggatcttgagaaacgattgtctttactgatgatttattatagtcatccacccccttctgccattcatcagcttaaacattagtgtgttatgtaattattgacattttcatcattagatttagcaagcatttacaatatattaacaaaatcttcagtacatgaaaggcatttattacttccttgaaaataaaggactggaattagtggaatcaaggaatagtttaattcaaccaggaccacctttactctgtggcaaggatggaacagtgggtagaatatgaagatgaatgagactcagtactgccttcaagggagaagcagacatacacagaggtaattcacagattcctgtgggttttgttggaggtgtattggaagcatggggtgtgtgtgtgtgagatactaatttttgactgggaaattttgaatggatgtagagctggtaacactccatctgggccttaacatagtttaataggcaaaatggggactgagggggtgatggtgggggtagttttctcggtgaagggaacagcctgaggaaaggcatgtgattgtgttatagggcttgttgaactggacataaggctgttttgccaggaggtctttgtgggagaagctatgaaagtaggtggagatcaggccatggaagttcagcttgtatttaaagatgagtcagtttgaggcatgaaggtccaaatgtacagatcgtaggctgacagtaggtaggcaaataacgatagtaagtttaaggaaacaagttataataaaatagtcaattttctatcattggcactactgaaggaaagcagaaaagtatataatccaaaacaatctatatatagtttcgttaaatttctttatttgcatttaaatatgggtgtgtctggtaatctagtaattggttatacatgaaatc

SEQ ID NO: 117226 - DNA, 1628 bp, Homo sapiens
agagttaccctgttattctgccattatattcttcatcaaaatggaggaaattcatatgaagtgccaaggactatgtgatgcctgccacatagtaggcactgtgtaaatcttctgtccttcatttcagaagttgccgataagaattttagagggtggattggtgggtagacaagcaaagactctcgggaacaccctattacaggaaaatctctcatacctgacctctgcttaacccactcgtgagattaaatgatagtcttcattctctctgtagaatttgctgactgatgctcatgctacattgaatgacagtagactattctttagttttatcttgaacttttattccccccagttactgtagacttaccaagaaacatttgtgtttgtacccaacacactgttatggcacttgatgttgtaatcacatagtttaatgaattattattcagtgaactctgaagataaaaaggcgtttgtatgagaaccaattggctactttgaaatcaagtgagtagccaaaatcaattatggttgaaatagatgagggttaaataattttaaatgattagggaaaaaaaaacaaaaaacacctaacgatctaaaaaaatctgcaataatattatttttcacgtttgtaaaatgtctttctgtgtttaagaaacagaaactggaaatcacaggtgttgttttatgggggtagtttttgcaagaaaaaggaaatagaactttcttcgatagacccacactggaagaaaaggccatagctctgtattataagattgtcttgtgaatggacatttttgttttagttgtaataaaatgtatagagtttgtagatgttgagaaatgatttcctttttaggctaacttcagaaccatttattaattgtaatatattaaagaagtctgcttctaaaacatcatctttcctagtttacactactgcttagagatttatttaataacatcctctttaagaaaaaaaaaaaaaaaaaggaagatcctgttattcccagaggttcattccttagagtgaattgtttatctagtcaggtgatcaatctatggttctcacatatttcccagtatggtccctaatctgatttcataagctacctttcaacttttatgtactgtcagggttgaaggggtaagccttcttatagttccaacatctccatccaattaggaatgctggggtagaggagattgttctttgaaggaggaaatgtgacacccttgatatataccaggagcacttgagcctcctatctcacctagctcagtccaaatggaaaggagaactttcagttgaaggagcaggaagtccaggttggagaaggagtggtatatgtggtatgctatttattttggtgtaaccacattgcttgctgaattacagtagatgctgaaatggcacattgaagtatgaaggtagggtgggtggctccaagctagtacttgagagctctggtctgcccctctgtgattttcttggctgtttgtcttctgtgtgttggagtcatcctaaggccagcagcaagatcacatctagacatgcactggccagaggatggaatggatctctctctctctttctgtctgtgtctctggaaaagcaaata

SEQ ID NO: 117227 - DNA, 1244 bp, Homo sapiens
tttaataaaattctaatttggagtacaaaaatagtctagtattgttttggagatgaaactagtaggtgtcagttttagatgaccttgaaaaaaagtgtttatagatgcatattttttacaaaacattattttcttttctacatttattttagggaatctgacaacagtctgactctccctactccaaaaatgtaaatctttaaatcttaaagatgtggaatcttgtgatgccagtttttattttaaaaaaaggatctttactgagtactttttctgtcatacgagtatcaggatatattgttgctgatgtgtctttatataattgagattctgcaaatgtttgtagttaataaagtatcaaaatataatcagctccttaagataattgttttgagtattttctgatatctattgaaagtcgataactagaatgcatattgtgagtttgcttattattgtatgctttgctgtttaccttaatacctactaatgaaggtggtttttttaagactgaaaaagaaatcctgagcatttgggaatgagaatatccaataagctaaaattaattttactatacacacttgtttaaaaatttccagttgaaaattagtaatttttcttctgtgacagagtaaatgaaagaagaaaaatggacaattttaaagatagttcatgcagtccttgctatgggctgggaatgctaacatttaactaaatagatgagaggagggaaggatttgtggagaaagtttttactagtggttcttggcccgagttcatattacagttttcttgggagcttaaaaaaaaaagacagatgttgggattctacccatgctaatttatattccataaataatcagtagggcctggaaagggctagggcattgatatattttaggatttctacagacgattccagtgtcctgcagggttgaaaataactaatttctccttctttttacactctcagccctttaaaaaaatggctttcttttattttccaactgtctttttaaaatttgaggtggaggtatgaagatgacacagaagaaaatgcaaagaaaatattagcaagagaatcaagttaaagtagtggcttctgctcatagcttcatacagttcctcagattcgttccaggacccctcatggctatcaaaatccaaggatgggctgggtgctgtggctcaccccagcacttagggaggcagaggcaggcggatcacgaggtcaggagattgag

SEQ ID NO: 117228 - DNA, 1024 bp, Homo sapiens
ctgaagcttggaaagtttgttatggggaaatttatcaaatataaattaaggcatcaattcagttgtttctggaaatcttaggagacctaagtgatatctctaaagttattataaattataagaggggaagaagtgttactaataaaaagttattcattttaggttatatttatcatatttacaatatcattgagctgtattttttatggaacatcaggatggaagggacttcaaagattatttagtataactgcacttctgctttcttcttttttataccactgttgatgaggaacggtctctgtttattcccgctcagtgaaaaaattttaccttagttatagtatattgtgtttattgcatatagtttatattgtttatattgcatatagtctggaaatatatacacataaatacactatgataatagggttttatagggttattgtatcttgatatttaggacaaaattagggtccttttagtgactgatttgatgttgcttcctgggtcaggaacaccctcagcagttacagtgtttttttctgtgacaaaatgagagcaagccattttaggatgagttcaatatattcaattcaatgaacattttttgtgtggtggcaaaattggatttggcagttctataaattgcaagggttagatttctgaaaactgccctgataggagaatgtggtacagaaatttagcaccgggtagagtttagaggacgtgttatgtgaaccagtaggagacttttagaattattctggattcaccaaaatgccacaataaaattggtacatgataaagagtaatgagtaccgttctataggacctaattccttttcaacagttctaacatccacagcactctgaaacccaaaactttttctgtgtgtttggtacaaattgattttttcacaaaatctgttctgaactgttctctttatttcatatatttaaaggtttcattgtggaaatagcaaatgtttgattatagtgtgctgtcctaggcttctctgta

SEQ ID NO: 117229 - DNA, 1249 bp, Homo sapiens
tcagattatgtctaatgttttctgtatttagcagctcatttttatctttattagtagatattactatatcaaaattgtaattgtttgtgaaagcaaataaattatttatattcattctcaaagataatttttaaaagctttcttttgaagaattccttttgaatgtagatatttcaataagttagtaaactgagaataattacagatttgaagttgtaaatattttattaccatttattcacacatgtagttttatgctacattaaatgtatatctgttatttttagtagtagatggattaaggtttcagttaaagaggcaatatctcttgtaaaaataaaaatgtagagcagtacaagtaactatgttacaaaaaattgtaagcagggggtatttctgtgagtcttctctcagtagtttttattttaatgggtgcctaatttttaagttttcaagatgcatttttccattctcttcctgtaatttttgaatctaaagcttctgtgagggaaattttcagtttttaccattgactgcatctgcaggtataatacaatattaagattactcttaatttttaagaatatttaggtatttttagcaactggtgtaatagtaaggtatttttagcaacgggtataattttaatgtacactctgaattttgtagctaattctatttctaatcatatttttgtttttgcctgactactataaagtgcaaaaatacatttgctttgaatgggtactgaaactcatggtatattagtattacatagttttatttctaagatcattttacttctctgctgatttttttatgtaaatcttttcttcatcctttttgtagtgcatgtattacaaactgccctaaataattttttataacaaggttggcttttaaataaagtgctgatattacttaagtttttaggatagattgcttctaagaatatatttataaagcaattcagtgagaaaataacagtattcttttcagtggttcttaacttttttttaagatcacataatcttttgatatcaaacctgttgaaaactgtggttttctctttagaaaattctcaggaagtgtatggatttcatgttaagaactccacagctgtctccactattattgatggcgtctgttttcattaaaagtaagcaaacaaaagcaaaaactgatttgtagaggcacttaatactttgtactgttaaattttttgaaatattcttctcaaatttcacag

SEQ ID NO: 117230 - DNA, 1277 bp, Homo sapiens
tgaacatggggaatatatttttattaaggtattttatttttataattcattctctttctacttttaaattgaaaatcttatgttgacttactggaattttttgagtactttttgtctaattgaggtaattttaagttgggaggtttatattagtgaatgtatgttgatttatgaaacagtataattttgttcctttaatttttaagaagtaattgaatccctgatatctttgtttcgtatctttgttattaaggtatataaataaagggtagtggttaatttaaaagtatactgtggtttgatttcaatgggcatcaatagatagcagtaattcttgcctaagcttttgttatgttatctaatttcccagacatatattttaaaattcttagttgactaatttccttttcttaatattctagctctctatcaatatcagctcacatcattgaaaagataattttgaagacatgttttgctgaaaagacactaagaaaaattttacgaatgggatgaacatgctccagttaattgactacctactgcaatttgaatgttaacattacccatctggtacagttacctagtgatgtacctattttcacaataccctgtttcagtgtgcttgtcttgattaaagaattcaaagtggagtaccgcaaacttgatatggaaaataaaaagaaagacaaggacaaatcagatgatagaatggcacgacctagtggtcgatcgggacacaacactcgaggaactgggtcttcatcgtctggagttttaatggttggacctaactttagagttggaaaaaaaattggatgtggcaattttggagaattacgattaggtaagactattttgtttattccattatgttagaaacattttaaaaattggaagatactttttaatgaaaatgatttagttatttaattgtttagttgtttaatggttgtggtaattttaaagaataaagatgttggaaatttcttttgtagttgtattttcatgtgtaaggaattccctagtataggagtgtctactttagccatccagagattgactatccagattatgagaaaacaaacaattaaattaaaatagcccagtaggctgaaatagctgccagtaaagcctttgcaatgttctttaggaatgatatttaggccactttttcagattcaaaaatgtttagtaattgataacttttggggcataggtatggcttaaagtcaagttaatatactgaaactgcatacaattaatgaaatttacat

SEQ ID NO: 117231 - DNA, 1126 bp, Homo sapiens
gattctataagcagttaggatctggaggtaaagtcttatattaatttttaaatttgaaataaagtggattgtcatgactttttagtttcaaggaatggtattttaagtttggttaaggaaatcactttgcaaggctatgtttactatacgttttcttactatggtcttaggatcccttttttattttatgacaaatttggagctttttatgtttatgctgatatgagtagagaacattgtgaaaaaatttaatttgcaaatataaaatgcatacttcttccatattcttagtctttttggaggcactattatagctgttgaagtgacttacaatatagtggtaggctgaaaaatggccacatagaagttatctgtatcataatccctagaacctctacatgttactgtatgacaaagactttgcaagtatgataaattaaggattttgagatggagagattattctggattatctggtgggggcagagggacatttacacacacagaaaaggagtaggcattgtgactgtggagcagagtggagagaacctggaagaggcttctagtactttcgcctagagtctctagagggagtgtggccttgcgaagacattgattcagaccaatgaaactgatttcagactcttacctccataactgtaaaaaaataaatttctgttgttgtaagccaccaaatttgtagtaatttgttacagcagccgtaggcaactaatatgggtatgtttttagataaactctaaattcaagtgagattatttcatgccactagagaaaattcatggaaaaaatttctattgtttgttacatttcctttatgttaaaaggttctcacagcacttttctgtatacttctattcaattaattgtaagaattttacttgtatagcttcttgtataatacaggtagaggaattttgtttctccagatttaataaaatggaatttcttcatgtatctttttgtaagcatgtttacattctagtgggtagagctgtccatttcatactgatatcagttttacattctgttttttctaagagcacactttgcaaatgagtagtcattgtaggggcaataagttttaaatgttgtagtaatgtgttca

SEQ ID NO: 117232 - DNA, 1034 bp, Homo sapiens
acaaggatcattaacaagaatggcctcagtctgaagttggacaggcagttcctgggcagatgtcctcacagagtaattttttgtaaagttgtggtggcttttgttccaggttgtggtttttgcagtcttttgtggtagttcttcttatcaggcatatatatatatatgtgtgagaaccctcccttcatctccttccctagctctgtttgtcagggttttaatacaagtgactctgttttgattctgacaacttccatataaagtaaattgatcacttacatttcagtttattgggagtctgttagttctgaaaataaaatacagatgacttcatatttggagtttgtattattcagacttcatatttggagtttgtattattctatatagcttcataatgaattattactatctcttactggcttaagatgaaagactttattatctcacaatttctatgggtcaggaatacgggcatggctttgctgggtcttctgtttagagtcttaccatgtggaaattaaggtgtaagcctggactgcaatcttacatgagcctcagtgctctcttccaagttcactgattcttgtcagaattcaattcctcatggcaatagaactgtgtggcccttacttcctcaaggattcctatctggcatgtggctccctccactgcatggtggtttgctactttaaggccagcaggagagtttctctgctgtttccaatatctctgacttctagactatctttttaaagtctcacctgaataggtcaggtccaccaggattctcttccttctgatcaacttacagtcaactgataggagccttaattacatttgccgtataagttagcctggtcacaatagtgagatcccaggaatcatgctcacgttcaaagggaggggtttatacaaggtgtataagccagaggatgggaatcttgacagtggtgatcttagcagtatgcctatcacatggttattaaagccagtagtgactctcttttcagtagaactggaatctctcctat

SEQ ID NO: 117233 - DNA, 1033 bp, Homo sapiens
atcacttgagcccaggagttcaagatcaatctgggcaacatagtgtgactctgtctctacaaaaataaaaataaaaaaaaaaataagccaggtgtggtggtgtgcttgtgtagtcccaactgctgaggaggttgaggcaagaggattgcttgagcccggaggttaaaggttgaagctgcaatgagctatgcgttccatcctgggtggcagagtgagaccctgtccctgcccccacacacaaaacatcaaaaaaccaaccaactgcccccaaacaaaacaaagaatatttcatgactttgcaaatgctcatatcattaattaagaatatatagacatagaatattgtacattatatgctgcaaagtttgttaaacaaactagaatggcctgtgtagccatatgtttacattgcattgttaaccatgattatcactaaatgaagcagttttattttcttatttgtaatactctattttatgacagtttgtacaatgaacattgagaatctgtaaaataattaacaaaaatgagctatattattaatattagagttggatttcagacttttctagctttatgatctttctagcttcaagattaatcatttttaaatgtttaatacctaggaaaaagtaaaggaaacatgttatgaaaaagaaaaagatactgaatagtgctgttgtttttacttaatagtttagactcttaagtttctttaatatacttgtaaaagttgcttggttattgaactgataaggaagattatattgcaatgttttgcatatgtctgcttatacttttgggttcaaggtcttatatcaatgtggctttttgattttatgaagtagcatcctctgaaagtgttcattgaatcaggcttgctgatatgaaaggaattcataaaattcaaatactctcgtttagcagtgaccataacagtaaaggcaaagattttaaattgcaatttgctatgtgaagaatgataggctgacatcattttacttttaaagggttgaaacaatttctgatttat

SEQ ID NO: 117234 - DNA, 1044 bp, Homo sapiens
attaattcttatcttatttaatgtaatgtattgaatgcattatcattatttattctgatagccaaagggttccagatttggccacccgttgctccttcaagctggcttctctgtccttttgacatgttctcatgaatctttgagtactttctttcttttggtgcagcaagttcttataaacaaactcatcttgtagtttctcttctgcagccccataatcagtccttttctccaagaagttctgaatccttttattggataatggtatttagaaaccaagatttggccactggatatgctcattactgtggtatgttgttactgccaggccctttctgcagcagaactaggaaatgtttgtgcatatatgtatatacatacacacatagaaatatgcctacatatatacgtatgtatacacacacacagagacatacgttaatatctgttaaaaattttgagtttatactgatacacttttaatttcagtctgtcagtacaaaatagtatttcccttttctatatttgtaattccatcccttttccatatttgtatctttttttttaacagtgagaaatctggctatcactacttacaatatatttacttgtttttaaaagctgaggatactcagaaagtagtttcagattgccaaatgataccactttatatagcaagtctaatagaattataacatttgtaattcttattttattgaagagttttttttttattgaagtaaaatttacattgggtaaaatatacaacatttgattatataatttgtgagtattgatgaatgtgcatactatgtaacccacacactatcaagatttagaacactatcattatcctatagacttccattttacccatcttagtcattcccctccttttctagaagcaatcactgatctgatttctatcacaacagatgagttttgctgattctattacttaatataaatagaaccatccaacttcttttggtgggtataatgtctttaagattcatttatgttgttgcaagtatcagtagttta

SEQ ID NO: 117235 - DNA, 1653 bp, Homo sapiens
aagatcagttggagaaggttaggatggatatctttatctaaataaatttggagacaattttatttatactttgtaatagattctctttttgttttttgggtttgttttttttttttttttttttggccttcacctgtgttgtcccttactttttgatagtgtgtgtagtatagctactgctggcaacactttgcttttctctacctttgatttacttcttttgaccttgtcaccaaacttacaagaattatgtctaaattaagagaactagatttcaagagaactttaggaattaagtgaatgcatgtactgggttcagttgcacagaaaactttttctaagttttgtttatattactagattaggtgtttagattagtgaactgttcctgtgtattgtcttgcataattgtgttttgttcttttcctttttaggtttgttttctctttttttaaaaaaaaaatccttgttatataattttgaaaactgagctcaatgaatcttgaggaagaggtatttttgttttttttagggtagtgccaactaaagtaacttttaatatttaagaaggaaatatagtgaaccttttcttccttgtagtagataatttttatcttttttttacttataagaaatgatttaaactttattcagggagaatttttgttgtttgagctgtcttggctttgtcttctcatgtctgtgctttgcttagccaacatgtcttttggcctcattgtttttcattatggtagaaaatgcagtagtaagtttatttttgcaaatatatgcatgtatcatagaaaacttcctgcttctgtgtgaggcatcgataaatttgagttaacgaaaaagggaattttttttgttgaaaattgaattgaaatttcaattgaaatggaaacagtgttaggcaagtgaggaatgaaatctgatttaaagaaaaataaataatgttgagatataagagtagaatttttaaatagaaaagcattgcagaaggtttccaatcaacattgattaagtgatgaaatgctttccaaaatgaaaaaaatgcagacaagtgggctgaaatcttgccctccacttattaggtacctagttttgaagtagtcacttaatctttctgagctttactttccttatttgggattacaaataactgttttcagtgtagctgtaattttgaaagatagtatatatgaaacatggacacagactcttaatacgtgttgattattttttatggtacatatattcctgaagaggaaaattttaatggactatgtacctttttaattggtttcaagacctatttaaaataatctttaatgatacctattttaaagaaaaataatcactttctggtttccttaggtgctcatagcaagagttcttataatgattcttggccttgtggaaaaacattcgctttcaaacaggcctttgtagttaagtgctttaaaaaatgtgaacaggctttaataggggccagattactgttgggagacttttttcatgtaaaagaactgttaaagaccctagggggtgttctttagttactgtgtttcaaagagaaagccttcctgtgatttctgtaacttactacatggtaaaatttatttccagatatgtcagttggtgaaagaacac

SEQ ID NO: 117236 - DNA, 1038 bp, Homo sapiens
atcttaggagtgtcttttatcatttaagaattatgttagttgacatttttcgtagttgttgtcaggatgaagttggcttgtaattcctagtttgctgagatttttttaaaaatcattaatacgtgttggattttgtcaagtactttttctgtatctgagatgacaatatgatttatattttattctattaatttggcgaattacattgattgatttttaaaagttaaaccaaacctacattcctagaatgaaccttacttagtcatgaggtattatctttttaaggatttcatgtttgtgtttatgaggaatatttcttatagtttcctttaattgtaatgtctttatctgttgttggtaacagggtaatgcagtgagttgggaactcttccaatcctgggtttatgtagaattggtattattctttaactgtttaataggattcagtagcgatgctatctggattgtattttgggaagtttttaaataataaatttaatttctttaattgatgcagagctattcacattttcttcttgaggcagttttagttattagtagctttcaagatatttgtccatttcatgtaagttgtttaatttacatgtaagttgtttcgtagtattcttttatcattcttttaatatctgtgggatctgttctgatgcctcttctgtttcttctgttattggtaatttgtgtttctttcttttagcctgctgagaggattaatgattttattgaactttccaatccagcttttgttttcattggttttcattactgattgtccattggtcattgatttcctcatttgtcattattttgtccttctgtttattttgggtggtattgatatgaaggcagatacagataagttggtcagaatacagagtctgaaatagacttatacatagatggccgattgatttttgagaatggtgcaaaagcaactcgaggggaaaggatagttttgccaagaaactatatgagagtagctagatattagtattgaaaaaaatatatctaaatccttac

SEQ ID NO: 117237 - DNA, 1831 bp, Homo sapiens
ttgttttatatattatgaggataaaatgtttaacatattgggtttttcttcttccatgcatgccatatgcattaaataaatggcagtcggcagaccacagggcagcttgggactcccagcaggcaaatccccaccatttgagagctcaccttgcagcagacagacatggtggctcggtacaggtattttctgatttttgcatgagtgattattacccagatttatacaactaacccttttttttggaactcatggcatgatttcatatcttaatggaaaatttgttgctgaactactctatccataattctattcctttgttatttaaccagaaaaaccaaaattaacgtggtctagaaagaccatcaggaataccaagatttttcctttgttcatttttgcaactatatgctacaatatttaagtcatatagcagattagaaaaacaaacggtattatgcttgaaataggtattaaacttgactttccaataataagatcagtctttttaatgcttaaattaatagaacatttttgtattttttcccattcattgactttgcctccttcaaacataatcagttaaatatcttttttcatccttagtactcagaatgtactttctgattaattgttcaaacgaacatgaccctaatttttataatacatgttttgtttgtacttatagaaaatatcagatggaaattttaataagaagtgtttattaaatactcccctcaataaattgtatggctttttagataaattcaaagcagtcccttatttatgatttgtttcttttcaccttttttatacacttagagaccgctactatatatattctgccctccgttgccccataaattttaatcatttatgtatattgtagaaatagggaaagattgctgagtctcgtattgtcttttaaaatatcggtttaaggtaatctaaaagccagcttaaagtaagtgagataacaaatgttatcccagtacatttcaatttagaattttttttacattttcatttttttctttacatattttcacttgaataatttgccattttatcaaatttgcatttttcttagtgtatatatttaatcaactgattctgtactctgggtgctattctttcttgatttgagttctaaaaattaaattatgattaaatcttatgagccctcacgtttttctcatcattaaattttagaggtaatttaaattatataatggagtacttttgtagaattttgcagtttatggaattttcagtaatgtgtggtagacttatttgagtagatctataaaagtctagggtgaagaacttagaggcaagagtgtctaaattgtaaaaatttttatgacttcaattcatatagttagaaaagctaattcagcaaatatattctatttgcataacacaaactatattttgtatgtatctgtatatgtttacatgtttttaagtttgtgtgtatgtgtgcaagtgtttttgctcagtgtaacaattaaggcactattagaaaattttcctaccatttctgtaccattaccagatttattttcttagcctcttcttactcttatgtgattccttgaggtggctcgtgggattcctttggactgtcaaagggtgaatgaatttcattattcattcattatttcactacttcacgtttattgtttcacatgttttcacagagatgtttgaacattgctcgtttctcattatttctaagagttttcagcgtactgagactacatctgacttcatcctaatattcaataagtgattaacttaataggtttctagtaatatggaaatacat

SEQ ID NO: 117238 - DNA, 2132 bp, Homo sapiens
catgaatactgataaatactgtacaaataatttaaaatagggtgtaacataatttctgtgctgtgtcagcatagaaatttttagctgtgtgatagaaaaggcctgtctcagagatgctgtttgagaatctgaaagatgagaagtcagctaataagtaggaagagaattctaggcagtgacaataggtaatgccaaggcctttaagtgggaagaatctcgacatattggatggaggctagtgagcttcagagaagatggtgtaagctcagagaggtaggcaggcatcacatcatgtgggactttgtcaatttgtgtaaggaatatagattttttattctaagtgaaacgggaagccaacagttggagagttttaagcagagagctatacatgatgtgatttgcatcttaaaaggagcaccctgattgctgtgtggataatacatttgagtgggggacaaagctgaagactagataataggtttttgctcttaatcacataagagatcatagtggcttggactggagtccttgtagtaatagagatggtgagaattgattagatatgggatatgtttggagaaggatttaacaggatctgccatttatggattagatgtgggttttaagttaaagaggaatcacagtgacccctacgtttgaacaactgggtgaatgaatggtgttgtctctatttaaatgggcagtttgaaatggagacttgagcataattgcagattgaagtgaaggatccattagaaggagtaatattgaagtttttcaatattcaaggaaagtaattcatgatatagcaaggtgccagaggacatagacacacaagaggaaactgattgagacatacatgcaggagttagccttaaaaaccagagggaaggagacagaagacacagatttcaataaggaaaggaagtaagttgaaaagcgcatattagatgactttaatctttaataaaatgctagaccaattactgtatttagttatgaacagctacatattgttttgtgttcctcacattaactttctaattgaaatactttaacaattatgtttatccttgtataacctatttaatatgtatgtatatttatgagcatgtgtgtgtacatatacatatataaaaaatttttttttcaaacaggttgtaagttctacaaatggagagttaaacacagatgaccccaccgcaggacgttcaaatgcacccatcacagcccctactgaagtagaagtgatggatgaaaccaagtatgtgtttgttttacttgttttagtaactttttgttcttaaattatgcatgcttgagatttatagttacatacaattatttcaggaaatttttttcagggaataggtgcatgcaaaacaagtggtatgcttaattattttaatcactagaatgagtttaaaatagtgctattccagtaaacattttaataatacaaaatatttaagaactgtgttcaaattcttatttggaattaacaacatatttttagcttttgagttttaggagtgttgatgcatgaaagttattgatgtactatcaatcttttttctgtaagcataagaaattaattttataaaatgcatgttttaatattttgaattagttttttcaaaacataaattataacaacattgcttggaaaaaattaagcatgaaaaacaatgtgataatttcaatgtgagctgtttctgattctctctctctcttttttttccttgtatttttttttttgtgtgtgcgtatagctgccagaaagtgttgaacatgtggtgagtctcaagtgtaggcaggcagaaatagctccattgactgtaatttcaaagatttagcatcattttgtgtcttttgaaaacaaaactctcaacacagtgattataattggtaaaagttattcaaaagtatttgatatcattaagatagctctgaaaagcaagaaataattgtttgaggagctcttttgcctgctgcaacttttttactttaagtgacatagatttggggccactttttaattgcatagatgatacaccaaccctgcttgtgcttgtgcatttgttttataatagtttttatttgctatttaaatagaaagatagatttttgca

SEQ ID NO: 117239 - DNA, 1069 bp, Homo sapiens
agtatagtcttacttgtgtgtttttaaatcaaatataaaaacaacagcttatgtttgggaattttaggtacaatcctaagacaggaaagtagggtggtggtgtggcagattcgactgcacatgtcctttgcagttagacataggttatagaatcctgtttctgccacttatttgttaccttcaagaaagcttgtttctttttctgtaaaatgaagctaataatacctacttcataggttgagaaaattaaatgtgataaagccctggtattttgtctggcacacggcaggtactcaatagctattatcacccctatttatttcttctcttccaactgctggtgacgtttctcatctctgttcttgggcttgtgcctcttttatctgtgtcctatatttttacttccatacacacactcttcactgaaactggctgttctgtgtttacatcctcctggagacttgcttttaataaaatctattacatttatccatttattcattcagcagttacactgctgaggtttctgacatacctgatgctgtccttgttcttaagtagattacaagccagcaggaagattgcagttgtactagtatatgtcagtatgtgattaatacgataaaaaaggtattttaaaaaatggttagagcttgtaaagataaagattacttcctgacctggatgatcagagaatacttgatggaggtggctctgaagaatggcacagttatttagttgggatgagtgtgggtgtgtgtttgggtccctatctgtagacactggaggatgtgaaagaagaaagtggtgggaaggctattgctataggaagggttctccattgcctgccacatcatgtccagatttcttggcatggcaccaaggcttctcatacctgtcatagtctggcccatctatttttgcagctccgttttccattctgaactttatatagcattggttccttaaatctgcatttgctatgttatcctctgtatgtacttcccacttcttgaaacttactgaatttcttgaaaacaggtattttttcatcctcagattcctagtg

SEQ ID NO: 117240 - DNA, 3474 bp, Homo sapiens
atggaatcacctcaattgtgctactttaaatattaagcatagtttttaccttaactaaactttcaataagcttgaccttctttaacccttaaagaattcaaaattgccagtcttggtattctatataatgtattttctgtctttcacttttttaatatgatggaaaatgttgactagtgtatattggagtgtctttttatttttggagtctaaactgattattggtgagaataaactccccaatgttaggatcattattgccttcctaatggcttcaacagtcacatataaatatcagggagaaagggtgagaatgcatagaatgaaattcttaattactcttagtgaaaaaccttttgaatttaatggctcctttttatgttgcatagaatgtcttgctattcttaaaaggcatgtgaatgaaacataatagtaatagctctgccatattttcactaatacgtatgcttcattggtgtaatcactgtttatcttgcactagcctgttgctttttatgatcatttaagttaaagtgatacagtcaactttgtgatattttagtgcttttaaaataaaaagagtgtttccctcatctgcaggtgctgctgttttttcaaacgaaggaaaaggaaaaccatacagcgccacaaatgactctggacacagacagatcctggggagttacttacatgttcatctgctgtcttgtgattaaaatcatctctgtagtgaccacgtatattttcaaggactcactcttagaaacaaaaatgtcatactttcatacttcattttgtggttgtcttacattctttttctttttttttttttctctaatttaacctttatggaagctttaaagttttgtcaaaacatgagtgctttgcccatcagtgaatggaatggaccaatgaggtggtatcaatgaatatagttccatagaacattttccagaagttcttctgttgtagaaagcagtacagtatcttaagtgtcaaccagttatatacctaatctggttttttataacttctgtaagagcataatcaaacaggaattttcttttctcagtggataatacaacagagaaaacagagttgcccaaatatttaaaagaagttattccttgagaagttcatattttgtgacatctgcattgatttcagtattactgatggtactgttattcataagtcatattaacattctctccgtgaaatcatggtacagtcactgcccagaggtactgaggaaaaagcaatatgggttcggcagatggtggtggtaaaatgaatcttaaggagtgtggtaaatatgtgctccgcttttgttgcatcactatgtgaagtactgtgttgcagaagtggcaaaagcgcttatttttaaaaatgcaaaatatttgtacaatgtaactttatgcttccaaataataatgtatgttagacagcaagaaatgaatactttaaaaagtgatgtatgttggagttataaagaaatacactaaggagaggtagtaaatgtgaaccttgttgcagtgtataaggtggaagcctaaagaaatctcaccgaaacttactgctgaatgattacattctcccttaagcagaaaactttggatgtgccatgcaatggtgtctgtgtaattattttgctctttgattaaaaaaaagacccccagcaataaaaagtgggtcactctatgccctctgtgcacattagtctcttgtattcaactttgctgattctctggaattttcctactctttagcataattttgatgattgaaaaatattttggaaaggatgggtcaggtgctttgcctccatagtcttttgaagtgcctgcatatgaacaacaacaacaacaacaaaaaattctgtaaaaaaggaagcccattccacttttcaagtatgctttgttttaagccataaagacacacatgtagttttgtcacattctactagccaaaattttcaagaagggttaaaacaaagactggctagaaagataattattttgaataaatctcatattcatctttcatttatataattgttacttattcctcccatgcagtctcttcgttgtctttaagtgtgtgcctccaggcatgcttatttatttttattgtctcaaggtaacatttaagatgtatattaaagtaaagctacatttttttacttcattattgcatttacagggatttaattgtactttgtaatttatttttcttattagccaaaagtttaatgcatttttttttgatgaattaggcacccacatgaacaccacaaatcaggacattgtttatcattgttgctatgaatcctatgaatgatcttttttttattttaaagacctacacttaacctacaaaacatttgctgtataatttggtcaacagtttctatctatctgtatactgtcatgatgtcttaaactgcaggagttacatactgagtttatatttttatttgctttgagcaaggtagataaacattttggccattataatgtgaaaccacttcttctttctttacagtatttgaccaaacttgtgtgtctatgatatttgtaaatacatgcgaatatctgtatttcttatcataagcctatttagttttattctcagtagggttttttggattgtacagtgtttatatgatctgaactccttatacataagaaggtgtgtatattaatccaattatggacttaaaatattttaaaagtataaatacccttatttgctgcaaagaccagtgtgtaggcatttgctttttagcaatatttttaagtgctccattttaatgccgaggaataagtcttttggcaacacaaactggtcaataataggtaatgcaggtatgttcaggttaagccaacaatgttttgcatttttatgcttattttctgtcaacactaatgaagtcaacattgcctgaatgtctgaataatgaaacacatccctgtttaaaagtatgtaactgaaaaagaaataaaaaaaaataaaagtagtttttttaaacttgctctttcccatttcctctaaagatgggtaaaataatgtcactccctaatttaagataggaattataaaaatttggtttatttagtctgttatatatgagaagcagagctaaaggaatatgcttttgttattttatgttttgttttgctttcttgaaatccagtggtaaaaagcacacactaggaaggatctaagctttctttaatataaaaaaaattatacttctctgaactgtttaatagagcaataattaaatacatcttctgataaattaagggaaatagcatcatttttcctttttgagaatggaatcatactattatgttcacagaaattaagcattattccagttttaagtgaatgactttaaaatcattgtagatggggagcccatatttctaacagtatctcatagttcatcattgtgctaggtgctttaag

SEQ ID NO: 117241 - DNA, 1100 bp, Homo sapiens
ctttgaattgcttgaattctctattcaagaagcttgcctgagaggaaaggagatagagaaataactggagggaggagcagaatcaagggagagtgttttgcttgtgtttttaggattggagaagcttgacttttttttactgagggaagaatctatcagtgaggatagactaagctcctggggagagagagaatgtggaggaaaataaaaccttgggaagatgagctaggattccaaagaaaggggaaagtgaaatgaagaaggggctgcccagatttaggctttgtagagatggtgtgtatgagggaggtaagaaagggattggctgtggtgtttttgtttgattgagatgtaagtgagtctgagaggaggctgcccacaagttgctgtttatctgagagaaaacggaaccatcaagagactaagggtggttctcaaaaatttcgaagagcaagcataattatttcaaacttaattttgttatagtatttgctacccatggccttcagttttccttcgggcaatgtataaagttactgacttaaaaatgattgaattataaacttgtgttgaaatgaagaactctttcctcctctgccatggtaagaattcatttttaaaaatatcttcatatacataagaaatgtttcataagcaaattgctcttttaaagagttcttggaaatattagatgcattatgcatgtactgacctttcatgaatgttccatattaatcatcttacattgttttttgtatagatgtagaaatctagttagttcaagatctaaaaattcagtatcaatccaacacatcattttgctgtcagataggtatacagcacatatacccctaaacttaaaataaaattaaaaaaaacaaaataagggacaaaaacaaaaactcccactagttttatatatttacattatgaagattatatacaaaggaaaaggctttcctaaatcaggtgttagccaaaataaaaacaaagaaaatacacaaaattctattgctttgaactgatttcattaatggaaataaataaggaatgtaattaagtagaacaggaaaatgatttcagatttctttgttgtacat

SEQ ID NO: 117242 - DNA, 1024 bp, Homo sapiens
tttagtctattgcacttgccaagttgcctcttatgctactgtgtgaatagaaagtaagataatatgtttgaaggtgtttccaaaactgggaagtgatatacaaatgtgaaggggtcatttttatttattcaggtctttttagttgatgtcatctagtagtgttaaaagagagctttcctatttcttaaacaatttgtattgagtgtaataagaacttggaagagaaagaggttttatttctagtctaacacattatatctatatataaataaagtatatatgagaagaaaacaattgtctcttttaagataatattattgttattgtactgtcttaagttacctctgggaaaagaaaatatatccaaataaaagacctagaaggagacagtaatcttccctaggtttgcatttgtttactctatttttccccaggactgtcttctatagaatttaaaagaattctctgttaggcaacatcatgccatttggagctattacagtctctgactgctacctttgtcttgcagggtgaaagttaagagcatttctaagtttgatttactgattctgtgtatcttatgggatgcattgtgttcagtcactggggaaaatgttaaagtgataacaattattatgaaagtattgtattctaggcaaatagcatgccgcttctgtaattcactgtgacttttgattcctgttgttacctggtatctgttatttctcctgagcttcctattcagggaatgcatgcaaaccatttagcaccatgcagagccggagagatggaatgctgtatctccttcgaatagctattaagaaaactgcagagtattcaagaaaggatagatagcagatagaccaaatggtttgtactgtgtccttgctgcatgaaacagttcatgtgtgtgtttaggagaggacaccatgctgctactaggtctgcggcccttctccactgggcctgtatctactcttatccttctaaagatcacagacactctacattttttccccattag

SEQ ID NO: 117243 - DNA, 1355 bp, Homo sapiens
taccgcagcaagtctcctgctgtaagcctccttttgttgttatttaaaagtactgtgatttggggagaaaggggaacaagctagagaacagtcttgaaatataaatggtttcggaacccagctgtgatttcaggatgctgttttatcctaatacgtaaagaatggagcgttcaaaagtaagacgctttcacacatgagagaaaattgttaaagcacgtatggcagtagcaagcttttctgttgcaaaatctagtataccttgcttacccaggaggatggttgttaggtggaaatttaaattcataggaaccaacttttggtgcaaaatatgtttgataagacattgaggaattaggtaacagaggagtatattttatataattttggtaagtaagtagttcagaggctacaaactgttgactttttgggcaaatcaagcttttcaaaaaatgttttcttgcaggataccttttaaaaatcagacattttacatgcaagttcagatcacctctttctcttaagacaatagaaaatctgggccgggagtgagccactgcctgtaatcccagcactttgggaggccgaggcgggcagatcacctgaggtcaggaattcgagaccagcctggccaatatggtgaaactccgtctctactaaaaatacaaaaagtagcctagtggtagtgggcacctgtaatccaagttactcagaaggctgaggcaggagatttgcttgagcccgagaggcagaggttgcagtgagcagagattgtgccactgcactctagcgtgggcgacagagcaaggctctgtctcaaaaaaaaaaaaaaaaaaaaaaaagacaatagaaaatctggttcaaaatgacatggcagtaactgatgggaactagtagccccatctaggcagatgtgctgctccccatcaatgtgcatggatataaatagaagctccctaatctgcatcacttatctttgttgttaacttgacttctggagagatttgaggtttctgctacttgtattgacccttcatattcacatcatcagtgttcatggttgggggttcatcacgagcaaagctgagtgcccgtgacatgtaataaggcacaaatttgagccttgtacagtgtgaggctcatttgcaagagtaagtcatgtggcttaggagtgagagctgtgtctgctgttttctggccttgactctttgtcatgtccctttaactctgctgaagtaatacaatgtctgtgaaagatggctcttccccaaaaaaggtgactgctctagtcctagagactgttgtgaagagagactaaacaaaaataggatggtgcttggctaggaaagagtttaaag

SEQ ID NO: 117244 - DNA, 1129 bp, Homo sapiens
caaggcagagcagttagattctaagaaagtggaccacaattctgcatccttacagcctcagcaccagtcggtgatcacacaaagacatcctgccctggctcagtcactttattatggccagtatgcatatgggctctatatggaccagaagtctctgatggccaccagccctgcctatagacagcagtatgagaagtactatgaggaccagaggctggcagagcagaaaatggcccagactgggagaggagactgtgaaaggaaaagtgagctccccttgaaagagctgggcaaggaggaaactaaacagaaaaatatgccatcggccacaatctcaaaagctccctctactccggagcctaacaaaaaccattctaaactagggccatcagtgcctaataaaactgaggagacaggtaaatcgcagcttctctccaatcaccagcagcagcttcaggccgacagcttcaaagctaagcagatggaaaaccaccagcttattaaggaggctgtagaaatgaagtctgtcatggactctatgaagcagacaggtgtagacccaacctcgagatttaaacaagtaagattgtggagcgtggccccaacagggagagagcagtctgagacttgtattatacatgtctgggcttgatctggttagacttctgacacaggaaagaaacccatattagttttttcctctgctcttgaaaaatatcttaagattctcaggagttactatgtagctctaaaatgtacattatcagtattttcttgtcatggtgtatagtaaaaggaactgtggatgggtgctttgcagatttgtgtttcatgccactaacttgctctgtgactctgatgaggtccattaatttctttttttaaattttttaaattttttgagacggaatctctctctgtcacccaggctggagtgcagtggtgcaatcttggctctctgcaacctccgcctccgttcaagcgattctcctgcgtcagcctcctgagtagctgggactacaggcacgtgccaccatgcccggctaattttttgtatttttagtagagatggggtttcaccgtgttagcgagatggtctcgatctcctgacctcatgatccgcccaccc

SEQ ID NO: 117245 - DNA, 1082 bp, Homo sapiens
cagctggatattgaccacctgtcttcatgggaaagaaatagatggcagtgaataagcgagagtctagttttccaaagaagctcaatgattttcccaaatcaatacagctcatcaggcctcagaacaaaggctgcaggggaggtgacagtgatggaagtggctctgtgttcttttgtgtattaaaccataaggcccatggggaaacaaggtttctttagctgtgtgtgtgtgtgtgtgtgtgtgtgtgtgtgtgtgtgtgtgtgtgtgtgtgtttagggcttattctgtgtatttagggggaaaatcctttcagattttttttttaaaaaaggatttccatagattgtataccaatgaccaaatgtacttttgaaagagataagtacagtcaagtaagaaagattatcatgttttaaaatgcagagtagaacagcatttttccattgcttttgttattgcttaaggtttcattttttgttgtcgttgtatgtggattgggtttagatgaaccaaaaacaagtctgtgttcagattaacctctggcaaaccaagaatcgtaactaccctcccataaacaaaccctgttcctaatgccctgaaaataacaccaaaccctaataggaatgctcaactgtcatctgagaggttataattaacgcagatagagtgatgccaacatattccagccgctgacagagaagatctatccaaaccagcaatttttagcccttcagtcctttaatctttaagctcactgtgctttcataaagtagtacattaacaccagagcagtgtgtctctggggtttatgactggggtggcggcacactagggcataaagtgtttcattacacttccttttgttagtactgccctatctcccaagctccattgccatacactatttgttcagataaagccctatgttcagggtgactaatcgcagcactgtgttccagatggtttgattacaggatgtgtttaaagtgactcttcaaacattcagcccagcggtagggctctttaaaaaaaaaacatactgcattttatggtcatgtgacaacacttacttttcctgtcct

SEQ ID NO: 117246 - DNA, 1065 bp, Homo sapiens
gacttctcaaattcagagcattttacacccttctacgcccttttagtcctagagtactcgtcttttggtgagtggcatggagggggagtttttgcctgaaggatgatttatttttgtctggcttgctgttctctttacctgtttttttctagtcgaagtaatggcatcgtggagagcttgggtatctgagttgttaacttaaaaaaaaaaaaatcctgtaattaatattaagtgcaggaaaggactgggaccaatgatttgaatggctgcactctttcagttgcttatcttcagtgacctcctgagtctgacagtgggagtaagtgaaagctgtttccctctcattttgacagaccctggccctgtgctatgtgcccagggccacttgtaatagccgtcttctaaaataacactcttaggaaaggaatgaccattaggaggtaataccacaagatctgtgtcattattatggctcatagtaggcctagttcaataattacaaaatacctttcccaaactttttaacacttttatttaaaagaagaaaaatgtgtcctaacaagctaatgatacaagcttgtgagactggattggggaggggagtcaattctgttacagtgggcattgaacctttgtcttcccacaaagagagggaggaggaagagaaggagaaagcattctgctactctaatgaggaaatttggctttaaaaaaggagagggtttgagaaacctgccccacactagaaatcgtcatccaaactcatcagatttcagaccaaccagtggtgcctgacaaggagcaggagaaaaattaagtttcaaacttggcattagaaatcagagtgatgctgttgcttagtttggtggcactaagcctcaaaggaggcagctacttactaggaagtttaatcaaagacaagaaataaaaccccttggtacaaatgtatacagacacacactctatacatgtacatattcagtttatgcatttgaattgctccaaatgtctgtctcagaagactgtatttttttatttgattctatcttcctgtcctcctttgtc

SEQ ID NO: 117247 - DNA, 1019 bp, Homo sapiens
aactttacaagctgaaggggctgacttacgggcagcatttgaacaaacttctagtcaccataatttagtaagggttggctgccaaaagccatgtaaggctttatttgatccatttatgaattaagagcctgcagtaaattaattaccatatattggggctaataaaatctagcaggatgagaacgcctttgggttcatctgcagagaggaataaggactgagagctgcttcctggtgtctgagtgtttctggctcggggccttctgcagtgctgggcaagggtggtgttcgtgctctgtgtccaccaaagaggcatttgagctagcttttggctttgcaactgctggaaggctttgctctattgatcataataagctgttctgtcttattaaagttgcatcatggagtctggtttttaggagccctattgagaattagttgcagaagaagcgatttgcttgtattttccgacagttaacaggccaagcagatgggagagcagacctgaaatagttgggttggctgcctgccactgttctatgaattttgatttgcacggatatgtaatagttgtatttttcccttttttggaagtacttgcctgtgagccttgggaaaattaatccttggtttcctgtaaagtatacccttgtacgcgaatgttgctgcagtgttccttacagaccctgtgctgtgtcctatgtcaaacagatcaggacaccatagactgtgtgttcagttgaagaggagaagaggagagttctcgctccagtttcccatggctcctcagggaaaaactgttttcattcacaatttactttgtgttttaagatgttttccctttcaaagggggggattatttttcttttccttcaggctgtgttcaccaaaatattgaataaatgcaagaaaggatgttaaatttaagcttaagaaaaggaatttatagacaaatgtgaaacaagcatgaatgtatctgggtgaagatctgagttcttcctaaatcagttaaaatcttg

SEQ ID NO: 117248 - DNA, 1051 bp, Homo sapiens
catagctgttatttattccatgacctgaaatagagataatttcagtcaatatggaatgtgccatcataattatccttctacggagatctagtcatttaatttatcattattgtggtttgcttggcctatttttttttcaaatgtggcttcagcgatgcttggttttcagaagactataagcttgggacttaaaacagcagcatatgaatggccagagtccccctaacccagccctacctccctcccttataggtccttgccagatcattatgttgggcttgagctctgtttttatctttacttatcaacatgagctgttcgccaagctggtttttcacaaattctttcaatgttgaccagccctttaatatctgcacttctaagaatcaaagtcctaggaaaagacagatctcataagcactttccttctacaagggacagatgcatggaagacacctccttaaaaccaaggtacactgctatgttctgtggtaacaccaagccacggggcagggtgtattccccagagctccaaagcactctgctatcttaaccaaagcacattcagtcacctgtattttcaagtttttcttctcagcctagaaaggtgctttttcctttagtctacctacttcagaataataacaggtacttgcttgccttccttgagtggagactgtaaaaggtgattttaaatatcacattgatatcttactctgaggcagggatttttctctctcttgtccatgtatgtagccccggtgcccagcacattggctgttaccaataaatatgtgttgtctgaaggaaggaaggacagaaggaaggaaggaaggaaggaaggagggagggagggaggaaaagaaggaaggaagaaaggaaagaaggaaggagggagggaaggaaggaaggaagggaagggaaggaaggagaagtcaagtgaactcatgacttgacttcaacctgactgaaaacaatcttcccacttctgtccccgctccctcccatgttgctcaagtcctacacaggcacccagagggagcttgttgca

SEQ ID NO: 117249 - DNA, 1048 bp, Homo sapiens
atttgagtccttgggtgtcagaaatgtggctgtttcctttatgtgacacaagacacatttggtgcatctgaacaattaaacacttttgcctggagaaccttctgttgctctgtcaacaccatctagttagcattttctcatttacggagatgagtcccataattaggcccattattcttatggaaaaactgagatacagaccatccaaagaaaatgactgtgggaagtatgttctttctggatttctagttttatctaatattattagtctttcctagttttgagtctgtttacgtgtgtatgaatataactagctatttaaaaaatatgctgtgagggaaataaatacacatttgcttgtccgtttgaggttttgactgaaatgtggaaacttaattcagcttattaagtgaaatgtttttaaaatttgatattcaccaaatatttttacaaaaacaccccaagtgtagtttccaactatatatttcataacaaggaaaaaaaattgcccaccacttcctgtgcctcagagagtcaatgccttgtattctcctggcccagtgggcagttttgatcctgccagctcttcgaggacttacttgtacctttgcacagtttgtatactgtcttgtggatgtcttcctcatatccatgttgacagacaacttttgaagtaactcaagttgacagagctgactgagaacatttaatgtgtcttatttcacttgagcagcagcagaggccaacttgtttaaagagaacctgcaaaagctgctttccactgttttcctcagcttcatgagaagacctagtcacttttcagaatacaaaaagccagccagttccagacagtgcacacagtgcacatataaaattatttattgtccagacaaacatgtgtggctgggtaccagaaacacagaagagccacaactgggactggggcattggcttggctccctcttgaagctggctgcagtaagcaagtgtgtgagagtcactttcagttcaaaaagtctgaatactcaagggcagacacattaggagg

SEQ ID NO: 117250 - DNA, 1143 bp, Homo sapiens
cttgcagtgagccgagatcgcgccactgcactctagcctgggcaacagagcgagactctctctcaaaaaaaaaaaaaaaaaaagattaatgaaatgttaccagcttcacagaaaaatacagaaggtaaaaaaaaatggaagacaggtcttcacataggcgtacaatagacagtcaacaaaggcgtactgaatggagagaaaggaaggaattgtccggggttttgtgccattttcctggatttgctttactcttggacctacttgttttatgctttcccgatgagggaatgcagccaaatttggatatgatgagtgattgtgtattttgttggaaagcaacaacatagaccgtcactttaactcttgtcaatgtgaaaaataagctgctgttgagtaggattcagtttaatgtttttagatcaaatatttgttttttggtgtcatttgtgtatatattttcgtggtgacattaggtgctaagtaatgaaccaataggtttaaaactcactgtgtaaagacattgttacctctttttttgtgttggttgatattgtagccaggtttattattatatgtgaatatataatggaaaactttaaaactttttttcttaggacttagttatagtaaaagatgtaagcgctatcttgtaatatttgtgtgtatatgtggtattgttctgctttttaatcttcttcctgtaaagaaggaattagtaagaaaatcttgagtgtcttaatattatagtgactgagctgaagatgtattttctaattacaaaatggagatggtctcattggctgcaaagaatagcttgtaatcataggtaggcatttgattaaagtattccactgacatttaaaaaataagttctcacagcagctttattgagatataattcacataacttaaaatctacgcacttaaggtgtataattcagtgtttttttctgtgtgtattcagaggtgtaccaccatcaccgcaattcatttcagaacattttttatcaccctagaggaaaccctgtaaccctcaacagtcattaccacttactccaatccccccattttgttgacttttacatcattgtccttgattctttgttgtttttatgtgtaaacatgtatgttttgtagacaata

SEQ ID NO: 117251 - DNA, 1035 bp, Homo sapiens
aacagctgtaaagcttgggttatttttcactttgcttagaagtctgcttagttttgacttttaaccttagcctcttctcaaagataagattatttaggaaaaaaatctgggtttaaaaactatagcagtacataagttggtgtggaattctgggcatatgcttaaagagctgtaaggtattattactgttgttattatttgatagtgatatacataaagcctcaccagttccactctgtcctctgaaaaactggtctcctgagtccaactgcctttatacgtgctctgttccatccatttctgtgaatatctttgtacattcgtacagcggactgatagctttagaaggttttcaggctgttggcagccccagccttctctttactgcctcacattttccaggatttggaatgtgtggatgtttactgtggtgacaagaaggagctggagctgttaatagagttattcttgctgaataaactaaacttctgacctccaaagaatttaagaactcatcttagtaaaggcctgggtcataagatgtatgtttaatgtgcaaccatttgcaagagcgttccatttgcatttttctcactatagtgtgtttaaagctcttgtaccaatttaaaaattaaacccacttgaccattaattttttccttttgggagaaacaaagagagacacagaacaaacacattgggagccagttatttggcagagctgaaagagagggattccaggagaaggggaggggagagtaagctacaatagttttgtagtgtgaggtttcactaacaaagagcttcaagttgagcatttataaaactgtcaggtgcctttgactaatgtcctgtagatggagttgaataaaaccccgtccctggtattttcacttggagagagagtattgtgtaactggtagtgttttccacaaacctaatttgttacgtgcgttcatatgtctgtgaaggtcatatatgtgtgtgtgttttaagatcctagaattttaagagttcatgcctgcactctttggg

SEQ ID NO: 117252 - DNA, 1091 bp, Homo sapiens
ttaatcatagctgtgcatctgaattatccgaagagtgcttaattgttttcatttccacaaatattcagtctcaggcttcctaacccctattctgattctccaactctaaaggttggctcctttgtatgcatttagcaaaagcttcagatagcttatttgaagatatcttctccaaccctcaacccccacctccctgccctttctcaaaagggagatgttaggaatagttattagaatttcttgcgtgtgtgtgtgtgtgtgtgtgtgtgtgtgtgtgtgtgtgtgtgtattttaagggtttatttatagaaaaatcatcacagtattgctttaaatatgacttcattaaggtgttttacaggtggttaattagtgtacttggtcaaatgggaggcaaaaggactaatgatttgcagctccagccctaggaatatttacagccggtaaatacacttactgatgtttcccggaatcttagggcagaaacatccctgcacaaatgaattgcttaagtagtaaagatgagccatagctttgcttagttagccattttggtttagtagaatgtagataattgccatggaggcagggggaaacgttttgggagtgtataaagcatgaagttgtaagtattactgctataggtctgatctatgcaggtcatctcttctagtcagctgggcttcagaaaattgccatgttgctcttgtgctctcagtgtggaggtagccagtaagtcctgctgatgttggccacatgtggcctttaggtagattgttccctcctgcagaccttttactcttgatttctacctgggtcatgatccagggagagaagctctagaactgggaattgggggactggtcccacttgatgatttggctttgagttctttttttttttttttttttttttttttttttgagacagagtctcattctgtcgcccaggctggagtgcagtggtacgatctcggctcactgtaacctcggcttccttggttcaagcaattctcctgctacagccttccttccgagtagctgggatgacaggcgcccgccacctcgcctgggtaatttttgtatttttaa

SEQ ID NO: 117253 - DNA, 1104 bp, Homo sapiens
tgaaattttctattgaaaatcctggcacatttagaacacagtggagaagaaatttactggaggagatttgcccacttgttgcaaaactctgttgctgtcactgtaagacctttggtgctaggaactataggtaaagggatgaagttgaagtgtaggatctcactgtgattttgaagctctgttacagggtagaggcctgtgttaagtacaagcttgagatgggagagaaagagcagatacagcaactgatgctgaattgagagaggatccaaagcccggaatcccagttggttggatgtttgcactttttttttgtctggagatgcttcctagtctgtttcttgaccgactgcacatgctgttaaatccactcaggtaacacatatgtgttgggcgcacagcccatgtccagattggactcggagttgggcagaggccaggtcatgcagggccttgtaggccatggtaaggaatttggattttagcttgaatgcgatgagaaaccatttcagaattttgagcaaggcagtgacttttttttttttttttttttttaaacaaatcttactgttgactgttgtatagagaattgactgtagagaggcaagaagaggacaagggaaatcagttgcaagactttttcagtggtcctggtgagagaagataggcttctttggtaggcatggaagtggtgggaagtggcaagaaatggtcacgttgtcctgagataatgaggatatggatatatgtggagttgtgaaagaatgagaattaaggaaaatacctggattttggaggtggatggaatcaagagttgtgactcatttttgatatatcctgtggctgccaagtgattatggtccttccacaggaaggccagggctggagacacctatgggcaaataggtgggctttaaagttattgggctggaagaggtcacctctagagttagttccaatggaaaagactagggcccagaggtgggctatggagcagtaggagccagcgccgtgtccattgagggggaagaaaacccagccagtctggtgtttctggaaagcaatggaagaaattctagcaaggaaggtgtgatcagctgtgtc

SEQ ID NO: 117254 - DNA, 1827 bp, Homo sapiens
ttagagagtaagtaatatgtgtatgatattggtgccctgtaactggtatgtcataggtgtgtgtatataaatgttgtaactgcatatacagatgttggattgggagtatttagttagtatgggttttattctttaaaaaatgttcactgttggttttacgttccactctgttgcagaatatatggacctctccctctgtgtctaattctttctcccaactgcagtttcactagtgactacttgctccctgtcacaagttctttttaatttaagctcaaggttttggcaatgggaacaaagcctttgcaactgaatgaaaggttgttaaactattcatagttgattgaccagcagttgggctgtttgtaatgttattttgagagctcaaaggatatgcaacctcttgcatatccaaagtgagactttgctcctaaagctgaattttgcatatttgctaaatttttcttggaaatacctttgggaatgtagtagaaaagatgatgggttttgccttaagaactgaaatgatcacaaagcaaatacttatattttgctaggtctgtgggccttgaaccacagggatcccatctggtattcagaaggcttttccccccagtgaaactaaatgaaaacttaaaggtatatattgtaactgtaataaagaactcaaaggaaaaggtgtttcggttagaacaaataggtttgaaatgatgaacaaatacttctgtggatttttcaaagccacttactcttctttctcatttccaccccccgacctagtttgaatatcattcactgtgactattccaacccaactactgagctttctgcctcctgggaatcctcattgtcagctagcaccttaagaaaaatgtgtctgcagggacatttaggcatattccaataatgccacatgaatgtagcttttacagtttaaaaagcaagtaaaaatatattgattatattttgtgttgtacataatgatttcagaaagcagatatttaggttgtggaattggcttattatgctaaccagagagcagatggcatggtgccacagacgtataattttacttaaagggacttttaaggttttgatgtgttttcttttcctcttatttccctgatggcttcttttcattgaagggtaacttaaggagacctggtagcaattttactgccttcccctgacagtttgaaataatagcttggtctttggttgcactgatcttctaccagtcaactcgattctggtttttgtcatgtggcagagaatttttaaaaaaagtgttagtagtatgttttaagaagtggactcttttatatgcctcaattagcaacagacgacaaagttccaattggtcacactttcataaactcctggaagtcactgtttgtccttttgattaaagaaaactcctggtttagtttcttaggaaaagcacatctggccctctggccgcttttggtatacctttttgtccttcgcattagtcactgaaggttcaaaggttgtgtctaagttgttcctagttaggttagaaaattttccccatgctggaggaaatgtacttttttttttttaaactacactcatcatgtgtttggattcagctggcataaaagtaccttttgtttttgtacctagattttacagttttatccattattcacctcacacatcatcaggatgagttggaaagcatcttctaacttttttttccaaagcgtgcatagccagaccagtttacttctggatttcctgtcacttccttggctgattttatggatggctcatgttaaaaacaacaaaaatgtttgaactgga

SEQ ID NO: 117255 - DNA, 1040 bp, Homo sapiens
gtctacaaatggacctgtccataaaggatatcattcattttattttattcttttgtagagtcctttttatacttcaccagggaattctggcacattttctaagtgagtgtgagcagtttaagaacatattttgattaatgagttttgtggacattatgctttttttttttttcaaatatagtgtcccatatgaattctgcctagagtgtagtgtatctactgtgaaataaaagggcagaggggtcacttgctataattaaagaacagagtccattgttgtcggacagcaaactgttttgaaagctacataagaggtttagctgttaaagacgttggtaactaagggtggcgtccaaatcagcattgatccagctccttacttttctataggcctcctcacagggtgacagggctttttgagggagggggctgccctttccccaagaacacatggaacttaggtatttgtgtaatcagacccatcactgaattctgactttggtgtgtgaaatccgtttgctttgctggagagagaaggaatatgcataactgatcaagattgtcctataggagataaataatgttttgcaacttttaataactttgcaaatagtctgtaaaaaacggtggggggagggattgatagtccaaatgtcgtgaggttaagaatgctcttcaagtgaaattgcttggctgcaagatggttttaattagactgttataaagacttatttttcctaagcagcattttatagttagtaaatgaaatgtatgccgaaagtgctaagcagaaatctccctaaccacagaggtgttcaataaccagattcgaacaacatggaaagtaccatctgttcttcgttttcagcgtgaaaaagagggattgaatggctgcgatttgctccagtttcgacggtgtctgtgtgtgcgcgtgtattcttttttaatttaaaaaagttcacctggtacttcatagaaacttgaaattgcagtaatatgagcaacactgtgaaaacacatgttcctgcatttattttaac

SEQ ID NO: 117256 - DNA, 1033 bp, Homo sapiens
attttccccaccccaccgccccaagccccccgccccccgccccgagcgaatgctgttataactggtttatcagctcactgaatcatctgctgtctcctcctccacacctttctttttctcctcttgcccagtttctcatcccaccctttcttctcctcctcctccctctactccccccctccttttctcttaagttagttcaagaaatcaaatctgtcaggacgggcggaaaaatgccacttcccgactaacaggcggaatccagcccagattttcagtcctttcttcttattctttcttccctttcactaatttatcccgatgttagcacattctgtctcgttactagcggacgcctgtaggtttgctacatgggatcattactgatcacggtgactctgaagtctggaactgaaggcggaatgagaagttgggaaaacttttttctctaaactctctgttttttaaaaaactattattctcgatgcttgttaagaggaaaaaaaaacctttggtgcttctgttgtgaatgtgaaacattattttccagctgtacagtgacacattttttttaaggagaaaaggactgattcgtttgccaaaaggggggtggggaggtggaataatgttatcgagtgattattctggctgagatgtgttatttggtttcttccttcttgatcatttggtgtttaagtaaaatgaggcacaggcttgtttgccgagtggagtgggaaaggcattttgatttgctggcctaattaaaaaatgataaaggattaaaaggtaagcaatgtctgtgtgtgtgtatgtgtgtgtgtatgtatatttatttatttttttcttgacaatcaactgttaaaaaggggctgatccctttaaaaaccgttttaactgctctttgtcaaacacactcatttgcggtcattgaggccaccttggcgcagatcacttaaagtgtatgtcttaatcagttttctgtacagtcagtagcaccgtatttaagagagtgagcaattctctgacctaggaa

SEQ ID NO: 117257 - DNA, 1122 bp, Homo sapiens
acacacacacacacacacacacacacacacacatatatatacacacatacatatatatacacatgtatgtatatactccgaaagtcagaaaaactagactcagccagttcatctgtctactgaaagcaggcagcagctcctccttgcttcttccagatgaccctcaaatctctggttaaacattttaacttttttaattttttattttattattataattttttttgagaaagccagctgactttttattgctttgggggcagggactcaggagttcttggtggggcgggtccgcttcctcttcaccattacaggcttccggctgtgcagggcgctggccctgcggatggcagccatgcgcaggtcagggcatacttgttcttcagtatcgtgtgtctgatgctgctgagcgtggcgcgagcattcttgttgatggtggtccgcacataggaggtggcaggcttccgctggctggatctccgcttcatgaccaccacacctctgctgtcggctgcaggctccacgcccacagtcttgcggtgaatcagccctttttagcgaaggagttgcgggccttcaagttattgggctctgtgctgtctgtctacttcttcctcttgatcaggaaactggagcagttcctcacgaccatccattgcagatgcgcagacatggcggcggcttctctcgcagcggcctcaggggcaatttaaaaggtaacacagattactttgttcaacgatttgaattccgaaacattctttaatataacaatatatatctatctgttttattataactattattcactggataataatattaataataaccaacatgcattgtgtgactgctatgttccgggcactgttttaggcgcttgatgtgtattaattcatttcatcctcccaacaattctatgcaattattattattaatgttattatacataaaaggtaatgtaattcacagtagggccggaattttaaccctcatatttgggtctagagcttctgagcttgaccttgatgctacattgcctcagaattggatgacattcttcctctaaggctacacagaattgataaccagatttcctgctatgtcagttaactcctagct

SEQ ID NO: 117258 - DNA, 1060 bp, Homo sapiens
ctaattggccagttatatttctctattaattgcatatatatatatatatatatatatatatatatatatattctttacccactttttagtttagggattaagatatattttaaaaataagtatttgtgtgtcatgctgctatagcaagctcctccaggagaatagatgttgaagctacaatgtgtatcaaatttcttatggctatataaaccactcagctttttaatgtgtcaaattatcatcttttaattttatggaaatcacaaaaggactaagttaagtttgattaggcttatgttacagaatcttatttcactatacgagtggcaaaaaatgctttaattcactgttttttaagagtataaaatacaggtaataccttcataaagtacataatggggctaaatgatagagattatacctctaaaagcagtttacagcttggacaatattagaaaatttaagttacgcttctcatgtagcatattcctgttaattataaaaagtccaaatgatttagtgaaattgggcaatttagggtatatacaagatacaaacaatgtctaaattttgaaggaaaccttggatagacaaggaatatacacagtatttgtgtaacattttacctttctcccaattgtatagtcatttttattgcagtcctccatgttatatataagtgtatgtatctacacacacacatacacacacacacacacacacgcacacgtaaaagaacagcataaatttattcaacagcatcacctctctgtttggcataatgaaaaagacctttttgtttaaaggccagagctttaaaatcagacacatccttttaaagtcactgtaaatatgtagaattgtataggcagctaggcttataattttggaaataataacaatttgcactgattagctgtaaatctcagttattaatgtggcctcacataaagaacaaattgtgtactcttttttgtattggcacttggcttctagaacatattcatctaagcaaaatgcatgctatttcagcatttcaagggaaaagttgttattaatt

SEQ ID NO: 117259 - DNA, 1093 bp, Homo sapiens
ctgattttaaaacattcactgcttctcttatctacaatgcctagcttcattagtcatgtagaaaatgtttacattccccaagcttttaaaaattaaaaaaaaaaaaaaaaaaaacctatgtgttctcaatttgagtaaggtgtgacggagagcagctctgtgacacaggctgagggaggaggatttggtgtggaggcgaggaaactggggcccttactaagacactgaaatatgataaacatccttatgaagatgccactcccagaaactgggacttgagctactcttaggaagccacagaccatggaatacagattcttctcctggaaacttctccatttccaagaaggcataaaatgaaggaaagcaatcctctttcctttccgtttcttggaatctaatatctaagcattaccctttacactctagcaaagtaaagcaaactaaggcatgacggcccctcccagcagtaattatgagatcatttggcctcagtaactaggcagactccactacctttcacctagtttcgtgggaagaaatggtaaagctccctcgatggaaatgttccttctttcgccataaccttcacaggatccatctgtctaatctttgtctgaaggaattggaagggcaggcggttgcctcaccaaaagcaccctcagtactttagtctactgaattatggggggttgttccagaagaggatccaaaccccagcagaaaactcctggcctttcccatgccagttttcccaagcccaggaattccaagtgaagtacatccattcctattgctatttatactgtctggtgtagccaaaatgggccctgggctagaaatcagaaagcctaggccgggcgcagtggctcacgcctgtaatcccagcactttgggaggccaaggcgggcagatcatgaggtcagaagattgagaccatcctcgataacacggtgaaaccccgtctctactaaaaaaatacaaaaaattagccgggcgtggtggcgggcgcctgtagtcccagctactcaggaggctgaggcaggagaatggcgtgaacccgggaggcggagcttgcagtgagccgagatcg

SEQ ID NO: 117260 - DNA, 1340 bp, Homo sapiens
actagagaatataattttgtgttttgtaatgtgtttgtgtacattatgaggctgtgtgagctcttgagcaaattagtctctgtaggcctcagttgcccaatctgtaaattgggaggtagtaggaaacctgtgttataggatgaggattaaataactaaatgcatgttaagtgcttagattggtgtgttacacacgtaagagctcaatagatattagctattatatgtagtagcttgaatgaaaggaagaatgtgttaatatttgtttctgataattaggggaaaaatcccaaaattttttacttattatcaatgatctgaattataagagaaacagagtgagtaaacttgactctttggtttccttttgtacactgaaattatactggtacacttcaggaaatgagtttaatgtcagtgaactttgacttgaacactataacatcttacagcttccaatgtctctccttttagaatgaagaagaggtctttgcatggaataatgaagtaaaacagggactttcaagtagcatctttaccaaagatctgggcagaatctttcgctggcttgggtacaactttgtctattttgaaaatttatataagtctgatttatgtggtgagtggacttaaaaaaactgctgtagtctaaaatcagtttttcagtattgaaagcctttgagctttggtttagattttttatttatttttgtttgtttttaatttcctgttcattgctctcaccatgcctccctttttacacagacctaaaggatcagactgtggcattgtaaatgtcaacattccaacaagtggggctgagattggaggtgcctttggtacgtagagaatcatttctccttttccatgttgggcagcaaagaaaaaccagtagtagcttttagaaaaggctgaccaagagactgaaacactccttatattctgaaataaccttatgtgatctaacatatctgaaaaagcttacattctgtattcaaagttatcgcatagagtcctgcgtcatctcctcagaggcagcatcaggttagagcagaggcccttaacttgaaatgtgtgaacccctgaaatggtggcatttgttttctggggagaagtttccagacccaaaaaagattaagaatccctgcttcaaagccagaaaattttatatgaaatattctggtttttatttgcaaagtaggcatataaatgttaaacatactctttttcactagatggaatacaaagttgtttcttttcactgggccctgctcctgtttcctcttaataagccatacattattaatgctgaaacttggtagtagtttttccttaaaaact

SEQ ID NO: 117261 - DNA, 1048 bp, Homo sapiens
cgcgcgtgcacgcacacgtacacacacacacacacacacacacacacactctgtgggtgcatattattgttgaactgtttggagtaagtcaaagatgtgtcccctttattactaaatattttggtgtgtttcctaagaatgtggacattttcttgtataaccacagtagttactaaaatcaggacatttgatattgatacaatagtaatgctactttataaattagaaaataagttgaaaaataattgggatagggtgtaatcaggataggctatatgattgggataggctatataaaaaataattggacaggctatataatttaataattgggattaggctgtgtagcagtgtgcagtaaatatggaagtaggcattaatttttatatataatttttttcttttaagggagaagtctgttggaacttggaggaaacaatgccattattggtaaggctgcctctttgtttttgtttgttttctgttcagtttccacagtcgccatcctgaatatatggaacttgtttgggatctcatttcgtccatgttgcatatgcctgagacctagttcctgtgtttaggaattttacttgggagacaggacacaagcttgttttgaaggcagaggtaactaggaaggaaaggtattcatgtttagaacatgttacctgggatgatctagaacctgtgaatgagacttccattgccattgtagtatggcattatttcttgttttttcttcttctgtttgctgaaaactggccacatttctctagaataacttaagtaactcttatgtgacttgatcatttctttagatttcaaaaacattattttgtctttagtggaatattgagtgtttttatattgggaaggaacatgtccttaaggcattaaaaaaatcacttacctataggcttagagattacttatgctcttttttaactgtttgagtttgtcacaaaaatgcttagatatttgtagttgacacacataagaagtatgtgtaagatataagaagtatatggtgaagtgtttgttctggatg

SEQ ID NO: 117262 - DNA, 1063 bp, Homo sapiens
tataaagaactcttaaaatgtaagaatataaaagacaacccaattaaaaatgggcattggatttgaatagccgtcttttttttttttttttttttttttttttgagatggaatctcacgctctgttgcccaggctggagtgcagtggggagatcctggctcactgcaacctctgcctcccaggttcaagtgattcttctgcctcagcctcccaagtagctgggattacaggcatgcgccaccatgtccgactaatttttgtatttttagtagagacagggtttcaccatcttggccaggctggtctcaaactccagaccttgtgatccgcccgccttggcctcccgaagtgctgggattacaggcataagccaccgcaccaggcctagaatagacatcttaaatggccgattagcacatgaaaagattctcaacatcattagtcccacgagcagatttcatcttctcacctttctccccttttccttactcaaggcggtagtttgttgttcttggctaagtagtaatagtagtagtagtagaattataatttttaaaatgtatctgcctgtcttaattataggtgcttttcttggaggagttggtggttaggagtatagtcagagagcgcctgatagagaactggaaggatgtagaaagtatagatccctcctcttctgccaaacatcacttgcagccaggcaggagaagctaatgtcaggcgtaaaagcttccgtttccttccttctcttcttaacacctagcatagcgctatgctatagccagcaagctgtcattaattcaatgattgcagcagagactagagttggtgtagcatttggtggcttttggtagtaacagccatgtcttcataattaatattcacttgatgcttacctgtttcagagcaatggaaatgagaagatactctgctgttgtcacatatgctcctgatatcacaaatgaataaaagttattcacatggaagctgattttaaagtgcacttaaggaaatcgatgatcaaaagatcagtaataaatgtatgtctaaggctgggcacagt

SEQ ID NO: 117263 - DNA, 1164 bp, Homo sapiens
ttgaatctctaaatttttaaaaattaggtaggtggagtttatgtgttttgtgaaattgattgtgtttcttttcacttgcagaaagtgctaggtggcgacagtgctatgagggccttccagaacacggcaactgcatgtgcaccagtatcacattatcgagctgttgaaagtgtggattcaagtgaagaaagtttttctgattcagatgatgatagctgtctttggaaacgcaaacgacagaaatgttttaaccctcctcccaaaccagagccttttcagtttggccagagcagtcagaaaccacctgttgctggaggaaagaagattaacaacatatggggtgctgtgctgcaggaacagaatcaagatgcagtggccactgaacttggtatcttgggaatggagggcactattgacagaagcagacaatccgagacctacaattatttgcttgccaagaaacttaggaaggaatctcaagagcatacaaaagatctagacaaggaactagatgaatatatgcatggtggcaaaaaaatgggatcaaaggaagaggaaaatgggcaaggtcatctcaaaaggaaacgacctgtcaaagacaggctagggaacagaccagaaatgaactataaaggtcgatacgagatcacagcggaagattctcaagagaaagtggctgatgaaatttcattcaggtgagcatttgaattacaaataagtacttgaccagatggcttctatttacaggaaataaaatgaatgccaaatactttaatgatatgttcctttttttttttttttttttggagacagggtcttgctctgtcacccaggctggagtgcagttactcactgcaacctccgcctcctcgctcaagggattctcttacctcagcctcctgaatagctgggaccacaggtatgcacccccacgcccagctattctttgtatttttaatagagacagggtcttgccatgttgtccaagctactctcgaactccagagctcaagggatccacccgcctttgcctctcaaagtgctgagattacaggcgtgagccatgggctggcctaatctatttatttatttatttatttgagaaaggatctcactcttgcccaggctggagtgcagtgctgcaatcacacctcactggaacct

SEQ ID NO: 117264 - DNA, 1054 bp, Homo sapiens
aactctgtcaaaaacaaaacaaaatgaaacaaaacaaaaggtgtgtctcagccaggtgtggtggctcacacctataatcctagcactttgggaggttgaggcaggcagagtgcttgagctgaggagtttgagagcagcctgggcaacatggcaaagccccatctccaccagaaaaaaaaaaaattagccaggcatggtggcacatgcccataatcctacctgtttgggaggctgaggcaggaggatcgattgagcccaggagatcaaggctgcagtgagctgtgatcatgccactgcactccagctggggtaatagaacaatacactgtctgggaaaaaaaaaaagtgtgtatctcaaaccaaccaaggggcaacattatatttaatggggaaatgccagaaacattcccattattgccagcaaacaagacaagggtgagctccatgatcatctcccacaggagtctatagatttttttttcttttttgttggggtagaatgtggcagggaacaatttttatttcactaaaaccttgtgaatacaaacatgagcaaagtaagttgagtggccagtaaaatgccggaatcaagtcaaggagaatttaccataaactgagtcaaaggagctgcagcagaacttgataatatgtctgaaagagttgaacaaatgttcgtacccttgtctcagtggtttatttctggggatccagtctaagaaaataatcaggctaagaaaaaagacttgtgtgtaacgggaagaaaatttgcacctggcctcaatagaggacaagcagtctcttaagtaggaagctgttttatttttcttcttctcctacttccctcctcattctctcctattcccttctttcttcttcctcctcttccttcttttctttctcctcctcctttctctcccaccccccaatacctgcttttaattttttttttttttaagacagagtctcactctgtcacccaggctggtgtacagggcacaatcttggcttactgcaacctctgccttccaggttcaaacaattctcctgcctcagc

SEQ ID NO: 117265 - DNA, 2060 bp, Homo sapiens
cggcggcggcgcgaaccctgctgggcctccagtcaccctcgtcttgcattttcccgcgtgcgtgtgtgagtgggtgtgtgtgttttcttacaaagggtatttcgcgatcgatcgattgattcgtagttcccccccgcgcgcctttgccctttgtgctgtaatcgagctcccgccatcccaggtgcttctccgttcctctaaacgccagcgtctggacgtgagcgcaggtcgccggtttgtgccttcggtccccgcttcgccccctgccgtcccctccttatcacggtcccgctcgcggcctcgccgccccgctgtctccgccgcccgccatggcgactgcgacccccgtgccgccgcggatgggcagccgcgctggcggccccaccacgccgctgagccccacgcgcctgtcgcggctccaggagaaggaggagctgcgcgagctcaatgaccggctggcggtgtacatcgacaaggtgcgcagcctggagacggagaacagcgcgctgcagctgcaggtgacggagcgcgaggaggtgcgcggccgtgagctcaccggcctcaaggcgctctacgagaccgagctggccgacgcgcgacgcgcgctcgacgacacggcccgcgagcgcgccaagctgcagatcgagctgggcaagtgcaaggcggaacacgaccagctgctcctcaagtgagtgctagctggcggccgcgttagcgccaaggaggggcgggggcgcaaccgcggcgaccagctcaccgggttctgccgtggggagggagcagaggccaggatgcacgcgtccttctgaaggaacagggtctcggtctccggaaaggagaaagaatctagagttcatagcggagcaggggtcgcggagggggctcgagctgtagcgctggggggccgtgatgcccatttctagattttggatacccgctgggacgtggtaagtgcgcgcctgggactgccgagaaggagctcccgctttcgcactcgaatccggggagccggcgcggagaggcggcccctcaggccccaggtgcggggagctggagcgcgagcgcgcgctcgcgtgcgcgccccagtttccggccggcgcgagacaaagcgtctagcggatttgcagtgccgggatgggcggccggggaggactggcagcccgcctctagaatgaatgagcttcgcgcgggcagagagaggaaggggagggaccttcccgcagcatccgcgtctcctgggggtgggtcccgctttggcgcgctcagtcttggccctgtgacgttttgcgaagattctacgcctgctttaggcgggagagagaggcggagcttgatccgtgcgcctccagccagccccgggcaagttaggtttgctagctggttagctttctctggggaaatgtgtcctgtcccagcggggatggtgcggtccctcgggtggttctgcgcagggaaggaaagctgggtttgtgcatgtcacggctaccgttcttagaattgcggttctcctacccctcaggcagcggccctctgtccccagcttttgcctcctcgtagtatagtcaggctttcgggtagagactgtgcttagtaccccttagtcgaccactgtgcagatagtagaccagggcaggtgacagggtgctgtgtaaatgctgagtgtttgagcgaaggagagtttgtaattcacctaagcgagtgcgagttttcattccagtgcacaaggatacatttgcagacctttgctggccttattttgactttctgataagcaaaatggcctgtcatcagtaggcaacaagtgttgatgtcatgctttagagatttgcaaaatttgggtctgaaattcatggtcgccattagcactgccagctgaaatttctggaggtaccttattctcactttgacaccctttgcccctggatgtctttctgtctgtatctgcgtgaatgtccctgtccgaagtctctgagattttgtgtatttttacttatccctcctatcatatgttttcggttcataaaaaagcatgtgcacgtggtaagaataaaatagtatag

SEQ ID NO: 117266 - DNA, 1634 bp, Homo sapiens
caaatatctgttgcgtaccagtcaccgttctatgttagaggatatgaagatttttttaaaaaaatgaattactgttctttgttgctgagagtgtagtgggggagctatatcccagcaagtaaagaaagattgtcttttgtctgatgtgaagcattttgatgctggcgcttttgtaatctttccaggagttagccacaggaggtttttcacacagtaacaaggctgccacctggctgacagtagttgtaaatgtatcgattctaaaatgcatgctggtttcagcggggttaaaaaatgagaataatgtgtattagaatcaatgaaataatgcatgtgatacaatttaggtaatagcagatgctaagggaataaaaataaagcggagtgaagggttagtgtgattaaggaaggcctgtctgaggagttgacagtacctattctctgagggttagtagtgttctgggattatatttttcttaagtctgtgctactgtatgtatattcctattgccaggattagatgactcttcttttccccccaacataccatcatttgctcaaaacatgccacattttagtttgctccttatttgaattaggactttttttatatggatttattcctcaatagcttttcatttttcttgttaagaaaaatttgccctcagtgtgtttgcagactttttgaagatatttaatcataatatctatcacatgaatctgctttcttccctagagttctctttgcttaaggtaggctgtgtactgatgtcctgtaacttattaaagacagcttcctggccaggcacggtggctcacacctgtaaagcactttgagaggcctaggcaggtggatcacctgaagtcaggagttcaagactagcctgtccaacatggcgagaccccgtctctactaaaaatacacaaattagccgcgtgtggtagtggacgcctgcaatcccagttactgtggaggctgaggcaggaggcattgcttgaaccggggaggcggaggttgcagtgagctgagatcacaccaccgcactccatcctgggtgtattttccttttccttggtttcttcatattttgttgaagaacatccttaagtaatttattcagaaaggatggcaggaggtaaactttctgagtcctgtatgtctgaaaatagctttgggctaggtatagaatactaggttaacatttttccagaacttggaaagtattattttgccctattgtcttctggcatctagggttgttaatgtctttcttttttttttgagacggagcttggctcactgcaacctccgcctcccaggttcaagcgatgctcttgacccagcctcccaagtagctgggattacaggtgtgcaccaccacacccggctaattttgtatttttagtagagacggggtttcaccgtgttggccaggctggtctccaactcctgacctcaggtgatccacccacctcggcctcccaaggtgctgggattataggcgtgagccaccatgcctggcctatatttaattttttatttggaactagagtgtttgtaattaagtataatcatcatttaggtagatttagattaagaaaacagctttgagagaattatagattccaggtta

SEQ ID NO: 117267 - DNA, 1003 bp, Homo sapiens
agccaggatggtctcgatctcctgacctcgtgatcctcctgccttggcctcccagagtgctgggattacaggcgtgagccaccgttcccggccagacattatcttttaagctcatgataactgctgatgagtaaggaaacttcaggctcagagagtttaagtattttgcctggtattacttagcaagtaatgaaagctagaaaggatggtagcctgacttctagcattgtgatagggtgttcacatacataaccttatttcatccatacaacagtgttctacaggtattactctggtttaccgacatgtagcaggctcacagagcatcattatctgtggttggtacttgaagtctcagataggatagttgattttcagatccctttgggtgctacttttggaaatgctactagttgcatgtttttcacgttgatagtttgtagccttcaagggaggtaattttggatttgtcagaagggtagtggtcagtagttgaaacagctgtttgaaatactgagggcttcatttgctaaagaaaggtgaagatgaattactgaaagagatcgcttttatcttttttctcttcttaaaaagctactttccaactttattccatgccttaataatttaaaagaaattaaaacctctaaataaatctttaatactcatgacagggtgttctttcattctttattcaagacacatttttgtggaacaggtactatatgccaggtcttgaaccagatgctgggaatagagaaatgggatactcagtccccattatcaagttacttacagtctagtggggaagacagaaaaccaacactacaggattgtgatactgtaagtgcagtatactaataaaatatattaagtgctgtgatgccagtatccaggtgttgctgtggagaaacaaggaccgctacctaaggcaggctaggagccgtgtgaaattttgaaagacatcccaggggaatctgagctaagtgcagggaggtaagta

SEQ ID NO: 117268 - DNA, 1109 bp, Homo sapiens
agtgcaatggagtgatcttgactcactgctacctccatctcctgggttcaagcgattctcctgcctcagcctcttgagtagctgggattacaggcatgagccaccacgcccagccaacttttgtatttttgtatttcaccatgttgaccagtctggtctctaactcctgacctcaggtgatctgcctgcctcggccccctatagtactgggattacaggagtgaaccaccgtgcctggccgagtttttgtgtattaagttatatttgttttaatttcggggaagttcattaattttcctttggaaaaatactgtggatcacatcctttttccctttggaagggaagttaacatgaggacagtgttgaagctgatgagtggctgttggagcaaatgcatgcttgataagcagtttgagcctgttacgaaataaaattatctagttttaggacaaggtttttatgtgggtatattttactttaaattgaaaataaggtttattttttctctaaaggtctggagcatggctagatataagagacatggcatgttgatgctgagctctgggtgtgaagagatccccagacacggatttgtgtgatagtcacttgagtactgcactagtgttgagtggtgttcaggggctaccagacagctgttcagaagaaccttacagtatatgaaagcaggaacagagcttagccagctaggcctaattggcctggctctgtatgtacagtgggtctgttttaagggatttaaaaatccttgttttgtggctttgattagaaataagaattttgtatagaatgatttctgttagctgattacaggtgaaaaactaaatggcttttctctttcatctcctgtaatatatttgtttttctaaataagaatgggcctgaggtgaaatgttagggataggtactgacacaaactgaccaagagaatgttaacaggtgggcaataatttgccgttaccaaattaattaaaactattttgtaatgagcttcagattatgttgtatttgtccctgcaagtttacttattgatttgtttcacactaattctttgttccctgtttaagtggacaatcttattttttcaag

SEQ ID NO: 117269 - DNA, 1870 bp, Homo sapiens
atcagcctctcaaagtgatgtgattacagacgtaagccactgcgctcagcatgatatcctgacttacagttcctgtatgttttggcttataatatgcattatatttaaaaaatgaattttcatttcttcaaaaatatcctgtgttagtgtgcctctttatagaacaagggggacatgcagtctcactcaaggacaagcaggattctggtacattggtctttaatatggacgtctttgacccatagttattagtaatcatgtgacattgaaagagaatgttagccaacaaaaactctagatccagtgcttgtgaattgcttctctaattttgataggtgatgggagcctttatttaaactacttcttttgtttgtcccttcagcagagagggagaagacctcaagtcatcagtatggtttgatgtcttatgctttttaaatctgttccagctatgctaagaaggaatctgatcttaatggcgcccagatcaagcttcgagaatatgaagcagcactgaattcgaaagatgcagctcttgctactgcacttggtgacaaaaaaagtttagagggagatttggaggatctgaaggatcagattgcccaggtaaggtcaagcctactcttgagccgtatgtgacaggttaattgcctcatctgccttaagccatagtttgattgattgattgattttcaaatgtattttatttttgaaattttatatatttgttttctgatggtttacttgaagaaaagtcttgaggtagctaacatgcaaaacattatcacctcccaggcattatatctggattggccagatcttgtggttcccttcttcttccctattgtgcacacactcattctgtctctgctctcaaagcctattttgttagttaggaaataagtaagaaaagagatgccaaaatgctgctctccacacaggaaaaaatgaaagtggttagctaaaataactagtttgatttttgaaatgtgagtgagtcatacgtctctgttctattccctgttgccaattaacaatttgactggtcgtttggtatgatactctgtgggtgggaccagcaaatgaatacccagttctgtgataaatgttaagatgaagtaattatacattgataaatatataggaattttaacacttgatttgatttgattcatagatatcttatgttcattattaaatgattgccatgtaatttttatcacaattctttttccttgtaatagttggaagcctccttagctgcagccaaaaaacagttagcagatgaaactttacttaaagtagatttggagaatcgttgtcagagccttactgaggacttggagtttcgcaaaagcatgtatgaagaggtaactatatataattttgctttgtaaaggaatggaggggttctagaatgactttgtcatagctaaacatgtaattatattttatttatgatttctttgccacaaaaatatatcagataaagaaataataaggtttggggatggggagaaattttgcaggtagattattcaagctactgctgctaaaagaccgcatttgagaactcaagctgttaccgtaaacagatatgatttcacttcatcttacttatttttgtttttttgtttttgtttttttgagacggagtcttgctctgccgccaggctggagtacagtggcacgatctcggctcctttcaacctctgcctcctgggttcaagcagttctcctgcctcagcctcccgagtagctggaactacaggcgtgcgccaccacgcccagctaatttttgtattcttagtagagacgggatttcaccatattggccagggtggtctcgatctcctgacctcgtgatccg

SEQ ID NO: 117270 - DNA, 3441 bp, Homo sapiens
ttttttttttgagacggagtccagctcagctgcccaggctggaatgcagtggtgcgatcttggctcactgcaaccaccgtctcccaggttcaagtgattctcccatctcagcctcctgagtagctgggattacaggcaccctccatcatggctgactaatttttgtattttagtagagacagggttttaccatattggccaggctggtcttgaactcctcacctcaggtgatctgattgccttggcctcccaaagtgctaggattacaggcgtgagccaccgcgcccagccttccattctaattttatttagacacttccttaaaacagagtaaaggaaaggatcatgacaactacttctattcttcaatggtaaatttttcataaatatttgagttagtcaactaatattgttaataagatcctgtgtcacttgataatgatagcttaataccggcttttaaagaagtcatgtaaattagcttgtgctgcctattattatgtctaagaaaatggttttatggctgggcaaggtggttcacacctgtaatcccagcaacttgagtggctgaggcagatggatcacctgaggtcaggagtttgagaccagtctggccaacatggggaaatctcatctctactaaaaatacaaaaattagctgggcatggtggtatgtgcctgtaatcccagttactagggaggctgatgcaggagaattgcttgaacccgggaggcggaggttgtagtgagctgagatcataccattgcacaacagcctgggcgacagagtgatactctatctcagaaaagaaaagaaaagaaaagaaaatagtttcatttcacataaatctttacatgaatttatcacaactgttaagtttaactttccatgtgctgttttttcagagatgttcttaagattatcaatgaaacaattcagaaaaataatttttgcttagtgtttagtatagtatactgtgtataaatccttgattgcagatagttttagtaggccatccaggcctttccttggcttcagaaaaataaatagctatgctcctgaaaaggaatagaaagttcctaaggcttgagatgctaccacttctgtcattagttccatttcaaaaacctcaactgaaaactaagaggcaaaaaagtgtttattcacatgaccgcctgaggacaaacaggaggaagttcgtgtgtaaaacttcagatggctgtgatgtcactcagatgtgtaccaatgcagccatggtaagtagcttggctttatgctttttgttttttccccaggagattaacgagaccagaaggaagcatgaaacgcgcttggtagaggtggattctgggcgtcaaattgagtatgagtacaagctggcgcaagcccttcatgagatgagagagcaacatgatgcccaagtgaggctgtataaggaggagctggagcagacttaccatgccaaagtgagctctcttcagaagattcttttgaacacttaaaatcattacttcacaattcccatgatgaacatggctttatgtttattttgttctagtttttaaaaatgattcccctagtctccatgaaatatatagaaaattgattttttcaaaaaagtgcagttttctataaactaaatgttattaaaaattactagaagaatgtagggttgttgcaattttattagaggttaggttttgtctttttgtcccattgatcattcgtactatgccatagtagttgaacccaaaccatgtgaaataactttcttccaataacaagtactgatcatgctgtcctacataaacatccatttagtaatgaatgaatgtcagactgcattagatctcactttcatgtcatcattgtgcatagattgtgactaccacacttccggcttttttgcataagggccaaatggaaagtctctgctatttcttcttctgtcactattattcacttaaaaaaatattgtagaaacttcccacttatattagctgaccttacaagaattcataaaaatcaccaactagtacaggctttccctggtaaatgattttgccttgtgttttaaatgttacatgatttgattaaaaagacttttttgtggttgacttagaatattagagtcacagagttattgaaaattttcattgcatggctttaaactgttcatgttgctttttatctattgtatgaagtagcagttagtgaaagtgaaagatcttattataagcagtaacttcagttgtataacatttatctaatatcacacattgagctatacagtgaaggagctaaagtaaggatccgtcacagactgtggcctcacagggagccagggaggagacacaggagcatgtccctgagacacacatacacaatagtgttatgggatttgtattttactcaaggagttttttttgcttctgaaaggaagtgtttctatctggtttgaacgaatctataaactagtattttctgcttgttggtttacattctgtattggatttggtgggttagggatatgtgatgtttcttttcttacagacaccaccacagtcaagttgctattgcccagtcttcttattatcagtgttatcttagacattaaaggtttaatagatgaaatattgaagtaataagctttgggtaaaggcctaggtatattagcattcttaaagctcattatttaggaagtgactctaaaagtcacacagaattaccatcattcacaccatatcagcaaacttcatgatgcttttcctgtgtttcatctaccagttaccagcaggacttaggtttgaaatgccttgaggtgaatcatgcttccttttttgtttcagttctagataagactgactatgctttgcttcttcttttagcttgagaatgccagactgtcatcagagatgaatacttctactgtcaacagtgccagggaagaactgatggaaagccgcatgagaattgagagcctttcatcccagctttctaatctacagaaagaggtaaataatcatctttctgtaagaagttagacttgaaggctaccttcaccacgggcacctacctgctttgcttgggctgatgtcactcctccctctgtttgttacagaggatggtgtcatcctgtgctttcgtcttcacagtacttttctagattcgttcattttgcattgcataaacatcctgtgagcagatactattgttcctaattagtagattacacagagctaagggacttgcccttgaggaaggagcctgctagtttattcactgtacttaccctaggacccggatcttccgacctgtctaacagcttcatctctacagagttattctcaacaccttccttttttatatcatttgaaaaccaaaatgaagaaaaacatgcaaaaattctttgtgggtggtgaatgctttgtgtttctaga

SEQ ID NO: 117271 - DNA, 3419 bp, Homo sapiens
agaatgattcagcaattaactcgtcaccttaattattttggaaataacttccgcttctattttcctcaagggaggaaatcttgttttgaattttccacatgagaataaactttattttacttttttttttttttttttttttttctttttgagatggagtctcactctgtcgcccaggctggagtgcagtggtacgatctcggctcactgtgagctccgcctcccgggttcacgccattctcctgcctcagcctcccaagtagctgggactacaagtgcgtgccaccacgcccggctaatttttgtatttttagtagagacggggtttcaccgtgttagccaggatggtctcgatctcctgacctcatgatccacccgcctcggcttcccagagtgctgggattacaggcgtgagccaccgtgcccagcctattttactcttgattgggcttttcttccttcctttttctttttaccatttttagtaaaatatttttctaattataaaactgatgacctctgttgcaggaacttagaaataaagcagaaaatgagtcccataaaatggggtgatataaaataatttagttaacacaggggcttttacactgtctatcatgtgctttgttacttacggcacaaatttttaaattattttaaacctattttgtgctgatagtgttttgaagattttcatttaatagcagagctggaagcacctctgagttcattccatgtaaccacagatctaggtgagtttaatgatttgcccgttgcccagaggctgcagactgataaatgggtttctctactccttcccagtttttccttttataactcattttcttcaaagaagatttacttttagaaatttaacagataatctttttttccattgcaccatctgtcttagtccttttgggctgctataacaaactactattgacttggtagcttataaacaacagatatgtcagaaattatttctcacagttttggaggctgggaagtccaagatcaaggcactggcagattggatatctgcctggtgagggctgttccccgatttatagatggtgccttcttgctgtgtcctcacatggttaaagggtgaatgagcacccttggccctatattataagggcatgaatcccattcactagggctttcctctcatgatctaattaccactcaaaggccctacctcttaatatcatcaccttgagggttaggatttaaacatgaaatttgtgggaacacaaacacacagactgtatcactgtctttgtttttcttgttgtttttttttcttctgagacagaatttcgttcttgttgcccaggctgtagtgcaatggcgcaatctcggctcactgcaacctccgcctcccaggtttaagcaattcccctgccttagcttccctagtagctgggattaccggcatgcaccaccacaccctgctaattttgtatttttggtagagacagggtttctccatgttggtcaggccggtcttgaactcctgaccttaggtgatccgcccgcctcagcctcccaaagtgttgggattataggcgtgagccactgcacctggcctatatcaactgtcttaacaggtacttttccaaaaatgggcctctctgttcttgtactgagttggcatttactactcttttccatttactaatagtaagttgtctactagttactgtctatccctcaattttattttttcctactgtattattatttttttggctgctgcctaatccatttgatttacttagtacagatcttctcttgaggttgatcttcactgtgctttggatgaggagactgttattaataagtagtagtgggctctgaaacttagtagctatgtgttctaacctaggttcaaggctgtttccctgttaattgaattcccatttttgcaagttggtttttttttttttttgagacagaattttgcttttgttgcccaagctggagtgcaatggcactatctcagctcactgcaacttctgcttcccaggttcaagtgattctcctgcctcagcctcctgagtagctgggattacaggcacgcgctaccacgcccagctaattctttgtatttttagtagaaatggggtgcaccatgttagccaggttggtttcaaactcctgacttcaggtactctgcctaccttggcctcccaaaatggaagggattacaggcgtgagctgctgccttaaatgctgggattacaggtgtaagccactgtgcctggctgcaagttttttttgttaaccttatcttagtggtttttaagtaatgttaggcagtgcactgggggtttccaggagctaactccttagcagataggagacgagcaatccctttagccaaaatagtttttaatttctctggggtgaatctttcctctgttcattattggtaacagactttatggtaaacagtatattttgaggaatatttttattagttgataaattttagccttagaaaaatcatcaaaaataaaaatgttatctttttgaatattttcctattgtttgtcttaatagtgtttgttgctgagtcatatcagtttcatcatgctgcctattaggccataagaatttccttttggttaaataactcaggttagtgaagtacttcttaaattttacttaaaattgacatggctttaaaatactggttttacaagatatatttaaataatatatagatggtagcagtgttatgttttggaattagaaattttacattgcttatagcatctctagatttttgacttgggaccaaatgaattggttggttagagtctgcttgccttagagaagagtacagtatggtacttaaaaacacctctaacttttgtttttctaacacccagattctggagactttggttgcagctagaccttaataaaccagtacaattacattacatactataaaatatttaaaaaccccaagatcatcagaagtcataaaatttagggttagtggcaagatctgagagatcatctagatagttagagctcttcattttccttatgtggaaactggtttagtgagattagttacagcttgcttatagcctcataggtagtttcaatggcagaattagaaaggagaatctaggtctaacttctcatactgtgttccttatatttcactacacaggtgtaagtgcagctactgaaaatagaatttaaatatttctatttaaaatacagaatgattcagagtaactttaaaatttttatacctagattttgatttttccctcttaaagagctctacaacatcaaaggcagtcaaacagagacatcattgggtttataaatctcggctcaggttatctgtgaatcttgggtagtttatatctctcatcaactctccttta

SEQ ID NO: 117272 - DNA, 3137 bp, Homo sapiens
gcccccaaataggtttacagtgactcttgattattttttaaataaccttgttattttggcataattttagatttacagaaaagttggcaaagtactatagacagttcttgttttcctctcacccattttcccctgttgttagcatcttatgttaccatagtatatttgtcaaaactaagaaactgacattggtatattactgtgaactcgtctccagactatttggatttcaccagttcttctgttatcttctttctgttccaggtgccacatgcctcccctggtctgtgacagtttcttgggctttccttgttttttatgagcttgagtcttgagtaagattgtccaggtatcctgtagactgtcccccaatttggatttgtccggtgcttttcacgtgattagactggggttttgggttttaagtgcccgttttgtcacatcgtatcagggattgcacgtatgtgataaccacatgacatcactggtggtgtttggtttaagatagtgtttgtcaggtttctccactgtcaacagcgctactatttttccgttcccatacactgttcatggaaaacagctcactaagtccagcctaccctcaagggtgaaggacagggcaggacttaagcgccacattctggagggaaatctacatttattaaatggcattcttctgtaacgatttatccattccccgtttgtttggtttgtttgtttgtttgtttgtgtccgtatggaccatgggcatttactttatactttgggttgtaagctaatactgcagtatttacttttttggcttaaattgtttcatatttggccactgggagttctgtcagcttggccactatgtcccattgttttttgagcactttgttgctttctggtactataacatgctctaggctcatcttgcattttccctgccccagtcctagaattatccagtctccaaggagccctggttcttgttattggagaatggtatatagaaattaagatctgggcactgagtgtgctcactggtactgggtatcactgcttcttggccctctcaccgataaaagtgggtaacattttatgtatgctaacccatgtgtatgcacatatttataactttttctgtctaatcatttgtgttaagataaacatgaattcatacagatgtctctgacttgaatctagtaggacagcattcaattttggcttcctttctgacatacctgtatcttttctctctcagagtgagaaacctggtttttatcatccatttacttatctgttcagccccagtatatgttaaagcagtttcaaaattttgaacctgtactgctgtgaaaagtaaatttaccagcaagagtacagtttttatgtatttggtagctcctttttatctctagccttctagatttagtttttgcacattagatgccctttctctcctgctctgttgcaggtacttgtgattctgagggcctaagctatccatcagtctttttgagttgtcactttctgaggctactgagatgaattctgtcatggagaaacacagaagaataattacccagcgagccacaaggtttctaagatgaactttctggtgtaggatgtgtgatttttaatttttttatgccaaatatacagcttctatattcacagtaatactttacaaatcaccctatattgtgtgtcctttgtgtgctaactgaacatgagatagcccagcaatcctaaagggacactaggtagtgccttccacatagtaaccagagtccctttgccttggtttctgaatattcctcagcagtctgctaaaacgtacttttacccactcttaggtttattttgtcagtcagtgtttatatctttttttttttttttttgagacagagtctcgctctgttgcccaggttggagtgcaatggcgtgatcttggctcactgcaacctctgcctccggggttcaagcgattgtcctgcctcagcctcccaagtagctgggattacaggcgcccaccactacaacctgctaattttttttgtatttttagtagagacggggtttcgccatgttagtcaggctggtctcaaactcctgacctcaggtgatccacctgccccggcctcccaaagtgttgggattacaggcgtaagccaccacacccacccagtgttcttatctttttaagttctttatttaatttatacttttggaagtaaaggctttgtaagggagccagacttgacttttaccaaaaccacatcttaacatttttttggctaagtacagaaaaattatatgtatatttacagaacttacatttgtggaatatgtcttttattcttttatcagccaaaactatcctgaggtctgtgttttgtatttgaggaattttgggttttaatttcttaaaatctcttgaattctagtgagttagagattccatagggttgtactgttttccagtctaggaaatgatttaaaatagctgcctggtgctaatgttggaatgttcctagaaagtaaatatgtttccttgcatcttaagtctagagcatgtttggaaaggattcaagaattagaggacttgcttgctaaagaaaaagacaactctcgtcgcatgctgacagacaaagagagagagatggcggaaataagggatcaaatgcagcaacagctgaatgactatgaacagcttcttgatgtaaagttagccctggacatggaaatcagtgcttacaggaaactcttagaaggcgaagaagagaggtaaggaacttaagggtcaccctaccttatggtccactttttgcctctcaccctttttattgaaataaaaataaatagcattttaaaaagaactttattttcttggtcatttctttgaacacctaggtatagaagtagtaatagatcatatttctacctcatcgcagaaaatgttgctcaagtactcttagtttatttattattattactttaaatgctgaactgcatcaggatggattagttcctttgagattttaagtgttttggtgatttaatatattgtaaaatgccaaactggctgaaagagactttacatattatttatttatttatttatttatttatttatttatttatttattttt

SEQ ID NO: 117273 - DNA, 3116 bp, Homo sapiens
ctgcctcccgggttcaagccattctcctgcctcagcctcctgagtagctagtattacaggcgcccaccaccacgcctggctaatttttgtatttttagtagagacggggtttcaccatgttggtcaggctgatcttgaactcctgacctcaagcaatccacctgccttggcctcccaaagtgctgttgggttacagacatgagcctctgtgcccagcccttgtttttttgttttttttttttttaaggcgagaagggcatatgtgttttaaaaatgaattgttttatttttcccatataggttgaagctgtctccaagcccttcttcccgtgtgacagtatcccgagcatcctcaagtcgtagtgtacgtacaactagaggaaagcggaagagggttgatgtggaagaatcagaggcgagtagtagtgttagcatctctcattccgcctcagccactggaaatgtttgcatcgaagaaattgatgttgatgggaaatttatccgcttgaagaacacttctgaacaggtaataaaatagacccttttttttctagcaaggctttgtggattgctagattctcttgcaattgtcatagctccttagtttttgtttggattcattacgtcttcatggaataagggtttatgtcctttttacttaaattcataaaataaaataaaaattaaaataggaggaggaagagttaggtacccttagtagtttaaagatttgcttcattaacccttctttagagggccagggcttttttgaaaagcatgttccttttatcacagtggttctgaggatgagttattattattctctgccctagccaaatttgtgaagaagttggagcaattggatgaaaatggtggatattctttcggtcattaacttaataaaaagcttactgaaagaaggagataagagcctggactcagatattaagggaatatttttccctgcaaataaatgaatgaacaaatgctaatactttacatgaaaaatagcatgaagccttattttgaaatatgtttaaaagtaaacatgaagtattcatagcagagatttctgaaatttagggctggggctttcgggagctctgtagtgtgggccttccctagctctgcatcaaggagctggaggccatgatgggttgtgagatgatactagaggaaggcatggtctgggagcgtgcaggcggcagtgggatggatgtcacatcttgaaacatatgttcagggcctgctaaaagtagttttgaaaattagtcttttctcaccacagttattaaaactatcttgcatgtggatgaatatgtaatttggatgagtgaaggagcactaatgagcaccaacagttttaatgctaaagagaataggctctaaggtctctttgtagccttttttttttttttgagtcttgctctgttgcccaggtcggagtgcagtggcatgatcttggctcctccacctcttgggttcaagagattctcctgcctcagcctcctgagtagctgggattacaggtgcacgcaagcacgcctgctgatttttgtatttttacacagggcttcaccatgttggccaggctggtctccaactcctgacctcaggtgatccacccgccttggcctcctaaagtgctgggattacaggcatgggccaccatgcccagccccactgaccctttttttgagccccttatgctttcatgtatgagagctgaatgtgggcagaagtgggacagatgcagaaggaaaatgacagattttcttctgtttctaagcttatgtgtctattttaaaagcttgaagtaatccaatacttgatgtttaaaaattgtgattatgacagctagatagtgctgtaaatttgaaagacccaccttatctagcagtgaatttgaccatttaatttggttcataccctgttcttccagttctgtcctctttaaagtcaagtaccttactaattaactcattgttgaagttactgtttgacaaaatgacagaatcgtgttttctttttatagtaggaaaacctgaaatgtgggaagatgaccataaagcggtcttagtttaactgcctgtatggattaatttatttgattattccacaactttctttatctttgaagtaacacccctcaccctcctttctgtgtgtaggatcaaccaatgggaggctgggagatgatcagaaaaattggagacacatcagtcagttataaatatacctcaagatatgtgctgaaggcaggccagactgttacagtaagtgaatctagtcatcatttaatttaacttcattgtgttaactaacaaagtaactcaaaaagttttttggctaaaagagaagcattttagaaatggccgttaaagtactttttatattattagggcattacaagtgctataaaagatttttaaaattctgtcttattgagagtagtgaagaatggacctttgaattatttttatcttgtctattccagtagatataaaagctatctctaggctgatacttatagcccagtgtcattcaggagacactgcttggcataaagaactgttaagaatttagcattaacatatgcctaaaacagcaatctctagccttgggtgagcttcagaatcatttgggtagtattttggtgttcaggccctacttcaccctttgctatctttagggttggggtaggagcctaggttttgaataaaagtccttagattataggcacccttgtaaattttcactaattggcattctgtgtcttgatttctaaatggctctctattggtatgttctgaaatactacatctttaatagttactgaattattattagcttactttttagagaagtatgtttcattgagtaatcaaagattcttttgcttttacttagtaggtagatttagctaacaataaaatatgttaactttgatacagatttcaaagaagtcactcttttcatcctaaaagaatgtagaggtgactgtctctttccttttatatattctttaaaaaatattaaacgcatgttttaaatgtgtttataattttatgttgatacaaaccttactgttgaagatcaaaggctcagacttctct

SEQ ID NO: 117274 - DNA, 1481 bp, Homo sapiens
ttattagagggagtcacagaaggctctaacatggaaggatggcctataaaacccacagagtaatagaacgctgaggctaccattcactgagttagccagccactgaatgtgggttatcacttgctcttttcaataatcgcacctgttacaggtgccatttctaccctgttttatggatgactaaagtaaggtaacttgctcagggtcagctggtgtgtaaaggaactaggatgtgagtgtaggcagttttacttcagggtcttatatattatcatcttcacttatcagatggggaagctgaggccttgagaagctctgtgagttctcctggccacatagctgtgtatagcactctgtagctggggcatagttctcagacttttagaatcaagtgtttgagtctcatcgcattgctgtcgttggcgtgtgggagaactgggttctgggtgtactgacatgctttggttttttacagatttgggctgcaaacgctggtgtcacagccagccccccaactgacctcatctggaagaaccagaactcgtggggcactggcgaagatgtgaaggttatattgaaaaattctcagggagaggtatggccagtttatcaggaccaccacaatgttaatttcacttaaagttcactgtgcaagtataatcaagatcagattgaaacgtgcaataaccgattgcataaacagaccaaagctgctaagttaattgaactgaagctgtctttaagttttaggaataaataggagtgtattatagagtactgattattagcacaggctccagaacagattttctgtgtcctgtttctgttttcactgcacattagctttgtgactttgggcaagttacttcacctctcttagatttgtcatttaaaaatggatattaatgacacaatatccatgagctaataataagaatgagacagtacttgggaaatgcttggaatagtatctggcatagtacctttatctagtaaatgcttaaattattaaccttgttactagctctcagaatgttcatgaaactgtgagtttgaagattgtggagtgtacatcttcttggagtgtgtgttttcagtgtgtcagtcttagaatccttgtcaaagtaccttaccttccccattgccacataaagacactgcatatacccctaccaatactagtcttagaaatactacttcctaataaagcggctaaagtgtgctttgaagctagtaaaacatggcttcctccttgtctttccctagcgaatcaccttatccaggtgctgtaccacgcatcactgagcctctgtttagaatttgagtccctcctttgttgctattgccataagcatgttaatggagcttttgttgtgagttcagcatggtttgttcttctcattttccttttagttgtaatactgctttttcatcctttgcctaccaggagagctgtaagttggcttgcaaggaagccattg

SEQ ID NO: 117275 - DNA, 1050 bp, Homo sapiens
cccaacagctttttggttctaaattattatttattatttttctacctagatttttagacattagctcacccattttttatacggctttctgtattagattaattggtttttgcatgttttcaaatgaagagtgcttaacagcagggttacacttaaagtagttatgttaaggtaattcataataatgaagacaggcaagttgctgttttctgaggttctcattgaggctaatagtcttaagctacatcatgagccttaagagccaatgtttgcatatgggatgtataccacgagcttctagaagctggaatgtggtaattttgttatagaagattttatttgactcgttcctcattttaagatgagttgagaaaagctgggtactctcaaagttttttaagaatttatttttctgctttatatgctgctatctcctagttgatagcttgaacggtggttgatctaaagaatcacattttttttattactaatttggttaaaacactgatatttgtgaaatggctatttctgtttgtaaagatagaccaatttcacagaattgaagttactggctaattgagaggctcaaaatggtccatcttccttggtcctgcaagagtaataaaaaatccccacaaaatactgttctgccaccttactttatttacaaaacacattattgggcatatttcaaatcgaagtctcatttctgtgacactgggttttgattttctttctctgccattgtaaactagctggtctgtgttagataagcttttactgaagtaatattgtgtcttcccctgtagcattctctttcttgagtgaccttaggacagggtacagaataaaattatatgctctgcagcactcttgaggacacactcatttacttgctgccagatcatcaggttagccttgtgcttaagcaaaaacactgctgcatttgtgccaagtcagcattttccacaggaaagtaatctgtatttgacctttttagtagaaaatggaaatagttgctttctgtcatacctttagtgaatgatagga

SEQ ID NO: 117276 - DNA, 1058 bp, Homo sapiens
gttttaattataattaaattggaattattaataactaatgagccttcagtttatattctcaagctgtttgagtccgatcattaatcaaagtgtctacccttatcctgataagactttgtttccatggctccagatttttagtcttaagtctgctttgcttcattagccctagtcctggtctaaataaacactgtctcatatatttaacccccagggttgagaaccacttgaggtgggttgcatgaagtagcatgaattttttacctggatgccttctcatacattttggaggaatattttaaaacacatatgttacacttaacttacaagaaacaagcacaagttccattttctgtgcttcaatgggaaccatcgtaattactagaagtaaaataattatgtaagagataactcaaggcaccagacaagagggtcagcatgagttatatagcatgtcagatgctagaggaggtactccaggccagcagagtagttgagaagaactctgtgaggtgatgcttgtccactaatttgaaggatgggtgattatttggttattggagagaaggcagatgatggtgctctgaggatgttggaattcaccattgcttcactaacagaccaccccaaagcttagtggcttaaaacagtgatttcttacttcccataattctgtggtttgactgggctcagctgggcagtgtttctgttccacatgctgcagactgaactcaatcgagcaggctgtgttcagctcagaggttggcctcggctggaatatcttttaggtctctttctgtgtggatttctatgatttaagagtttagtcaaagctttatagcatggcaattgtctaacagagtaagtggagggtacaggtttctttcttttttcttttttttttttgagatagagtcttgctgtgtcgccaggctggagcgcagtggcgcaatctcagctcaccgcaacctccacctcccaggttcaagagatacccctgcctcagtctcccaagtagctgggattacaggcatgcgccaccacgcctggctaatttt

SEQ ID NO: 117277 - DNA, 1234 bp, Homo sapiens
aggcatgagaatcgcttgaacccaggaggtagaggttgcagtgagccaagattgcaccactgcactccagcctgggcaacagagtgagactctatctcaaacaaacaaagaaaaagaaaaaaagaaaaggttagaaaagatgagagatgataaagggtccatttgaggttaggtaatatggtttggtatccctgtagttaaaagtttttgtcttattttagaatactgtgatctatttctttagtattaatttttccttctgttttcctcatcagggaaccccaagagcatccaatagaagctgtgcaattatgtaaaattttcaactgtcttcctcaaaataaagaagtatggtaatctttacctgtatacagtgcagagccttctcagaagcacagaatatttttatatttcctttatgtgaatttttaagctgcaaatctgatggccttaatttcctttttgacactgaaagttttgtaaaagaaatcatgtccatacactttgttgcaagatgtgaattattgacactgaacttaataactgtgtactgttcggaaggggttcctcaaattttttgactttttttgtatgtgtgttttttctttttttttaagttcttatgaggaggggagggtaaataaaccactgtgcgtcttggtgtaatttgaagattgccccatctagactagcaatctcttcattattctctgctatatataaaacggtgctgtgagggaggggaaaagcatttttcaatatattgaacttttgtactgaatttttttgtaataagcaatcaaggttataattttttttaaaatagaaattttgtaagaaggcaatattaacctaatcaccatgtaagcactctggatgatggattccacaaaacttggttttatggttacttcttctcttagattcttaattcatgaggagggtgggggagggaggtggagggagggaagggtttctctattaaaatgcattcgttgtgttttttaagatagtgtaacttgcttaaatttcttatgtgacattaacaaataaaaaagctcttttaatattgatatactgtcctttttaacgctttaaaaacagattttgaggggagaaaagtattgtttcagttttgcttttgataaaaatataatttgacttctttgaactggatttttctttaaggctttgccagttgtggaagataagctattttgggggtctttcagta

SEQ ID NO: 117278 - DNA, 1001 bp, Homo sapiens
atatcttacccatcatccttttcatcatatcttaaattacaaagaaatttatttggatgccccttcttttcttgccaaaacacatgataaaatgagaaaaattgaaaagaatctttaaataatccataccctctggatcattggcttctaaacaaaatgcagattttttctttttaattccattgcttgaagtaacaacatggaattttaggaggtgccaccagaggggaatgtttcttagggttcaagcctttgagtccctgaagcaaggctctagtatctgtggtgtttacacaggaaaacccagaattctgaagttgggactgactgtccttccttgtctaccaaattaggggggggaaattccatgaaaaaaaggtattgaaggaagtagtttttagaattttgtgtttcttctatttggctgccttactgaaggggacattcagagccagattgatgaaaatgaggcaaatacgtggcaaaatacatgcaaaactcacagaagtcatatttcaagttctcagggagaggcgtcacattagcagtattgagtgggaagaggaattaacagggaacagtactgtaaatggatgctgctttgctgtcctggagggtcagagtgaggacagagaacaatcttagaggcagatcagtaaccagtttgccctggagccatgcatgggacccagagtgtaaaatccctcactgcctacgtcctcctacccctcacttccacaataatgcattttctttcacttttaacagcatggtaaatcctgtcctctcctgacatttctccagagacaaaatacacctctcaatttagggacacagcctgcctcagtagcttaattactttataacaataaaacacatattcacccagatttatgatgtgagtgcttcctccaccaatctgaattggaattctcagtttaaatgccagccaagtttgcttttagagaaatgccgcttctgttccattttgggtttttaaa

SEQ ID NO: 117279 - DNA, 1034 bp, Homo sapiens
gacagccagttcttttcttgaggaactcagtgtgatcacagttctattatccttgatgactatgcctattctgctatcccagggagctgtcaaaaaaaaaaataacatagccagtttactaatgaaaacggtgctattaattgttgaaatgaatgggaacaattccaactgtcggataatccccaaatccctatttaaaatctctgttgtttctaatgttcttcaaattaatggcaaatgtaataaacattgttttcatggtgaggtttagaaaatgctttcttgtatattagctgatttgcacctctcagcgtatgaagatggacttaggagcaggaacagctccagctcttgctcaatctgccttcctcccactatcgcatcgtaagctctcagataaggcagaaagccacagccctggtagaatgacctttcctaaactggctgtttcaggatgcactttccctgacatcagggaggtagttaagtgttctgatttaaaactctcctttggggggatagtcacctttaggtaagctaacacaccacccagcaagtaggtgaaagcagtttggaccccagtgatgcaatgtgttactgtatctaggaagtgttgaaaatgacccagagggtatgcaagtacatccaagttatcctgatgggggtagggtggggatgctgtgaataacaggaattattggaactggtgattcagctttgattggaaaggaaataaaataaatgattttttaatgatagagaattcaattatagtcatgggttatgtcccaaatttatactttcccacatagatgggtcttctccatagatagacttcacgtagaaagaataaacagcacattgtttttgcctttgaactaggtctgtgaatggaaaacccttgataagagaagtagttaatgacactaagttgctgtcacttagtgatgtaagtctaaaaaagctaacattcctgcatctcagtttccttatctgtaaattggaactaaagatcctgttacaaagagttgata

SEQ ID NO: 117280 - DNA, 1695 bp, Homo sapiens
ggtcattaggaaagaattgtctggtaggaggctgagtttcaaaggtgaagttctcgcctccgcagtcatgacaacagctccaaggttggggacgttaagggggaggttcaaattctttgacttctcgttaagacgatttgagcttattaaaaactggccatgatctctcagagcattagctaagggatacagctggtgatcctgatagggcattttgctctaaccttggaagaatccgtctagactccagccagaacttgattgcagacagaacagtggagaaagaggggccacagtcctgcagcctcagtctgtttccctggtgttcctgagtggtcctgggtactcacaggcacccgaactcaagggtccaggtcagtccagagtgctttcatggaaacggcaggctatgtgtgccgagaatgtcgctcagccaattgcatggaattcagagttcccctgaggttccctgagacttggttctccctgctctgatgggatttgggatagaaagtgggagtgcctggttaatttggagtttgagggcctagtgctttcaaagagagatccccacctgggagaatcataactcacatcctcttccaccctatacctacccggtttggacaagtaaaagcaacacttaaataagtggcaaaatctgcttttttcctgttgcaaattgaatattatatgagggacaatgactattcccagcttgatgctttggaaagtgcgtttggatttttccattttagacaaatgtcagctttcccccgaagtggcctccatcgtgcttgtttgttccaaatcatttttcaatgctgtgatttcccttctctttgctttaaacactcagtcacgtggcttgtctccaccgtgtggaggtgccgggtgcctggttgggtctctctgcatttctggcaggaagaaggcatttgtgaatactgtcagtacttgtgacaggttggtcacattggaacctttgcccctgttgtttaaaaccgaagaagactgtgactgtggaggtgccccgtgtgctcagcgctcaaatgggaaatggagaagattcccggaacgtgtttggcagtcacttctgagttttccattgagacccgaacatgaagaaaatcttctggctcctgccagttggccaacctctgtctgccttccccagctcacagggctgcacactgcattggggctgtcctccgctgctggaaaatcacgccggtgctcttcacaaacactgaacactggccctctgcttgatccatggaaccaagatgacaggatctcctgcctgttcttgataacagctgtagttttatttcagattttcatttaaacaaatagtttaaggcctcagctgggaaagaggattgaagtatccccaatggacaaagcctctggcacgccagaaagacatgtgactaagcctgagtgactttccttccttcccctcccaggttgctgggagaaataactatgggtttttgacaactctttcccaaaatgaatagtggaaggctgggaaacactgaattatgaaataaagcaaggcagttcattttgtcatccttggcacctgaatcctaaactacggtaatgagatcagccccttaacggagtactccagggtaccttgctcttaggcaatttgtttttctgtgtgtgctcttcaacagactctgc

SEQ ID NO: 117281 - DNA, 1088 bp, Homo sapiens
ccctgtaagcgtgacaatgagcacctagcagaaaataatgagacaacaaaaagagaagtattttttaaaattcattgggctggccagtgtttcactctgcagactcatcaagcgcctgatggacatgtttgtaaagacttggatggtcactttatttggaatgacaaattctgcgctccacataatgaggtcagtgaagcatccagaaaagaaatgtataatttggtagtgcagtctgtaagcacagccctgccacggctatttaagtttaatgaagcaactactttgccgctacacattcttagtgaatagcctccttggcatgtttttgaaaacttaaatgttgctggtaatcatgtcacagcaatctccttggagagcctttgtgtcctgttctcagaagaaatatgccgtttttccatgttaatggttttgaaattagtgatttgctctattttcattggaaaggaaggtcactttgtgatttcctaccttccctcattttctctgaacattcaggatactcttaagtcagttcatcagccatgcagtgcactgtctggttataacatgcctgaaaagccagaggaatgttctatcaaagagcggcatccctattctcagagactgttcttagaattcaaagtgtaaagatctaactcagagaggaaagttcctggacagaccattattgccattttttttcccgtttcagtcactgaccgccttgtattgtccattcattggtctcattagagaaggctgtgctccccacgtattaagcctctcacagaggacatttaaaaatcctttctgaagcagattcactcatgtaaaactaaggtcagacttatggatcctggaccagcattaatgacgcagaactctgtgggagcagaaagacgtctagccattctcagttcttcggtgtgggtccccaaacttagggcctcgggtggtttcccctgaatgagcaagcgcatgattgattgtggaaaagtgctaggtcctcatggctctgccaccccagtgagggtctggggaattctccagactatttggtggcctccacatttccttgggaaatg

SEQ ID NO: 117282 - DNA, 1047 bp, Homo sapiens
gtggcaggcgcctgtaatcccaccaacttgggagactgaggcaggagaatcgcttgaacccaggagaaggagattgcagtgagccaagatcacgccattgcactccagcctgggcaacaagagcaaaactccgtctcaaaaaaaaaaaaaaaaaaaaaaaaaagccatatatacattcgtactttttagattggctctttggtgttttctgctctgttagtgttctgcacagaaacagaaccaataggaacatatatatctatttctctagcaagctagagacccaagagagccactgatgtggttctagctcaaatgctggcaggctcaagacccaagaagagcccatgtttcagtttgagttcaaaggtaggaaaaactgatgtcccagctgaaaggcagtcaggcaggaggaattccttcttatttgggggagggtcagcatttttgttctgttcggaccttcacatgattgaaggaggcctacccacatgagggagggcaaactgtttgctcagcctatcaatttgaatgttaaatgttaaactcatccagaaacaccctcacagaaactcctagaataatatttgactaaatatctggacatcttatggcccagtcaagatgacacataaaattagccatcacacctataccactgtgccacttttgcctgcctatctatcccaaccaacagctacatgtgactatttgaaccagctcataaaagctcaatcacctaataatatttctgaatatggaagtaatgataccattccaactataaccagacattttattcccagtgggaaaatgtgtacatgagtttcaaatcggtgggggcagaaacacagctcccaccatgctcacacactgcctcacacagcaaatcgggacctgggcctggtagacaggatgagaagatttttgagcctgagatcctccttttctacactttcaacatgtcctgaattgatagaaaaatgggactattttggctctgtatccactcgtttcgtcatttattttttctttttctttcttccc

SEQ ID NO: 117283 - DNA, 1016 bp, Homo sapiens
gcacagctgaccccatactccctactccctccatgcgccactgcttctcctatcttttaagaaatgaaaacaacataaaatgctggggcccagctgtgcacctatgtcaggattagctgtaaggtccccagtatgctcagtcagctcagctattttgccttttatcaaaggagtcaccctaacctggaccttgtgggagacaaccacattagtggtataacaaaaacaattcagaacaaggcatatataccccaattcaactcccatctctgagctttgtactctactttgtacttcacatttgatctaattagtgctcagagtatttctgtgaaggtgcatttatcccattttacaaatgtgaaaatctagagtagagagttgatgtgccccagatgttacagctagccattagtagaccaaggttcaaacccaggtcttctgatgtgaaagcccttgcttgtcctactaccccttgctactgtggccatctagtagatcctaggactgtgcattaggtcatctgggactctgaaaataattaagtcagactctctgcagatggggcccagactgccttgggaagagctgcaaagcaggtcagcttcccctccagtagtgttgggacagcctccctcactgtcagtcatcccggggcccactgtgggtctaagcagaatcaccagctcccttgctgttccttccccatccctgccatcaagacagagccatttgctgctgtccatccatgttatggctcaagggttcagacatggtatagggaagatgggagcagggaaagacatgaactgctgtgctgtgtgacaaggccaggggtgtcactgaggatgcaacaggaagcaggcaggcaggtgagagaagctggggaggcgggagatagagagttattctagcacagcagtgaatgaattcagtttgaatgaagcacagaagtaaatgtttggacagcggaaccaggtttcatgatctttgagttgtcctcataacatgttgga

SEQ ID NO: 117284 - DNA, 1075 bp, Homo sapiens
agaaatgcttataatgaaaagccatggttcccttccaaggacaacatgtctctgtggtaatagatgctcactgatgtaatagtagtttacttgcctgatgtaatagtagtaataataataataagcttatactcttgcctttttgctatttgttcataatccttctcccttcctcaactgatagttattattttaacttttctagtgataatctttgtaccttaaaataatagttttaaacctcaatttcttgtcccaatttatgtagttaaatcttgactctcctgtctgttagatcaagatgttaataatccctgtgaaaacagagcatgagttctcttttaaacttctcttatgtggtctgaattgtctgtgtcttcaggagtcaggggccatgtttaattacttggcttttctctttggtgtttctgttttgtttttagatatgagtggtgaactttggttatccatctgtatttaagagcaaggggctgagttttatttttcttcacagatggtgtgggtttcccctgctcttatatatgtagatccggtttcctgttattgctgcctatgaataggaaatctgcatggaaccttgatgttgggtggggggcttgtctcctggaagtttcactttcagatcaagactgagaatgggctggattttagtcaggagtttatgtgtgtgtggtaaggggattcaaaggatttaaatacctggggatttgacgggggcggggtgtgctttactctagagtgtttgcatataatctggccctcctagttctttctagacagttttttttaactttttattttgaactaattttagacgtagagacaagttactaaaataatacagagtttctgtatgtccctcatgcggcttcccgtaatgttaatgttatctactatatccaggcagtttttcaatttctttatagatcaagagtcctctgatatttggcccccaagtaaaatcatgggtttctagtgcagtgcatggacctaaggcagggagtaggggaggagagtgaggggtacccacagtgtcccttaggcagacttcagt

SEQ ID NO: 117285 - DNA, 1011 bp, Homo sapiens
gtagcaggcaagcctaggttgaccaggtgtaccaaatgggcaatgagaattattatttatctaatgtaattttaaggggggaagagatttgcagaaaagcatagccttatcaaaaaaattaagtatgcagtcattttgagtaaactggaatttagaaaaataactgaatagatgattctactgtttctattagaaacaagatgtgaatctacaggacagactggcctgaggacccagtcctttcgaccttggggtatcagtgatagggagagatcgaaagcctatggattagagaggaagttctacctggtaagggggtccagcctccctcaggcagcattctgccatcccttttgagacaagtcctcaccaaattgacttcccttccatgtccgttgaaaagcccaccatgttttttcttgtcttctcattctgttgctctttctgtgtttcttctgcttcacccatccaaaccctaatccccacctccaccaagaagtcttctctgactacctggctttcccatgcattcacatcatatctgttacctttctctttgtattaacttgtccgtgtactctattgacagctgcttaaggattggacagtaacctactcagtaaccacttactaaattaaatgatttaatagttgttaaatttaacatctggtatctattggtccttttataacagtagttgcttgtcctcatactaaatttcaggtcagccctgggaagtactgtaagtattctttaatacttactcattgtcatcatatgagttgcttttaactatttgttaagggtataaattcaaaagtaaaatttttgctttctcttatcctcatttttcactccccagatataacaaatgttaacagtttgtatgcaccctcctagaagtttgtatatatatgcgaacataaatgggagcctattacatatactcttctgcgctctgatttttaaataatttatcctagagatctttctatctcttcacgcttatt

SEQ ID NO: 117286 - DNA, 1042 bp, Homo sapiens
tagatgatgcagaaaatgtgtccattttcttcctttttccagatggcagacttttttttcttacacaatacccatttgtatggcaattatgcccagaccagctttcaatgagtccattagagccggccagtccaacacaacttcctgcacagcctgtcccttggggacatggattctgttcacagggcaaagacctggatggcttgacccagctcccgttcctccaagctctagacttcatcattgttctctcaggctactctctccctgaccttcagatttgaccctcgttgttctatttctaggcctaaatttaccttccctccattacagcttcaccagccaatccagttgcattgcagtaatgtctctcagctgacttggtcgctggtattctggcacctggccactttaggggggcagagagatatattttcaaaacatgctatttgttaccagatggtcaactcctctaccaatcaaatacacatcatttatttgttcaacaaacaatgaacaccgattattataagactgttagtgctgaaggtacatcaaataagatactgtcatcctcagagcactcagccattactaatgtaccacactggatagaaatcagctaccccattgaatccatattatggaaacaaagcaaaatcatactaatacttcagagtcattctaaactttatagctttccagtagcttttctactagtgagactctgacttaaggttattaatattagaatatatattacatagaatatatattattctataaagtacattagaatatataagatcattaatattagaatatataatatagaatatatattattctgtaaagtatattaatgatcttaagtcagagtctcaagagcagattgaaagagatccttcatatcatttaaccaaccttcgtttgctatctctagccccctcccttttagcatggctccctgctaatcaacctccctctccctgtagcctcaataaaaatcttttggaaacatgtttctcagatctttttgaaa

SEQ ID NO: 117287 - DNA, 1093 bp, Homo sapiens
caatgagaacacttggacacagggtgtggaacatcacacaccggggcctgtcgtggggtgcggggagcagggagggatagcattaggagaaatacctaatgtaaatgactagttgatgggtgcagcaaaccaacatggcacatgtatacatgtgtaacaaaacggcacgttgtgcacatgtaccctagaacttaaagtataataaaaaggtataatatatataacatatataataaaagtataataacaaaatataggagaaagtgggaaaaaaataaaataaaataaataaaatctgccgacgatccatagtattctcaacagacttctctgctagatggtttatgagtgcaaacaatggacactaaaagttgtttgctcttcaggtggagaatttgtccaggaaacctattgttgacacttgtaatgagaaaacaggcggtgcaataatcatctgaagtgaatagagatttgttttactttttaaagatgaggcaattactatctgactccatcctaatgggtttcttcctgtggactgattaggaaaaacaggctggcaaggctcagtgcttttcagtcagagcagactttaagccatcctcgtggtgtcagccaggccaactgtatgaggccacaagggtgcacctgacctaggaaggacaaagcccttagatcagtgaaaaagagaaacatctatatgtatgtattatatatacacatagatagatggcttgatttatggagaaaaatcagaacaaaacaaccaaaaaaatgcacagagcctatgaaatattagttatttataagattctatggtagtgttttactttggaaaagcagtgtaactaacatggtagaaaactattctttaaaataagtataatctgcctcttatgggttttttgttttgttttgtttttgtaagggcaaatgccattctttgggtttaatcgcttgggttttttttcttcctgtaggacccatgccccctttgtgatgaagccaaggaagtactcaagccttatgaaaacagggtaatataatacagtgtggcttttatgtatatggattgcatattagatgtggtata

SEQ ID NO: 117288 - DNA, 1068 bp, Homo sapiens
agtgtcaccttccccattttccagcttggttccttttgacaccaacacttcccagttatgattgagagtgagaaaagagagtatgcagtgaacaagtatctttacacttctgcctggatctataagtgaatttgagtcctctttaaggggctattttaggctcctacagataaaaactactttggattttttattcaaggccttatttagtcatagactattcccatggcatttgtttagcatgtgatttccccttctctgatcaggagaatgcttgaggcccaaagccccaggcacagttcctttgggtttctaaaatgagagaatgggacaagtggtagcatttccatttaattgtggctgaaactgaggctttaggagatgaggatttgcctccctctttgggttttatgtttatgaaatcctcacctaaaaatgcactcagggaagtcaaacatgctgaatttcaacggaaactctatgtgaagaataacttcaaagctcaaaatgaagaactataccatttatgcttaattcctctgactgattagttagtaggagctgtgttggtttaaatttattttgacctctctagacaatttactcagaaccacttggaacaagttttgtctttaaagattatcaataaaatccacctttacaattacctaggcggcttcttttttgacgtgcatgaattgaggatatccttggtaaaataataatggtactgaatttttccctgtttgagaaataaaaacaaatattgggaaaaaccaattggaagggaactggcctttgcttaaaacccatcaaggggaaaccttgatttctcaaaatctaaatttcagtaccttcataattttgtgaaggctgagtaagtttaagccaatacctggtgccaaggtatttgctagtcagtcttacctaggcttagtgacatccttaggtgcagataaatatgttgaatatttaaacagtcatatcttagaaattcctgtttaaataatatttgtgagaaaactttcagttatttctatttgaaatttttttcagttttgcaattcc

SEQ ID NO: 117289 - DNA, 1087 bp, Homo sapiens
tttacttattttattttttagaaatgagatcttgctatgttgcccaggcttgtctacaactcctagcctcaaatgcttcccgtcttggcctcccagagtgctgggattataggcatgggacaccacacctggcccagacataactatctctaacatgcattcatgtggcagaaatcaaattagtaatttactatttgaaatgtagtagataattagttatattgttattataacatgaaattatttcccacttataaagtatctacatgggaatgttacagattgtttgatattaaatattctcatagattgctttcttagaaatttggacaaactcttcgtctggaaataagttgcattataaacagtaaaggtggacatctatctcttgatgattttttttttagtcgttctctattcaagctttaaaaatatacttttggttactgtgtaatatttgttacatttttgtgtttttatagtataccataattgaagaaaaatgatggaagagagtggaatagagacaacaccacctgggactcctccaccaaatcctgcagggctggctgctactgctatgtcttctacccctgttccattaggtacatgtagttgtctaacatctcgtgtgttttgagaatagtgaagatactatcatcttttctcagagtcaattaagaaaagaatgcatatattaaaacttctctattatttttcaggatgaaaggaaatagcctttttaatttaaagaatagaaagaaagtcttgtgtatttaaagtaagaaaacatcagtgttttgctttaggtggacttttgttctttatgttcataattttaccatcatttatattatggcagaaatatcctaaaaagcatgtgttagctttgtcttctgttctttttcttttttttgagacggagtttcacttgtcacccaggctggagtgcagtggtgcgatctcatctcactgcaacctccgcctcccaggttcaagtgattctcctgcctcagcctcccaagtagctgcaattacagcactcaccaccatgctcagctaatttttgtatttttagtagaaatgg

SEQ ID NO: 117290 - DNA, 1023 bp, Homo sapiens
ccctccttcatgtattgctcactccttctgtacttcctttgctgattcctcctcttctctccagtcttctgacggtcaccttctcatcaattcactctcagactatcccatggctttaaatactgtctctgtgctaacagttccaaatttatatctccacctgagaccttcctgtagactcttgatttatatataagttgcctttttgacaagtttacttgaatatctcaaacttaatatgtctagaactaaacttctttcctccacacttgctccctctagccttcttcaccttaattgatggcagttctagccttccgttttctcaggcaagaaaccttggagtcagccctgacttctctcattacccacttctaatccatcaagaaatcttatttgtaagacagacagttcttgtttttcaacataattgtgttccataaagttgctacagactgaatttgtgaatactgagccattgctcccaggggagatacgatggttaggatactgtgggcctctggtcacattttgccaacctgtcaatacataactttgttttatgcctctttctgtttaaatacatttttatacacatacatgcacatatttttgattcattaatattgaactctcacagtcaacagtactgtaactcatgcttgaatgcagcttatttaacacactcgttttctcattaaggcacatcattgtcttcttgtgcttaggaacactacagcactccagcactacacttgggggccatttgaaaacagcagttaacatcaacaaacacaaagatgcaaaaaagaggtgctaaatagatcccaaaaaggatacctgtttacattgtgtcagctgaaagaagaagtcagggcactgccttgttcagcctcagctaggagtgtatgcatcaggcaactcaaatttctcatagctctgtgcatgtccgattttgagattataaataaatttcatgtgtagtcaatggaatccacaaaactaataggatcgatcaactgt

SEQ ID NO: 117291 - DNA, 1055 bp, Homo sapiens
ttatttaacagtaacaatcaatgagaaaatgtaatataaaaataatccacaatagcaaccaacatcataatgcatatggaataatttggaaggtgtaccccaaactgttgatactacggaaatgtaattgtattttgtcattttttactctacatttttgtattgtttgaacgtttacagtgagtatatatatgtgtttgcatataaatgtatgcatgtattgtgtaatcataaattagtatatttaatatgtaataatttgaaatggtctctaacctctgccattgttgtttagggtgctcaggaacggatagatagcttgcgtcgaactggggtgatccatgaaaaacagacagctgtgtcagtagaaaacttcattgcagaattgctgcctgacaagtaagtgtattatgtttctcttggaagcaaaatataattgggtctgggagttgacactgaatacttagcaaaaagtgtctcctgttttataaccagagagaaaagtatattttgatgctggctatatcacttaactagctgtgtgtcctgcatggcttagctggcatttctatccttgtgtctcttttttaattataaaatggagatggtcatgcctgctttctgagatcatgctaataattaataaaatggcactaagtataagatgatagatttggtgtggatataattgaccatgagtagcaaacacaattattctcatagttattcaaagtcgtggaatatatgggcaagaaggcctgatggcattctctaggtttgagtttctagtgagcagtatctctcctgtactcataatagtttagaaaaacctccagacagcataatttatcattgtttttcaggtggctttttatgggaaaaatttttaatttgcttaattgatttatattagaataacttccctttgttgaaatctaccttcttttgtatttgcattatggttttgttgtttttattttttatttgtttgttcagtgttgaataacaatgggcatagcattttgtggcttgtaatatgcaaaatatatcctcca

SEQ ID NO: 117292 - DNA, 1070 bp, Homo sapiens
aatcattatttctctcatttttttctttgtttttactctgagttctggaaaagatttaccttttctagttgttttatgtccgcctttcgtttgctttcccttttatctcacatttcatttccactgttatctccatttcccttttccttgattgattgtcctcctgttcatctttagtgaaatcaacattagaaaccttataggcacgtgtctttaggtttttggctgaaaaatggacctaatagtgtacctatccacacagtttccaggagaatgtaagtataaatgataatccttattcctctttttttttttttttggtgtgttttctctaatcctttcatgaacaaaatggaatataaatatatacttgcattggaatctctgtgctcttaagtggtattctattgacttttttctgtcaatttcataaaatttttgttacagttgtagtttgtacattgttaaatatcatttcaaaactgcctttcaaacttatttgggacatgaagacatttgagaatctaagaaaactattgggctgtctcccaagaaaaatgcgtgtatgtgtactttcatagaactttggcatatgtgttcacataatccctaaaagtaacctctggcctacttattacagtttagaaagggggctaagaattgatgcttggaatttgaaattttactgaaacttttatttataccgtaatttcttttcataagttcaagaaaacctttttatagatattaacattacactcatttcaatatgaaggtgattaaaagactgtaagtgaatactatgcatactgttatgccaataaattagaaaaattaggtgaaagagtggattttctaggaaaatagaagttttgccatagttaagagtattaggttgaaccaaatgacgttgttgcctttgatggtcagaaatagttatatattgtcagtttcatatgattcagcttaattgaagcattaaaatggaagaactttatgtaactaaaaaaaaaaaaatcactgagtaccaatggtgttacaagtgagttctacaaaatgttcagagatga

SEQ ID NO: 117293 - DNA, 2016 bp, Homo sapiens
tttgcatcagattgacttggaagctattttacgtacgtaatactgtactgtttctcttggaaccagctgtagagtttccaattcagttatcttggtgtctcagttatcttagtgggatgtgagaaactggatatcgttaaaaaagaaaaaagaaacaagagctcctcaggtgattgtaatacatggcacatttggtagtcatgtataactgtatagatccgttctagatgtggctatacttctctggactatacctaacaccctaaaacagaaaaaccacatcagtcttggatatcaagcaatgagtttattcttctgtcattcctttgtagatgaataaatgatttgaataggagcaaatatgagttgggtcaattaggaatgttgcatcagtggttgatgttgtccaggactggatattacttgatacatattaacatgtgaatcacatttccagagagaatttccataattgagcaattcttttctgaatggatttaagccttaattttcagttttcctctttctggttgaaattttactactataaaagataactttagcactgattttagtaccaatcttattattaacctgaagtgacacttaatttagaactagaactcaaaccttccgactgttagcctcgttaatggggatattttttaaaaaatagatgtgtgtaatgttacattgattgtgttctagccttgtaagttgatatagttggcagcctagctgtatttctcagagtttgtcataatctatatttaaaataacatgaaacactttgaaatgtcacttatagctagttccaatgatatttttaaatgtattataagtaatatcaatttcatctttccacaggctcaaagtctaactccccaggactataatctgaggtggtcaggccttttggtgacagtgggtgaagtcctggaaaagagtttactgaatgtcagccggactgattggcacatggcatttactgggatgtcccgtcggcagatgatctacagtgcagccagagcgatagcgggcatgtataaacagcgcctgccacccaggacagtgtgagaggagacctacctgggagactgagactttcccccacttttagcttgatgttaaagaagtggttgtaccttcctaaatcgaatagtctaaatgaatccagtagtttttatcattttcctgtagcctgcaatttttctttctctagaaaggcatcatgtcattccaggagacaaaaagaaacaaatcctttttatagtcataccatttcacctatcatagtactcaaaaaagaaaatatacaaatctatttacagcacaatttaatataccagatttataaggtggaaattcatgtgcagagacatttaacttaatgccatgtacttgattattttgttctttaaagaagacattattaaagaacatgttggttgaatgtttataaaagcatgatttgctttggcttcatctcttttctgtcagtctttgactacttttgtatgtgcacacgatctcagggctggtgctgagcagcctgctcaacagtcactataagacacctacttgtcgggagatgttccacatttctgtgcatgttttcagtaatatgggccaaaataatggaattgattattttcctttttggccatcacgtacacatgtaatctggaaaatcatacctttgtcaattttaaacataacttttggcatttcccagatttatactatgaacattggggtaatacattttattttttcattgctatatgacagctaaggggcaaatgattcaagtatattttaaatcagaagtattcaaattatttttgtataatactgttcagtacttccaagaataagctctgacaacagccattgtttctgcttccactcatattctctacacattttaatacagaaatttttgagagggggttactttattgcttgtgggttagtatgtctcttacttcaattaaggttacttatttggtttgc

SEQ ID NO: 117294 - DNA, 1908 bp, Homo sapiens
atttttattttaccaagtcacaaatgtctttttgatgttttgagaattgttctcatagaatcacaaatactgacatttcattagatgattattttcctagaatccccaaagagcagtggcagtccatggcttggttgaagctagaaattttcctgcccctggtgacctggtaagcctcctgctcggaaccgtgtgagtgggtgaggaagatgagagatggtcagatggaagagagaaatacatgaactgctctggcctctctggttctgttcttggcccagagtttttgaaaagcagcggagcatgactgacttcacatgctcagctttctcagccttttgtttattttgttgtccttagatttccctgttgtaaaaggggcaagaaaagtaactcatcatctctaacacaccatggcagcttagccaggtagtcttagtggtggtgtttaggcataagatatgctgatcatcagtctcaggccacagtttccttcactaatcgtccagcttgagtgttctgttctcttcctgcccatttccttgaacctcctgctctagccttggcggagggagagtgctatttgcttttgttctccctctgtcttaggaaaagccatctttaatatagttcttcaccactgttggggttgttttgtgattttttttttcttccgaagaactcctggttgttattggattttgtattttaatacaaattattgaattttataagcttgtacacaatatttaattagtgtgaaaggaaacaaagaatgcaggaaaaataatttaatatcaacctcagttgacaaggtgctcagattattcaattcgggatcctccttttgttaggtttttgagacaaccctagacctaaactgtgtcacagacttctgaatgtttaggcagtgctagtaatttcctcgtaatgattctgttattactttcctattctttattcctctttcttctgaagattaatgaagttgaaaattgaggtggataaatacaaaaaggtagtgtgatagtataagtatctaagtgcagatgaaagtgtgttatatacatccattcaaaattatgcaagttagtaattactcagggttaactaaattactttaatatgctgttgaatctactctgttccttggctagaaaaaattataaacaggactttgtagtttgggaagccaaattgataatattctatgttctaaaagttgggctatacataaattattaagaaatatggatttttattcccaggatatggtgttcattttatgatattacgcaggatgatgtattgagtaaaatcagttttgtaaatatgtaaatatgtcataaataaacaatgctttgacttatttccaaagttgtatagcgattttttttttaaatgctagtttatattgaaaggacgcatatttctttttacctaaatttgttactggctgccaagaattcttgtacaacagcaacttaaccaccatctttctagtggaactgtaacattcacatataccagagttgctaacttcagggtgcaagaactcaaaatatttagaggagaggatacattggagataaaggtaataggcaagaatttaaggcctatggtcatgaggacacttcttgagtattgggttttcgagtagttttatttcttagtttcagttcacagcagaattaattaaaaggagggaaagtacagagatttcccatatatcgccttcccctacatatgcatagcttcttctctctttatcaacactccccaccagagtggtccataatcaatgaacaataagtggtccataatcaatgaataataaacaatcaatgaacctgcattgacctaacatctcccatagcccatagtttaccttagttactcttagggttg

SEQ ID NO: 117295 - DNA, 1045 bp, Homo sapiens
tacccaaataaaactcttactttaaatgagctcctttgttgatgtttcctgccacttcaaagcaagtgtttgcacatgctgattgacaagctgagaagaccgaatgttgagcggagctgcatttcttcacttggctgcacttttatataagacatttcagaaacttcttggtgttatctcagagctgaaatgaatttccagcttcatgttttcttagttattattatcagtcccaaagtacttactatatctggtgcacggtctaggtccctgtgctaatgttatgacgattaaagagggctgggtgtgagtttcactattaataatgtctatgggtctttcttcgagtctccaggcattggtacgaatgtctttctctcctactgctgcttgggtctgtggatctgatttcatttatgcctttccttgtctctgtccctccagtagttgtatataatcctggctaaatgcactggtgtcttctattgttagctttgcctaacctcatctctacagtttcttcagggattccttgagcacagaatagagcactgcctttctgccacagagagatggactgtaaagtctggcaatgtaactctgcaggagggatttaacagcttgtgataaaatatttaaggaaaaaataaccagctaatgggaagagattaattggatattaaaattatttccatgtaacaagaagactgggctaagaatatatattgcaacgggggaccaattgcataatggggaccataatgggaacaaaaaactatatgctccctcaatggggaccagtaactataatggggaccaattaaaatttgtccataatggagatcaataactatgccccattcctactttcatcaataattttaatttattaaggtaaattaaaatattaaatatatttaatatcataatagtgattgtattcatattatatataaaatataaaatatataaatactttaatacatttaagcatattaaatctataaaatataaatatattaaatttgtgacaaaggcaaagtat

SEQ ID NO: 117296 - DNA, 1045 bp, Homo sapiens
tatatttcatcctgtctcccttagctaatttatttaagaaaaagagggctatttttaattaacaatactaaaaggaaatgaaagtttaggttgtgggtaccttaaacatttgctatgaatcttaaatagttactgtttacaagcactgacttaatttcagtttgctgactctactacctggatattggaacctgaaaagggcaactcattgagcaataagttgatcatcagggttcccaggtaaataagggagcttactgcttagaagactctctgccatggatgagattcagcttttccatctgtatacagcagaaataatatatgtccttccatcatatctgagcagttaataagtcaatgattatatctagccaatgaaatagaagtgagccattcgtacttagtactttaaggcagcacttttcaaatgtattccacaacacaatgaggaggccagggaaggggcagggatgagagctgagaccacccgaccccagatgaaagatatgctaaccatactgacaaaaaacaacaggcttaggcgaattcatgcgtattgattcctgaggccttagatactccaataggcttctaccactcatgtagaagacaggaagattctactttgaagagtctgaacagcctaaaaagaaagacctaaagtcactgacatcacaattttctagtaaatgggatacccagattacattacagtgaagcttaaagtcaaccagcctctaaatatacatatttagagtttctaatcagggaagaccccaagatggaagataaaaaccagaacagacaggaaaaaaacaacttggcaagaaaataaaagccactgacgaagaagaaattttccaacacctattatgaatatcctagggagttttggaagatactgcatccctgaactgagaacaagatgctaagaaaaaaaggcattcagaaaacaaaaaagaagaaaatagaagaaaaagacagaaaacaggtctaaggagataagaaatttagaaaacagtatagaaaatctaatatgtaa

SEQ ID NO: 117297 - DNA, 1021 bp, Homo sapiens
gaagccaagggccgcttccgcgtgaacttcgtggacccagctgcctcctcgtcggctgaagacagcctgtcagatgctgccggggtcggagtcgacgggcccaacgtgagcttccagaacggcggggacacggtgctgagcgagggcagcagcctgcactccggcggcggcggcggcagtgggcaccaccagcactactattatgatacccacaccaacacctactacctgcgcaccttcggccacaacaccatggacgctgtgcccaggatcgatcactaccggcacacagccgcgcagctgggcgagaagctgctccggcctagcctggcggagctccacgacgagctggaaaaggtgagctcgcccagccctcccttcttccccagcccctggtgcatgccgaccgcgggatgtggctgcagactcttcccgagttgaggtggcgggagtagtagacgtgcacgacttgctggcatctctggattcagctgtcaagggtggaattgccgaggaatgttaacttaatctctcaaaagtttgtagcgggtttggctagttacgtgataccggagggctgcctctaacaaccttccccatccagttaggtatctcgtgtgcactttctttcccacccacgctcaacagtcaccatccctctgaatgacagtagtgtttgtgggccctttagaggagaatgtgcagtgaggatctctcgagagaggttggagagcacctaccatctgtgtcgttttgaaagattgtgttgtgtggcttatgtacgcctattagggatcgcaagagtgggaatgttgctgtttgaaggaaaaccttaacagggtgtgtttatggtctatgagttattaaagctcaattcttgcaatcttgaatatacaaaggatcatagagatcttgtcttgggacacgctgttcctaataatggcataactctttttttttgcgatgaaaacgttttgggagaggtgtatatttaaaaaaaaagggacagaggcgagtcttt

SEQ ID NO: 117298 - DNA, 1110 bp, Homo sapiens
gcataattatctaccatgggactaactctgtgttgggaactacagaagaagaaaagaagtaaaatacttcagaaacttgttagggaaaaggactggattgtcttccctccagttgaattcctttcattatccatcactgactttttaaaagtattttgtctagatgtccaactgtaggggaaaagataaatatccttggtgcatcttgctatattatatagccattctaggaccagtaggcatgagttctccatttatgagttattggggaagggggtatcttagatgttgacaacatgcttgtgacattgtgggattatgtggtgattagcaaaccagttactgcttctgcctagacagacattaacaaagtagttggacaaataacatagttaataactgttttttaagtgttacgaaagaaaaggatacttgtaaagatagaataggacctaattttaattgggttttgggaaggcgtttttttgagaagtatgacattgaagctgagacctgaagggtaagttgatgattgggtggaatgacagtcctgaccaaagggacagcgcacatgaaggtaatggggtgagaaagagtggtatattaacataactaaaaggagataactatttttcattataaatgtagtgggacgctattgaagaattttgtgtggggtagccacatgacccattttgttttaacatctttaggctctgggtggagaatggattggcaggggcaagaatggaagcaaagagactcaagtgattactgtggtctggttgagagatagtaaaggttggtggcacaaaggattggatgtgggagtgagaaagaagctgacttgtagattttgaacttgagaaacttaatagatgttggtactgttgcttgagatgagaaatactggaggaggaatagatttggtggttgggagaagtttgtatttgaggctattctgtttcagtagcctataaagacaaagacaacttattccaagagtcgtggaggaggctctgtgtgtgtgtgtgtgtgtgtgtgtgtgtgtgtctgtatataaacatatgtaaatatatatatttacatataaagatttggttgcttaag

SEQ ID NO: 117299 - DNA, 1028 bp, Homo sapiens
gcaccatggtaggagcctgttgtcccagctgcttgggaggctgaggcaggaggattgcttgagcccaggagtttgagactgtagtgcactgtgattatgcctgtgaacagccactgcgcttcagcatgggcaaaacagcaagaccctgtctaaaaaaaaatagtagtacagctcaatttggacttcacatccaggtttttctgactttaatgctaggacatagtagcagcaggttcttctctctttatcttttctatcccttagacctgttctaagataacaaagatgttgagggggaccccttggggattaccaccaccatttctctaccttgaactcctgagagttgaatgattatataactgacagaaatcaagagatgtgatgatgtaaatattattatgacttcttcactagcatctgtataagtgtttatcttcatacagagaataggcacttaataaagatttgttcatggaatgtacaaatcaggtgagcagttcctgtcacttaacaaggactttaagtaaaacactaaataattacagaatctcctctaaccatgagctgcttctctgagtgggctgtgttgatgcctagtcaagaaatttcacacactattaatcatttcagtgtatagctttagtccttgaaagtcaccctgggggaacaagaatgtgtctctcgagggtgaggggaagagtagagtagtgtccagaactgggtaaaggtgggaccctgataagaaatatttacatgtggcaaagtcaaatttggctgatttcacagttttgccaggggctttgccctgctaaacccatgctacttgccattgaagtcaggcttacccataatactaaatgcattcccccaggtgtacactgactgaagtagttctacaatgcggcaaacaggtaaaattgcagctactgctttgttaaatagaaaacagcttttaatttttagcataaaaatttcctgggtagaaggaaagaaattttgggatttaaaatgtagcaaaaaatcag

SEQ ID NO: 117300 - DNA, 1029 bp, Homo sapiens
ttgtcatctagatgataaacatgttgttcttgttgctttcaatagttacatggctttaaaaaacagataaaagaaaaatatgtatggtttttaaatattttcatttatattcattcttttttgtttatcagattgcttcccttccttgggcacttcttgtaatggaggtcagttggcaacaagttctcttagtttttttttatctaaacatgtctttattttactggagttttgaaggatagttttgctggatatagaattcttagttgacagctttcttctttcagccttttcagtatgccatttcaatgtcttctggcctttggtgtttctggtaggaagtcagccaactgtgtaagatgttatttttctcattgctttccagattttctctttacctttgactttcagcagtttgtgcttcaagagtttctctatttgtgtatcctttgtcagtttgttaagtttcttgaatctgtacgttgatgtttttcactcttccttcttctgccatttccattctgctattaagtccacctagggaatttttcatttcaaaatttttttcatgaatttctgtaaaaatttattccaggtctagaatttctaacttttaaaatatagttttcatttctctattagattccatctctgttactcattgatatatttacctttgcttttgtttaacatatttattgcagctgtttttggagtctttgtctcctgaatttaacatatgggccacatggaggaaatttctaatgactgcttgttttttttgttttttttgtttttttttcttgagtgtgtgttacattttcctgtttatttggatgtctagcagttttttatatggaaactggccatgcagacactacgggttttggggttggtttttaaaaatattcttctgaaaattattgttgttggtttttttttgttgttgttctaaaaggcactttttatctaggctcaaactgcagactttccacccccatccactcctctccccatacaatagctgat

SEQ ID NO: 117301 - DNA, 1062 bp, Homo sapiens
gcacttcagcgtgggcgacagtgaaactgtttctgaaaacaaaaaaaaaagcataaaaataaaagttacattaagattaaatatattagaaattcattgggaaatgatctcttgggatctgtgaaggggaggaggctgtggcccattttaatctaaactttaaaagataaaatgggaattcaaataggatgattttatatttgatattgggagcattatctggatgttgtgaattgttaatacgtgttttgtgaaatattctttttaggtatttctgaaaatacagtcactcacttgcctctttaactgctctgcttattgggggcatctgctttgtgaattcatgtataattaaaggataatttggcattttaaatcctaactttagtacctgttttttttgtttgtttgtttgtttttaggaggagcatattatttaatatctagaagtctagggccagaatttggtggtgcaattggtctaatcttcgcctttgccaacgctgttgcagttgctatgtatgtggttggatttgcagaaaccgtggtggagttgcttaaggtaattcaccttccttctagtcattcgtttaccaaatctttattgagggattatatgccgatcaccatgttagaggttgggaaagcagtgatatgatgaccaagagattcgtccttcataaagtttactacaggagataggcaaagaacaaaatactattagaatgtcagcagtgggccgggcgcggtggctcgcgcatgtaatcccagcactatgggaggccgaggcgagcggatcacgaggtcaggagatcgaggcgagcggatcacgaggtcaggagatcgagaccatcctggccaacatggtgaaaccccatctctactacaaatacaaaaaaaaaaaaaaaaatcagctgggcgtggtggcaggcacctgtagtcccagctactggggaggctgaggcaggagaatggtgtgaacccaggaggtggagcttgcagtgaactgagacggcaccactgcactccagcctgggcgacagagcaagactccgtctcgga

SEQ ID NO: 117302 - DNA, 1024 bp, Homo sapiens
gaatcttttaaaaatgccattgatattaaactacaaataattttgtttgcagagtggaaacagtgtgtttttggacagcagcaggaagttgtgcttatcacttactctctcacagtataaaagacctttaaaagcatgagttcactaatcacaataaatacaaaatatatttctgctatataacttaaaattctaactagcagtattagttataacttttttacttctttgttagcaattccttttttgatttattgagtctatattaaatatagaagcattaataatcatacatttatgtcatcagatgcttgaatgactaacacctcagtggtaaatagtaatttgttcctttaggtcttccatttattccttaagcaaccatttattcaacttcttcatgtaaggcaccgtaatatctctaaaatgtttcaaaaggagtgtgaatgtgtataaaaataactagtattgcttattatatttatgattcctttttctaggaacattccatacttatgatagatgaaatcaatgatatccgaattattggagccattacagtcgtgattcttttaggtatctcagtagctggaatggagtgggaagcaaaagtaagttatgataggaacacctgtaaatatttaatacgtaaacttttagagcttatgttttgggaacactctgaagtatggtaatatttccagattctaatggtacctaagtggccattttcacaaatgtttatgtataaggttattttctacttgacaaggcagagaatctttggagataacactcagcctaggatctagttaaacacagtactttgtaaattttgaatttcccgccttctcgcccatcctccagttttgcagtatgtaaaaatgctgaggtcagtgtgttagtccaaattaaacgtttggctttgtaatttatttaaaagttcaacttagacatggggcagtaaataaaagttattgcccacatgaggttagagaagttattcttgctattgaaatttcag

SEQ ID NO: 117303 - DNA, 1082 bp, Homo sapiens
tgtgccaccactcctggctaattttttaattatttctagagtcaaggtcttccttgtgttgcccaggctggtctcaaactgctgggctcaagaaatctgcctgcttcggtctcccaacgtgctgaaattacaggcgtgaggcaccacgccatgcccccttttgtttttctacctcccttcttgcttcttttacctcagagattgaggggattatccacattttgatttgcatttgggctagtcataacaattcattcagaggctcttgaaacataattagcgaggtatacaaaaaatgagacatgaatcagatcagatgatcattttgatggtaaaccattgtctcatacaagaaaagaacaccaaatacttgaactgggaaatatgcaaaaatttactcgttactttaactgaagaaaagttaggggtcatgtatacctattattcttgacctcagttattatagtctaatttgctctccattaattgtcaagaatattttgttctctgcagctgaaatatttaatgagaactttgggcccgattttcgagaggaagagactttcttttctgtatttgccatcttttttcctgctgcaactggtattctggctggagcaaatatctcaggtgatcttgcagtaagtattataaagtgctatatcaattatatattttaaaagtggaatttgtatatttatttttacagatagactttaaaaaatcttcttgtcttctaggatcctcagtcagccatacccaaaggaacactcctagccattttaattactacattggtttacgtaggaattgcagtatctgtaggtaaatagtttcacatttctttatgtgtcgcagaaatttcatgatgtacgtactataaatacttatttttatgacatttgctaacttttttaaatacagaaatatttcaataaaaagacatggagttgctcattataattcaaaaacagtttttagaaaactagtaatgacttctatagacattatctaaaccgccaaatgctttatggtatctccaggatttttattaattatggtaaattaaaaaattatatgaa

SEQ ID NO: 117304 - DNA, 1291 bp, Homo sapiens
attacccagcttcaaaaaagttagcaaaaatattagtacatggttaatcttgtttcatctatacccaagtcactctgctctatgggttctttttaagcaaatcttagataccatgtgttttcttctttttaggataatcatatttgagacagagatttaaatataattataattcattaacattcaaattattttccctcacagaagagtggtattacctgaagtctgatttttagccacattcaagtataaaatatttggagtataggaaaacatcactgccatttggaactctttcagtacagtgttttcatatttacttaaggacatcttaaccaaataggctaggaaatagtttgctagtataccattttccacaactctttacatggtttttaagtgtttatgtgtaaatactattctttataaaaggttcagtttcatcacatattggggaccatgatgctttacaaattctgttcaaggtaaagtcttaattgtaaatgcaatgtatgctattataagggagtagatatgtagtcactactttggtttctttataaatatatatatgtatataaaattctgaaatgaatgtagatattaactatattattcttgttgtcacttgtgctttaggttcttgtgttgttcgagatgccactggaaacgttaatgacactatcgtaacagagctaacaaactgtacttctgcagcctgcaaattaaactttgatttttcatcttgtgaaagcagtccttgttcctatggcctaatgaacaacttccaggtgagcattgactttgtaatatacagacattctgtatttatctaggggtgagactactatcaaatatgaccattcagaatatagctgtaacatagaagggaggacagttgttattttttttaatttttaattttttcttgagatagagtctcactctgtcgcccaggctgtagtgcggtggtgctatcttggcttgctgcaagctccgcctcctaggttcaaatgattctcttgccccaatctcccgcgtagctgggactataggcgccagccaccacacccggctaatttttgtatttttagtaaggatggggttttaccatgttggttaggctggtctcgaactcctgacgtcaagtgatccacctgcatgggcctcccaaagtgctgggatggcaggtgtgagccactgcgtctggccagttgttctgtatatcccctaaaactgtaaatatctaattggacaaactaaaatatgaatggataaaatctgaggatgt

SEQ ID NO: 117305 - DNA, 1718 bp, Homo sapiens
acattaatcttcatgacattgacattttcaacatttgaaccaggttgtttttgaattatgcctctcagtttgaattcacctgaattcatgatcttagtgatcaatcctatgttgttggtgttttttttttttttaagtcttctaagaggaaatgtttgaacatgtacacagagaaagcaatataatatacctagtatctacattacccagctttatcagttatcaatgcatggttaattttgtttcatgtgtaactcttcctatcccagattatttagagcaaaaccctagactttatatcatatcttttcgctggaaatatttccacatttagctctagaagataaaaggttagaaaaaaataaccacaatactatcttaacataagaaacagccttcctaatagaagtacatgatggcacttacacagtattcttgccaaaacttgtacctcattttgattaactgtctagatagaaccagtttactagaattatagaaatgagaagaggttaagcaatacaatgatgatgaagtcagaaaaatccagagtatgagatctccatgggagaaatgatagaaaaataataaaaggaaaaggaaatgtgaacctgttgattgaaaaagactgaagagacgcataaaccaaatataatgtgtaacctttttttttttttttttggatcctgatttgaacagactatttttaaaagataagaaaggacaatttagggaatttgaatgctgacttgccttttttgtggtactgttaagcaattattaagtttctaagctgcgacagtggcattgtagttaagttttcaaaagtccttacctgttagagatacgtactgacatatttatgtgctaaaggatatctgggacttgtttcaaaatattgtggggaatagccctaagttgatcattgttgaaattaggtgatggatgttagcagttcattacactcttctctctgccattgtgtgtgtttaacattttacgaatgaaaaggttttcttaaggtaagggctagtggtaaataaatttgtttcagatatttgtaatgcacatagcgttgttgttattattattataaaatgatccctagtgttaacctccttcaagatgtgaccacataatattgtgttattttctgaattgtttgtgagatttatttttccatttttgtcacttttatttaaggtaatgagtatggtgtcaggatttacaccactaatttctgcaggtatattttcagccactctttcttcagcattagcatccctagtgagtgctcccaaaatatttcaggtaagtgtttttatattacaggctttattaaagggagagttaaagtaatacttctcaatttagaattgttgctattttcaaattatttgcttctatcaaccatatatacatatatatgatatatatatgcacataaagatatacatagttaattttatatgtgtgaatgaatgtgaatgtttatataaatatttgtgcatttgctgttaaggtatattctttgagtctttttagaagtgctgatggatttttgcttttttgacatttttagcatacattttcaagatgtttaaggtataggagtgcagtctaagactgaaaataggaagtagtaaaatatctttgttctagtcagtatgatatcaacctaaatattttattttacaaatatttaaacacctaacgtg

SEQ ID NO: 117306 - DNA, 1020 bp, Homo sapiens
aaaaagaataaattcatgtaattaacattttgctgcactcggtatatttttaaattattttttgaaaggatccagttacagtactgtagtagctgtatagcctaataagctaggctatttatacatataacctactgtggtccttgaactggagtgagtaccatggagttaacaaaatactagaagacatagtatctttcccactaggttactgtgtagcaggggaaattggacaaacttgttttaactgagtaatgattaatgatttcctagtatgtcgtattgataacagctaaacgtatctccaggtaagatgatgatgctggagtatgttaggattggtcccggtattgagcattataacccgtgacacatgaaagacctgatgagaaaggcttcatctgggctcaatagaatagactgggaagagattacaagagtagtttcaatatagtagttttaaacagtaagaacacattttgtaatccagatatgaaataatgagcttttagattaaagtggtagctccagaaatgaaataaaacattttagaatcagttatttctctaacatacctatcaagtctataaattaacaaatgtctaaaatcatttgaagtccaagttgtttattcaataagaaataaaattgtcctgttcaaataacccaaacagttaagtactataaataagtatttcttaacaattagaaatttgctcatttccatttagacctttggctatatacaaacaataattttaacatatttatttgtgaaagactctttcagagttgtatgcacagcatgtctgcagccctgtcatctcaatcttttctaagtaatactttttctttaaatgaattatagttcagattatcagtcttaatatcttgctgtatatgtgaactattgaaagtacaatagtgtatttcagcaattgactttttaaatgtgaaagcatgtttaattctctatgcctcagattggctattgattggttgttattactgatgttaatg

SEQ ID NO: 117307 - DNA, 1031 bp, Homo sapiens
aaaccttgtctctactaaaaatacaaaaattagccaggcgtagtggcgcatgcctgtagtcccagctacttgggaggctgaggcaggagaatggctcgaacccaggaggcggaggttgcagtgagccaagatcatgccactgcactccagcctaggcaacagagcgagactccatctcaaaaaacaaaaaaagaatatattatctttctaatagtttattaaccatcggtataaactttctttagtcatgagtaatccctccttattggcttctgcatgataaacacaaatcttttccatgtttattagtaaaccaaaagggaaaataatgtttttaaagaaaccctgaaacgtagataaatgtcaaaagagaattgctctacccagtctctctctcagtaagaaaagtaattgtttatttttttgttactcttttgaattccccccttcctttttgctagactaaaaaggtctgagagaccacacgcaggtcttcagctttagggtagacagaaatggagaagaaggaatgagagccctgggaggaaaacttttcacttcagcatattttggatagtgatgtcaaggatgacagaaaatagaaattattattttatgtaaaaagttgtatcctagaactgagagtatgaccaaaagcctatgtttatttgccgtcaattaaaaaaaaaaacaaaaaaaaaaaacctcttgctttggctcattgtagtaaagccaacattaaaaaaaatttatttttgggcatgttggtgcatgcctgcaatcccatcactttgggaggctgaggcgggaggatcacttgagcctaggagttggagaccagcagtttgagaccaggctaggcaacatagtgagatcttgtctttaccaaaaatttacaaaatagccaagtatgatggtgcatacctgtggtcgggagactgaggctggaggactgctagagccaaggagtgtctaggctatagtgagccatgattgtaccactacatgctagcctgggcaacagcgagacc

SEQ ID NO: 117308 - DNA, 1007 bp, Homo sapiens
tttaaaaagtattttcatgtatttataatcattgtgaaatgtttttgaatgccttattattcatcattaagttttaaaacaggaatttgggaataggaattaagagcataggcattggagtcaggcaaatctgctttaaaaatatcagccttttctgttagatgttttgtagcctaggcaaatttgatgacttccaagcctcagtttccttatctgttaaaatgtatttaccttacaggttggttgttaagattaaaaagaagattaaggcctgcgagctcttagcatagtgctggcatgtagcttcttttgtttctcttcatttacgcaaataagtgatgaggattatggacatactatcaattttatattatatttgtctttgtgatacatgtttgtatggtggaaactaaatctttactaactctgacaaagagaaaatgaagaaaaactactttaaaatggagaaatggtactttcaccatgaacttaggaagactccatttggtggtcttggttttatagagtgggtagagtttttcagtgttgtctgtcatcttacgtatctatggacagttgttacattttacattttttatgtaattgatttagagagaattgattcacatactatgtattactgtctaccagattctactgtcctatgacttgtactcattactgattctccagctcgtaattcaaatacagtttgtgtatctatatccaaaatgcttggaacctgaagagtttcagaatttggacggggagaggttgattttggaatatttgcattacatagtacttaccagttgagcatctctgatccagaaatcccaaatctgaaatgctccattgagcatcatgttaggcatgtaaaaagtttcagactttcagatcaggatattcaacctgtaacctagttgtggtttatgtatttaaatgaatagtcatttcaaacagattatcatagttgtttaaataagaagccatttataataaactta

SEQ ID NO: 117309 - DNA, 2269 bp, Homo sapiens
catttgtttccatttatcatgtcccaatcgttcctttttttttttttttttttttttttttttttttttttttgcgactgagtctttttctgccacccaggctggagtacagtggcgcaatctcggcccactgaaagctccgcctcccgggttcacaccattctcctgcctcagcctcccgagtagctgggactacaggcacctgccaccatgcccagctaattttttagtatttttagtagagatggggtttcatcgtgttagccaggatggtctcgatctcctgacctcgtgatccacccacctcggcctcccaaagtgctgggattacaggtgtgagccaccacgcccagcccattcttttgggttattttctaatacaagaagatgttccaggctcagttttattgttttgcactttcccttcacagccacgaaagtaaccctttccaaggaatgctggttccttttactgaatcatagtgtttagaaacaaagatcagggcattggatatgcttgtgtctactggagtgtcactgctcccaggccttctccatggacagagccaggaactccttgtgtgtgtgtctgtggagatataaatggagatcaaaaagcaatttcagtccagcttctcccttttcatatttctaatttcagtgttaaacatggctcctgctaaggtcaataattatacttattttctcaatcctgttgtatgtgactgatctcgaccttaccaggccactatcccatttggctaccttccttgaatgggatcagactccgttaggagtcccttgtttctcaggtctgctaatggctttttgactgaattatcaaggaaggacagaaagatttttgtttcatatggagttgtagtaaacatgtttttcgagactaaattgatgttcctgattaagaaatttgcatttagtaaatgatttattacatttttataattcaggtttgaccttattgataccttaccttctgacgaccaagaaaaaatggaaagactgtaagatcagagtattcattggtggaaagataaacagaatagaccatgaccggagagcgtaagtttatttcacattgaagggcatgaatctattagcacttcattgctacagtataaatttgataggataaaaattagacaatccagaaaatgtctattatcttgctttgttctttactgaagttaaaaattttaaatataaccttgttctctttagtcttcatgtttaactagtaaatacttaattttacttagatataattttttttaacatactagcattttagaaggtccttcttaaatacttgtaacattaaagtgttaagcaacttctttcttttaatcagggagaaaatgcacaaacgttacatatttatatatgagataaattttgttgtagacttctagacaacaaaatgcaggatgccattgtcatccatccaattctttccatctatactgtcacgattctagttcttgtttcagtatttctctcctgctctctaagtactcttgttttgtctttgacctgtaacatgtatattgtacagagtacataatatgcataatcttcaacctaattaatatgtatattgtacacattatgggtcaaaggtaagacatgggtactcagaagcattgaaacccagttttatttttcagaaagcagagttttgaccatatgattcctctacccaaaatagttaaacgacttctctgctacctgccatagaaaatctaattgttataatgtagcagtcaaggcccttgacagtctgtcctctcattccctttctattcttctgtttcccccagtgtttcagtacacttttccctatgctctaaacatgcatgtgacttcaggcttttactcctttgcctcctctcatctctctcctgtaaatagctcttcacttgcctctccttttatctctttaaatactgcattctttaaaacccagctcagttcttcatagtgcctttcctattttccccccacttacccccccatctagttgttatgtttccttctggaatcacaatatacttttatacctaccactcatcacattatggctggtattatatttattgtcttatttaagttttgtgggccctgtttagcatgttttatagtagccacttaattgatagatcctggaattcaactgtttattcatttcaaatagtgaattatgcaagaaatactaataataaatttaatagtcaaacctatagcagatctg

SEQ ID NO: 117310 - DNA, 1074 bp, Homo sapiens
tttctacatcctgtcccagttccttctttccccaaaatgctatgaacttaatctgccatcaactatatcttcagtatggcccacaggtcatatttgggccctgagataagtgttcttggatggaagaataatccaaaaataattaaatatttgtctactagtttttactgaaatttatgtacttatcaatatagtttgactaaaattaacttaagaaacattagcttccatttaaattttattattaatgtctttgtccattactcagtgctaaggagagattcagagaaagtaaaatactcagtgattactcagaaagtaaagtactcagtgaatttaagtctactttgtgaatgaatggtgtgaattaattcaaatggatattgtttagcatatgatagactgactttttctataaatcatgctttttagatatatggattcagcccaatatagaatgaaaatacttgtatcttaattctatttatttttgttgtaggatggctactttgcttagcaagttccggatagacttttctgatatcatggttctaggagatatcaataccaaaccaaagaaagaaaagtaagttactctacaaatttctgatccctttatagatggcctactcagacacagattcaacttaattaaaacccagagatttttttcctgttgttagttacatgtgaagtcaatattttaaaaaatctagcattgatagttggcatgcatatatcagatattaaagaaagtctaaagagttttcaatattcagagaggatttaaattacagctttacatgtgatttctgaaaggtggttcatttccattgcccctgcctacagtcgttataaccactcagtccctgctctacatacctattactttccactgttttgttttattgctaaaataggaaaatctaaacatttgcctgcaatagttgcattcagaattcttctagcaaagactttggaatattccacctgaaaatggtatatacaggttgttataatgatatttgtatttattttacctgatataattttaattcttagattaatgttgaa

SEQ ID NO: 117311 - DNA, 1086 bp, Homo sapiens
acagtgagatcagctttagcagttaaaaatgcaatttattacaggttggagattccttatcccaaatgcttgggatcaaccaaaagtgtttcagatttcagatttttttttaaattttggaatattttcattatacctgctggtttagcattcctaatccaaaaatcagaaatttaaaatgttccactgagcatttccattagacatcgtattggtgcttagaaagttttagattttgaagcattttggatttcagattagggatgcacaatctgtattgtctatatgggttctaattttctcatcagtttgagagactagaaattgctgtttttgaaataaattgccaaactgattattatggttggggtatggagaggagcgtaataaatgagaggcactaactttgcaagttacaatttaatatttaagatcttcctgttatgtaacttaaaataagattagttgtcagtattctttctgttttttaaagtattatagcttttgaggaaatcattgagccatacagacttcatgaagatgataaagagcaagatattgcagataaaatgaaagaagatgaaccatggcgaataacagataatgagcttgaactttataagaccaaggtattctcttctgcttccttttcattaatcttttatataataaaagacatgaaaaccaagaactttaatttgatataggagggtcagttgtataaatgaactctactttaaaatagatttatttgaggttagtggaaagcatttttaaaaaaaataaaaatagagaacagatatttttattacacgaaaattcatttcagtttctttttgtctccttatagttttatgaaccatgctaaattcttatttccacatggtctaggaatgactgtcctgtttcatttcagacataccggcagatcaggttaaatgagttattaaaggaacattcaagcacagctaatattattgtcatgtaagtaatatctttataaagattttcttgctaatttatgataatatgctttgaattaatttctattccaagtacatatctatataacacccatattgactt

SEQ ID NO: 117312 - DNA, 2170 bp, Homo sapiens
cttttctgtatttagatatgcaaatgcttaccatcgtgttacagttgcctatagtattcactacagtaacgtactatacaggtttgtagcttaggagcaacaggctgtgtcatatagcctagatgtgtagtaggctataccatctaggtttgtgtaagtactcctgtgatgttttcacgagggcaaaattgcctgacagtaagttctgagaaatgcgtctccatcgctaagcaacacaactgtggttgttattctatttgcagaattctcctgcactcagaaatattctgtaattatagtaatttacagtaactgttattgtaatctactttataatttttgctacattttattctgtaaatgcattgctcagggttttttttttttctttttctctttttgataccaggagtctcccagttgcacgaaaaggtgctgtgtctagtgctctctacatggcatggttagaagctctatctaaggacctaccaccaatcctcctagttcgtgggaatcatcagagtgtccttaccttctattcataaatgttctatacagtggacagccctccagaatggtacttcagtgcctagtgtagtaactgaaatcttcaatgacacattaacatcacaatggcgaatggtgacttttctttcacgatttcattaatttgaaagcacacaggaaagttgctccattgataacgtgtatggagacttcggttttagtcaattccatatctcaatcttaatggtgattcttctctgttgaactgaagtttgtgagagtagttttcctttgctacttgaatagcaataaaagcgtgttaactttttgattgatgaaagaagtacaaaaagcctttagccttgaggtgccttctgaaattaaccaaatttcatccatatatcctcttttataaacttatagaatgtcaaactttgccttcaactgtttttatttctagtctcttccactttaaaacaaaatgaacactgcttgtcttcttccattgaccatttagtgttgagtactgtatgtgttttgttaattctataaaggtatctgttagatattaaaggtgagaattagggcaggttaatcaaaaatggggaaggggaaatggtaaccaaaaagtaaccccatggtaaggtttatatgagtatatgtgaatatagagctaggaaaaaaagcccccccaaatacctttttaacccctctgattggctattattactatatttattattatttattgaaaccttagggaagattgaagattcatcccatacttctatataccatgcttaaaaatcacgtcattctttaaacaaaaatactcaagatcatttatatttatttggagagaaaactgtcctaatttagaatttccctcaaatctgagggacttttaagaaatgctaacagatttttctggaggaaatttagacaaaacaatgtcatttagtagaatatttcagtatttaagtggaatttcagtatactgtactatcctttataagtcattaaaataatgtttcatcaaatggttaaatggaccactggtttcttagagaaatgtttttaggcttaattcattcaattgtcaagtacacttagtcttaatacactcaggtttgaacagattattctgaatattaaaatttaatccattcttaatattttaaaacttttgttaagaaaaactgccagtttgtgcttttgaaatgtctgttttgacatcatagtctagtaaaattttgacagtgcatatgtactgttactaaaagctttatatgaaattattaatgtgaagtttttcatttataattcaaggaaggatttcctgaaaacatttcaagggatttatgtctacatatttgtgtgtgtgtgtgtatatatatgtaatatgcatacacagatgcatatgtgtatatataatgaaatttatgttgctggtattttgcattttaaagtgatcaagattcattaggcaaactttggtttaagtaaacatatgttcaaaatcagattaacagatacaggtttcatagagaacaaaggtgatcatttgaagggcatgctgtaatttcacacaattttccagttcaaaaatggagaatacttcgcctaaaatactgttaagtgggttaattgatacaagtttctg

SEQ ID NO: 117313 - DNA, 1097 bp, Homo sapiens
acattgtgatctgtactacaggaaccaaatgtcatgcgtcatacatgtgggtataaagtacataaaatatatctaactattcataatgtggggtgggtaatactgtctgtgaaataatgtaagaagcttttcacttaaaaaaaatgcattactttcacttaacactagacaccaggtcgaaaattttcaaggttatagtacttatttcaacaattcttagagatgctagctagtgttgaagctaaaaatagctttatttatgctgaattgtgatttttttatgccaaattttttttagttctaatcattgatgatagcttggaaataaataattatgccatggcatttgacagttcattattcctataagaattaaattgagtttagagagaatggtggtgttgagctgattattaacagttactgaaatcaaatatttatttgttacattattccatttgtattttaggtttccttttacattctttttatatgcattctgacattacatattttttaagactatggaaataatttaaagatttaagctctggtggatgattatctgctaagtaagtctgaaaatgtaatattttgataatactgtaatatacctgtcacacaaatgcttttctaatgttttaaccttgagtattgcagttgctgctttgtacagaggttactgcaataaaggaagtggattcattaaacctatttaatgtccattcttatatctgtttaataagtctttgccagctttgtggttttatctcatttcgataactattgcttcattcatttctgaatttttaaaatagcttttaccttaatattcacgccctggaaaagtcgttcactattcttaaacctttgcaataatcactgttgatgctcacagtatgactgaaccatctgagatgcagctcattatggtatttttttaagtgacctagcttttctaattctgctttatctttgggccagatctctcatttgtgaatgaggaaactggaagattaaaagcgattcatagtccctgaatataatctgattctttccttccaaagatttttgtctaagctcatttagagttttag

SEQ ID NO: 117314 - DNA, 1034 bp, Homo sapiens
aggaaaaataataataactcttgtttctttcctccctgtcttagactttgaatgttgaccctcacagggagggataatttagactctggtatggccaaagatttgagcacaaaggcaaccgtggttactgtattttttatataacttcattttaaaatatattaaaagaaacctaaatgttcaagatatcagcatatggcactaaatgcacaaaaataatgtgagctttttttttttttcctgttagcagtctgtaacactttgggtattttgctatagttgctaattaaaaaaatatagatgtttatttatttttaatgcagtaatatatggagaaatgaacaaactatgtaaacaaaaagggaaactcacttgtttttctttagatttataaatttgagctattttttttagaggtgctttttaaaaatccaatagatacaagagatgtttcctttggttttctgccagtcatccagctgatacacacctgatgattttaaagaaagccacacagagctgaatgggcagtgtaatcaataatttaaaaaacatgaatgtcattagatcctttataacgtagatcgaagccaaagcagctcatttgtgacaacatttcatatcaccagacacaccaggcaacagaagttgaagcacaaccactgtagcaaaataccttgactgcttgtgagaccattagcattgcaggccaaaccgtactgtatttccttctcataacctcaaggaaccatatgtgctacccacaacacctcattcttacccagggtgcgctgcgtcctcatggtactgtaggcagctgaagaaccgccgttcccttgaaagggaacacctggcattctgtggtgtttcgtgctgtcttaaataatggtgcatttattatgttcaagttatttcaggattgccatatgtgcaaacaaatcatgcaatgcagccaaggaatatatgttgttgttgttgttttaaacccattttttttttagaattttcattaatactgtagttatacaccatat

SEQ ID NO: 117315 - DNA, 1003 bp, Homo sapiens
gagtgcagtggcattatcttggctcactgcaacccccacctcctgggttcaagtgattctcctgcctcagcctcccaagtagctggtattacaggtgcccaccaccacgcctggctaatttttgtacttatagtagagacggtgtttcaccatgttggccaggctggtctcgaactcctgacctcaagtgatccactggcctcggcctcccaaagtgtgaaaaaatggtttttaattaacttacttcactgtaagattttcttcagactagtatcttttctaccaacttttcccagatgacattctaacatgaccacacacacacatacacagacatagatatgtgtacacataccctgcacagatataaattcattcctacattcagtgggtatgacagtgaacatttggcacctttctaggtgctagaaatacaggaacatcatctttgctttggggtaacttactacctaaggggagagacctattttgtaaataaacctgttttgtgaagacatccttataatacaatgtgacagacattgtactggaggtctgttcaggagatgggagcaccgcaggaggttagggatcattatggtagttgtgagagggtggcagttcaagaaagcctgtcacagaggattgatgattgtctaggtcactcttaaatgttggataggattttactgatcaaccaaagaaagagaacagaagaggctatttggaaacataggcagcatgagcacgacaaggagcatagaatggctggctcagaagattgaactcaggcctgcggtcagcgtggagccattgcaggagttgttgtgtttgttttttttgttgttggtggtggtggcggtggtgttggtttctgcagttttttgttgttttatagaagggatgtgatgactcttttgttaaacttctaccaacataaattgagaacttgtgtgtgccagataccgtgctaggagctaaaggtgcaacagcgagccagaca

SEQ ID NO: 117316 - DNA, 1084 bp, Homo sapiens
attaaaaaaaaaagatagtaatgatagaggcagtggtaagtagacagattccagatatgttttttttttttttttttttttttgagacagagtctcgctctgttgcccaggctggagtgcagtggcgtgatctcggctcactgcaagccctgcctcccaggttcatgccattctcctgcctcagccaccctagtagctgggactacaggtgcccgccaccatgctcagctaattttctgtatttttagtagagacgggttttcaccatgttagccaggatggtcgattccagatatgttttgaaggttgagtagacagcccttattactggattgaataaggaatcatagtaaggagtcaaaaatgatgtcaaagcttagggcctgtgcaactgaaaaaaaaagtgaatttccttttattgaaaatgcagaagactgggagagaagacggcagattttgtacatggaggaaagagcattgacagtttgattttagatgtgttaactttgaaataattattagatgtttaagagaagaaatgaaataggcaattggtagaagggtctagagttcacgggagagatgagatacagaaccataaatttgagagttctcagcaaaaaagtagtatttaaacccatagactcaatggagtgatctggatgataactgtagagataaagaaaagccttagattagttgatcccttaagtatcttctctaagtttgttgcaggctatcttttccaaaacctgcaaagttagctatgcaagttgaaactaaaccattggataaactcgtgatatagattaattatacaaaaaatgtattgtattcctattattggaggtccagtatgtcccaaatgagaaatttcttactatcttgtccattccatgagtataggaaaatatggtctatgtggatttctaaatataggaaagtctgccatgattggcttcctctgactcaatctcgaaaaagctgaaaagcaggagattgcttggtacttaaggattaaaaggaacctttcatgttaacgtacaaaatttgaatttcatcctttgagtgacttttccctaaa

SEQ ID NO: 117317 - DNA, 1023 bp, Homo sapiens
cttcaaatcatgtaggcaacacttcaccatctaatatagaccaggtgagcgtgccagtgtaagttcatatattaagtagtatttagcttcagttctggcatatgtgaaatctgtgtggtctaacatgatagtcactagccatatgtggctatgtaaattcagttaaaattaaataacattaaatattccttagttatactgtccatatttccagtactcagtagcacatgcagctgtgtattagaccgcatagatttgggagcagttgcatcattgtagaaagctttactcaacagtattgttgtagatggaaatagagaatccagcattttctttcaatcccccaggagaacattttacttcctcgtgaagtacacaaacccctttggagaccactgctctggtgaagcacctttctgatggctttagtgagtggacattgtgtaaagcattacttctgtgtatcttttatagatattaatgaatgctccctgagtgacaatctctgcagaaatggaaaatgtgtgaacatgattggaacctatcagtgctcttgcaatcctggatatcaggctacgccagaccgccagggctgtacaggtaaggggagaccaagcaggcctgaaactcatatgtctcaaatcagcctaggaaaacttttggcgctgaattataatgaaggctatgcaaatcctttgtcccaaaaatgaatgtaagactaggggcagatctcagttattgtgtgatcttgcagcagactcactcatcttaatgtagaaaatgctctaatccccatagttcttctatttctgagttaatcttagggtactgcacttaaacatggaatgctgcctaaaatgaaggtgaaagaactaagaaagataatgttcaatcaacacacatagtggggagaaaaattcaaagccacattagcattatctgtttaaaaagaagaaaactccttttaaggaagcagacctgacaatgtggttgcaatgctgttttcacagatattgatgaatg

SEQ ID NO: 117318 - DNA, 1041 bp, Homo sapiens
gagtgtagtggcacaatctcagctcactgcacccttgactcctgggctcaagcatcctcccacatcagcctcccaagtagctgggagtacatgcatgtgcccccatgcccagctaattttgttttattttttgtggaaatgaggtctcactatgttgctcaggctggtctcaaactcatgggctcaagcaatcctcctgcctcagcctcccaaagttctgggattacaggcatgagccatcgcacctggccaaatttttgtttttctttgtttccttccttaagacaaaattaactccatcaatgatgttctgccttcaattgcacaaacttaatctaagtaccagataaggatcatgctcaattcttataatttcaatgaattacaatgaaattctagggacagtagaggttaaaaaattgagactgaattcttatgtttctgagtaagaaacaaatttttgactctccaagaaggaggagtactgtagttttgctggttgaactcatgactgggatgtcatctcagggttagctgatttagatttaacacaggataggaaattgtcattatgcttcagtgtgtagaattatgttacagtatgtgactttatttcagcctttttaaagaaacttcaatatacatctaaagatgacttcgacctcaccagtttctgctttctggaaattagttcttattaattatttaattacaaatgttgtgaagattttaagtattcctgagtcggcagctctgtgtttgaagtctctttcatcttttggggaagtcatttaatgctgggttacgtttgataaattcaagtggattgaaaattagaagacatacctcaagttattttgttattatcaaatgaccaaatgaatatcagcatagcatctacttctagttaaagtgtctttgtgtgaaaaaaattacagaaatttaccttaatttttaaagaatttgttttacttaactaatttgaattatttagcgttaaatgggattgtcaaataaataatgaaaaagaagattgtgagg

SEQ ID NO: 117319 - DNA, 1132 bp, Homo sapiens
gagagagactgtttcaggatctctgggacatcagttgtgaacagcgtaagtttcactattttaccttttgtgggatttttggtaacggtacagattgactggaaaatattgtatatcattattatgaccttgtttttatgcagttgaattagaccctacttatcttgttttgacatgtttttattgtaaatgtcagtgttcctattagtactcattacttaactggtcttttgaaaatgtcttagtttgcccttttcctatacacaagttattattctaaacagtttatagtataactcatatataggtagagtttacttaagccaagtacttgtaatctatagatttgcatattgctaaatctgaatgaagaagtaggtcagagagtttttcaaacagtacagagaggagtccatctgtgatactttctttgaccaccctaccttcctacccccatcttatttattgggcaaaactaaggcagtctgtcctgtccttttacctgccatatatccattcctctagaatagctcttttcattgtgttgtgactgtgtatttgcttggctgtaggcctcttaagagcagagatacttttctaaaattgcctttgtgtttcttatactccacacagtgcagcataatggaagacgcatcatacatgtgactgcataaacatgggggattccaagtagaagaaataggatgaaaataagtatagagataataaaggtccttgaatgttcacagagattaatcatttcgtgtggttgtaatacacagttagtgaaaggaaagagtagatgatgaggctggaaaaatagacacagaccttaatttacaaagtctgaaatgctggagtcaagaggctgccctctataccctcaagtaggcactgagtagaggagctatgaatgacttgtatgcttgaaagcagttctccacaaacgtcattctggagtggcaaacaaaatagaatgaagggtggaatctcttagaactcactgcatgtctgctagattaaagttgtataatatttcactaggattatgatttatgtgtacaaaacttagatttttaatataaattggaaattatataatttggagggaagataacatttactgaacttt

SEQ ID NO: 117320 - DNA, 1049 bp, Homo sapiens
taaacaatgtttttaagaaaataagttccattgtaattttctgttttaaaatgtcatgcatgtttattataaagtaatttagaaataaaacaagatgaaagacgagaatctaattactcataattcctacacttaggattaattaccgttaatgtcttggagactataacgtacactgcacgttgtaataacacaaaaggacaagcaagatgtaagagtaagttatacgtgctttggggtgtttacttcaatttacctttttaactacaaattagaatatacaagagtgtaactaaactaatttttaaatttaaatatttaatatttattcatccaatatttgttgagtactcttacagtattaggctaagtacttggaacttgagttataagaaaaaccaatatatacttcttattaatgagaagcaaattattgaaaaactagtcatctactttacacatgaggatgcaataagacacagtaaataccgtaataggagtaggaacaaaaagtaagagagctcagaaatgctcactaatgcaggacaaattacaaaagtctttctttcagtcaaatgaatgtagaatgaaaaaacatagcttactacagtgggaaaaacagtatcagactaattcctgagatatatcatgattaaatcttatactaatgttatttaaactccataattcatgaccaattaccctaattactaagctgatatttattttgcagaaataaaatgtctccctttttcttgcactctgaagatttagtagaatgaaaattacaataagcagagagagaatgttaccaactgcagatgtcagactcacatgtaccctcaggcacacacacacacacacacacatttctgcacttgtgaggccgttaagaagagcattttataaccttgcactctctaagctaaacttagccttaaatgggcatcagagaaataccaaaagatctgtgggaacttaactttttggcactagctcagttgatacccttatcttgaatgccattaagaacagagggaaagaaaatt

SEQ ID NO: 117321 - DNA, 1035 bp, Homo sapiens
agtgaaaagcaaatttaaaggacctgtagtgggaacagactccatgtattttggaaaccgtaagatccatgtccctggagtaaagtggggaaagggaaaatggtaagaattgagtttggagagggaggtatagggccttgtagtaggccaaggaacaaaatttggactacagcctaaatattatgagaagtcactggagcattttgagcagtggtgttctgtgacctggttaacattaaaaaaaaatcacctgtctgctgtgttgagcctggattataacagagaaaaggaaagggccatgtaggaggctaccacagtggtgctagtgaacaatgctgcagctgtagtcgctgaagatgtggtaagtggttgtattgagcttgtattttggaggtatactctgatggaccaggcgtggtggataaaaaaaaatagaaaaagtaaaaatcaaaagtgacaaggagagggttttggtggagctgctggattaatagcgatgtcatttccagatacgggaaatactgtatagggagtgggttgggtaaggagtggtggggctgaggataagagttttgttttggattcattagattgagaaatctgtcagacttataagtgcaaagatctatgaactctgatcttaggagagaggttggacatagagatataaatttgggaccgtatagaccgaattattatatagataatattttaatcataggcttagataaagatcattaggaagttgttgtagctaaagaagagagttgaaaacagagacccaattcagcccaacattgtgagatggggaagaggaaaagaagcctgcaaagaagagtgagaaagaatggacatgaggatggaatgaaaactgagagagtgtggtatcctagaaaacgaaggaagaaggcagcaccaatagcaaagatttataccttcctatgtcagacagtaggcttttgtttctttcctcttgttaacattttaacttggtttagaatgctatttttctaacacatttgtgtagaaattaca

SEQ ID NO: 117322 - DNA, 1051 bp, Homo sapiens
gtgatcacattgcactgataatcgggacgcggccccatttgaatagtggggaagactcaaccggtttgagtcagttcagacttcacttctagactctgttgaagggcaataatgataaagatttcaaagataattgaaagttttatctttctatgtctattaatacaaattggaagaggggaggagtagagcaattatctagataactcaaaaccactttttctgtaaaaaatccagatgagaccacatgttattatgcaaattatcaggcttttaactctgcttgaggtttgggccttatgaagatcaagatttcttaggcatttatataaaaccactttcttatttctggttttatatcaacaaccacataacctagatacgaaaggagcattctcgcggatttagtgttgacctaagttaacaaacttttaaaagacagaactcttacaaaggggcttgagtttttttttttttttgctttttggaagacgtttaaatttagggtttccagaccctgaacctcaatagtgtgcagtagatttccaaagtatgaatcttagaccttgaaaaattctgtatctctgaccttaaaagttttgattattttattctgtttccaaagtgtataaccagttctccaagttctaattggagagctcattagttatcagcctcacagtcacggactctgggatgtcttatttcatatgcctgtaaatttgtgacttgcagtgtgactggccttctcctgtgtgtttatgtagcacaaccacatttgtcttgttggaaggagagccaggtatcatagacagcacattcatttagagccagtcttgactttagattgacctccatgttctccagggagaaaataattatgcaactgtgaacagagaaaaagggcaaggcacactaaccaagggataataaggatgtagtggcatttctaactctgtatttattggttttgtggttttgagatagatgcttaatgttatttctgggcagtttttaaaaaagagatgaaatctccagtgtcataaagact

SEQ ID NO: 117323 - DNA, 1002 bp, Homo sapiens
gttcgccccccttctccccaatctccgtcctcttccctcccttcgccctcccccccttccttcctcttcccctcacccaaccctggttcccctcgttcctcagtcccgatctctcccttactctgtccccgcccactctgcgccggcctctcagtccgggttgagccccacgtgtggacggccgcgcccccactgacagccgccgcccgccggcccgccccgcgccccgccgggcctctaaaacccccgcgccgcgccctccaccgccgcatcttctccagcgcccagcctcccgccctctctcttgctggccgcacgccccggccccgcgcacctccgcccggctccgcagccgctacccgcgcttcgttgccctgtgggactccgagcgagcccggagggaaccctcctcttcttctgggggcgacttttgtttgcttgcctgtttctttctggtgacttttgcagctttccaatatccgtcttcggagcgcacgggaatccgccgagctctgcgtgcaggcccttttttcttttgaggttcacattttttgaaattttacgccagggcttttgtaatttcctcccccgcccgctgacggtcctggagtcgctcggggctttaggccggttatgcaacgtgtaccgctcggggctgccggctgcacctccgccgcgcctcgccgctcactgcgctagacccggcgccccgcgtctcgcttcgcgggcagtcagggggccggcgctctgtcgaggtctccagctagagcagggagcccgagcccgagggagtccccggagccgacgaagggcttattagaccctgactcttttctgaggcgcgcagattttgtctttgatcactccctctccgcgggtctacggccgcgcgctttcggcgccggcgatggggagaagacggaggctgtgtctccagctctacttcctgtggctgggctgtgtggtgctctgggcgcagggcacggccggccagcctcagcc

SEQ ID NO: 117324 - DNA, 1718 bp, Homo sapiens
gtgaaaccccatctctattagcagtaccaaaattagccgggtgcagtggtgcacgcctgtaatcccggctacttgggaggctgaggcacaagaatcgcttgaaccagaaggtggaggttgcaatgagtcgagatcacgccactgcactccagcctgggcgacagagtgagactctgtctcaaaaaaatatgttttgtagagacaaggtctcactgtgttgcctaggctgctcttgcaatcctgggcttaagtgatcctcccaccttggcctccgaagtgctgggattaccagcatgagccaccatgcccagctggattccctaacattaacatttgatattcctgcagtacatttgtcacaaccaaagaaccaacattggtacgttactattaactaaaccacactttattcatatttcactagcttttccctaatgtcctttttctgttccaaaatccaaactaggataccaattacattttgttgtcttgtctcctttggctcctctagtctatagcagtttctcaactttgtttttaatgaccttgacagttttgaggagcactggtcagatattttggtagaatgtccctcaattttgattcatttgatgtttttctcattgttggatcggggttgtgaaatttcaagaggaaggtcacaagggtcattctcattacatcatatcaaaggtacatgttattaacatgatgtcattaatgacattaatcttgatcacctggctgagacacagtcgtcaggtctctccattgtaaagttactcttccccctctatactctcctcataagaagcagagtactaagtgcagccacattcaagaggatgttgggagttaaacaccttacatagatactctccacatcatattcaacagcatgtggagaatgtctatgaaaggtagggtattttttattcagtaaattgtaacctgtactctgctttaaaaacatgccttgccactgtattctctatggtttctttgtttactgagtttgtggatggtaagttcctatactagagagatttcccagggcagtgaggattttagggctgtatttttgacctcctcaatgtgtgtctaatatgacacatctgatgcagtcccctgtccagaacccatagctaaaatgaagggcaggaaacaccagctagcaagaactggagaccacaactctggatattaggattcctgggtaggtaaggatttattcttttaaacacctcaacttaaaaatatcttgaccattttataatgtagtccttctgaaatatataatttaacagttttcttaatgagtgtgctggaatgatgttttcctaatttataagttagaacagctttttactcttccactggaggtctagactgtagcattatttgagttttgatctgtttttattgtattttgaatcttttctctgtcagccatcatttcttgctgctatcagtttgcctgcctccagcagtttcctttctgatttgctgtttatagccttctgttaatttagaatccagacaatgaaacttgttaggaatgtatacagaggtagtcaatacagtataaaataggatctgagagctggaattctaagcaagtgtaagctctaagcatgttagtgaatggcctccaccacatttacgcaactgcccaggaattttatttttcaaatttttttttgtttttgctggttctc

SEQ ID NO: 117325 - DNA, 1019 bp, Homo sapiens
tatgctcaatcacaattatctttgagtggtccttcaatgctaattttaatgaggtgtcatttgataattctccaaaacgctcttgtcatgtgaagataaagttgacgtggcatcattgaaatgtactttcattggttgtaatacatgattcagtcattgttgcagcctgttttcactctatagtatctgttaatgaattgacacaagttagtacttacaaagatggaatctgtataatacatttgcggatgatatgaactgggtatttttttcccgtgtcataagttatttttcacttggcctacctttactacagagtgcctcataatgactcagttttcccactaagttctcagtctgcaagactgaagactcattcttcatgttggacacttagggtgaatgaagaaaaaaactcaaagtcgcaccaaaactgagtgctagtaaatcagctatgtgaaggtcatccagatcacatggagcaaaatctttaacaaattcttgtaaaactctaagaatatgtttaaggttcttagtatcagaaacattggcctaattcagttcctgattttacaaatgaataaaccaaagccagagatactgttttatgctccagattatctagctaattagaagcaaaactagatgtagaacaaggtccttagatgatctgtagtgctctgtctgctttatcatgttgttgtacatttgtaaactacttttagtttattatgttattacatatgattcttgtactttcctactagactcatgtgtgcatccaacaaactgccctggagctagttggccgaggagtcgaggttcacattgttgctgatgccacctcatcaagaagcatgatggacaggatgtttgccctcgaggtaattgtcctgcttgggaatagatcatttgtcaagttttccaaataaatgagaagaatactggatatttaacagtaatgaaaggtttacctcctaaatttgagttggtctggcaatatcagactaattgatttc

SEQ ID NO: 117326 - DNA, 1099 bp, Homo sapiens
tgaaatccatccccatcactgaacttgatggtatggctgggaaccacggtttcagtagaggacactaattattgcatcccagcatagtgttactcttctgaaatagtgttcattctcatgcttatttcttgatttgcctttatctttttgttcaagcgtctcgctcgaaccgggatcatagtgaccacgagtgaggctgttctgcttcagctggtagctgataaggaccatccaaaattcaaggaaattcagaatctaattaaggcgagtgctccagagtcgggtctgctttccaaagtataggacatttgaagaactggtatgctactcactggtgaaggacagtcaggtgaaggactgtaagcccacacaagctcttcttatctctactagaattaaaatgttaagtcaaaaacggctccttttttgcgcctcctagtgaaacttaaccagctagaccatttgagtaccagcatttagttacaaacgtcaaaggcttccggtgctgcttaccttccttttttgttaatgtgcttttatttattaaaaaaaattacaatgaagatgcctgttttgtctctactgtgtactctgatcgtatctttccaaagtgcagactcttgtgaagttttcttaaattgttcactttaaagaaaatgacgtaccaacaatgatttggcttttatattactgtaagatgttataatgttaatgtggatgtagtgcttttactttacagattgattggaataagattattgcatatgaatttacccacaggactctgaatcatgttacccactcccctcacaatgttgtccacttagtgagttgcattgatctatccgtaccaaatgatgttgaataattacatatctttcttgactatactgatttcttattttggtcactattactaaatctctgttaatattctctcttttaactgaaaagggatgggatagaagggtttgcaatgccatattattggtggagggctgttttaacatctttgaagtatggcttgctgaatatctttaccaacatcttgaatatatattctagtgtccacaagatttagcaaaaagataaagcttgg

SEQ ID NO: 117327 - DNA, 1879 bp, Homo sapiens
tttatttaaggtaataaaatcttgacatttataatctttcaactcatgggagttttcaaagaaggaaaatcctttgtacgtaggggcagatggattttactaaagggtgaaaggccttcttcattaagagcagattttttttatttttcctattggcagtggtaacaaatagcaacctggtgtgtttaaatacttttttccaaccatttgtgtgtcaaaaaagaagaatcaaagatttctgcacctttaaaaagtttttattaaatttaacctagtgcttctcaaactttaatatgaatgcaaattatttgaggatcttgttaaaatgctgatgctgactcagtaggtctgttgtgcagcctgaggtgacattttgcatttccaaggtgacatttcgcatttccaaaaattgggcattttccaccagtgctgttcagaaaggaccatatttgaaatagcgagaatttaactccagacaactgttttcctccactgcacccaaacctttcagggctcagtgaaataccagtacagtgaagccttttcacaggtgaaactaattctgtgacgtcagcttcgtttcccctgccttccataacaaactattataccacaaacagtgtcgtaaaacaacggcacaagtgtattctcgcagttctgtaggttagaattctgaaatgagtcttagtgggctaagatcaaggtatcagcagggccgtgttcttttccggaggctgtacggaagaaactgtttccttgctgctctgtgcttctagcattcacccatgttttttttttgttttttttttttttggttttttttttggcttttttgaccccatttctacctcttctaagccaatgaaggtgtatctgttttttcttatgtcacatctgtctgactcactcttctgtctttctcattctgacttaagagctcatgtgctttaaggtcatctgatcagaaccttattccatctgcaacctaagttttcttttgctgtgtaacaacatattcacaggttccagggtttacaacattaacatctctggtggccactctgtataacacagacaccgccatgtgatttagtattttatttcattttgtcatttgtcatatttccatctttcctgctatattataagctctctggaagcagagaccgtgaattatatatagtcattctggaaacattttgaaaacccactaagttctaaacattgtgctttgtgcttaggataaaaagatgcccctaggaaacttatgctatggcacaaaatcagatacaattctcagtaaatgtgaattgaattaaattatatcagaggtccaggaatgtcaatataatactaaagttcagaataactgtgaattctgccttctctctttttttgtacatcatgccaagcaggtcactgacaaggctttattattacaagaaaaccaaattgattataatacattatgccttaaaattggaagcatctgtaactttgtaggataatgaaattctttcaactgatgtaaatagagaacttgactacataagcaaaagagtagtcattgtgttgaattgcaagggtatgggagcaggagcaagaggattcacttattgaaatgctaaaacatctgtagaaacttattctaaaattaaaagtgataacttattccaatcaggaaacaaaatatcctgttacatccgttaaagtaatacatttctcaacgtggaatatattccctctctaaaagttgatgtttgtgtaaatatgactttagaactgggtggaactataaagatcatgatctcaaaggtccatttcagctcccaaattctaaaatggttttattttacagacacagttagtgaggcccaga

SEQ ID NO: 117328 - DNA, 1034 bp, Homo sapiens
gatatactactacatgaaagtggacataggcacagccaaaatctgtaagatgctcttcatatggattacattatgggtagctcttgctgcagttgtgcatggttgtggccatgaagaaaggtggccatattgctaggcttttaggtttgtgtcatttttacactaaggcaaataacaataatttcataatatacaactaattacatagatctttgcatgcctgtgtgagcatgcctgcaagagatattcctgaaaatgatgtctttgaatggggggtggggagacacagggcttgcgttattaaaagttttatatattctgccaaatcaacttctaaaaatgctagaccaagttacactctcactaactgtagttaagagtgcctttttcctcatatctttatccatagtgaatattaacacagttattaaatttaaacatacttcgtgaatttttaatgtttatttccacaatttacattttttcttttgtgcattacatcctcatcatcctttttatatgtttctgttaatcttttagtctttaaatgctgtacccagatctcgaattataaaactattagattacacaataaaagcacagatataaatataggtaacacccagatttcatgaatgttaacattttattttattatttttgcttaagacctttattttaaattctgcacatcatgttgaagccctcagggtacttctctccaaccaattttttatctgggtccccagatgtaacaacgattccaaatttgcctatatatttccattcatatttttataattttgttaggcatatatgcagccataaaaatgtacatagcattgttttgtttttaaaatttgcacaaatttagttgtactttacaaatccttttagaatgccttttaaaattcaaatcatatttttaaggtttgttcaggtggatgcgtgtagttttagcctacggtttaaactgcagtgtttatataatttttgaatattttattcattaccttattgatggaggttcattt

SEQ ID NO: 117329 - DNA, 1067 bp, Homo sapiens
aaaaaaagaaaatataaacacaaaactccaaagtgtaattagaagttacctcttgggagggaagtagaattgatggattgatggctgggagtacatcaatgagagggatgggtgaatataacttttctgcagccatttctggattgtttgacataagcatgcagtgatttattacttctatgatttctttaattagaaaagaaaaaatgtacaaattgtttaaatccaaactatttttgaaaaaaaactagaaatattttatcactatatattatcaataagaaaatgattccttagagggaatttctgtgaaatatcagttaattgtttacagactgtgccaaatatttcctataagcttaaacaaagcatcagaatttgggtctgttttattttttaaatatatacacaaaagtataagaacctgtgtatatcaagcaagtctcctgatattgtgctaatttattgcttgaatcataaaactttgcaccagcaatcatttttatcatccctgaaacacaaaagcagtaatattaagagataaccaaacatactgcgatgagccctcaaacatcacatagcttgtttgtctttagttttttagcaatataaaaatatctttatttttatatctggcaccttcaatatttttctgctatgattttttcccttgtatatataaacataatttgcaatcttgaaatctttaaagtaaacttattttggcagttaaaactgtaattactaaacaaaagtaaaaagttttattttcctataattgtgttaatgataactctcttagaggttctgtaatgctttgtatattgaaataactaatgaacctctcagttttccaggccatgtgggcttcttcaaatattcatctgtttcagctcttttagaagccatcgtgaaaatagcttccaacactctgccattgtgtgcagtagtgctaaaatatttgaatgcttgcaacctcacaccaaacactgcaagctcaatacattgctaaccaagagacaaagcttgggattttgtaactgataacactctagtgatattaatca

SEQ ID NO: 117330 - DNA, 1043 bp, Homo sapiens
tcctgacctcgtgatccgcccgcctcggcctcccaaagtgctgggattacaggcgtgagccaccgcgcccggcctccttttccaatttttaaactgcatctttgtacaaaatccaaatttatttaatgagaatcttagaatattgatattctctgagttgttgatctttattttgtttttcaagtttagattaaaaactttttgaatctaaaagaggttgaatttaaatgttgacattattagagaaaatctacagagactaattattttatggcctataaaagtaaagcactaacagggcccacacaaaactatatggtatagttttaattctcttttctaaaaacagcaataaaaacatattatcaagtaaattctaaaaacagatgaataaatatcagaatgaacagaattttgcttagatttctgaaattattaacataatgatacttataactctattattattacagttagcccttattaaatccttagtaagggctatacattgtgtttagtctttcattcaattcctaaaaaaaactgttaggtaactatgattatcattcacattttagaaatgagcaagctgagaatcagagcatttctgtaatttcctcaaaatcctttgtaaattgtgttgccattaagtgtagaagttcatttagggctaggaggatcaacttactcaacctcatcgttatacaatcactaatctaaatgcttgtaatcttacttattattctcaatatgattttgttactcttaccatgtttgctacgaccatcatctatttgattttcaggaatgaggagaaattttaataacctgtcccccaaattctagcaaccattcctgggtgaccatcagcaatctctctcattgcttttgttttcagtgaatgaaaaaataaaataaaaataaaaaagagaatgactacacttctttctcttattccagttatctttaccagttaatagataccaagtaaagtataaaataattggcatgaaataacagaatttcagcatctaattgcccac

SEQ ID NO: 117331 - DNA, 1032 bp, Homo sapiens
atctaagaaagcaaggtagcaaggccaagattttccacttaaggaaggggtattgggagggatggttgctgaggagtaattaagatcactttttatttaaaatcatttcataacctctaggtcacctcttcaaaaactttgttatttggtggaacatagctgtttgctcctgaattctccaaaacggtgtgttagaatttgcccacagtaacataaaccaaactgggactgccatgacccagatcccagcagagccaggccagtgtagtgtttctgattcctctggctaaattctcacttcctagcccagagttccagaagcaaactgcccaatccctgatctctcaccaccaactttgtgacccaggtcccagttactgtaccacagatgctttggtttcctctgacaccccccaatgagtattaggtaacaaagcaggcaagaaattcacaagtagaggacaaaacagcaatgctgagcagctgtaagtggaataggaagaaagaagcccatgccttggttactggaagttggggtaaagacaggtgagtggaacctgagtataattttggaccagcctagcaacgaggctacttggcatggctgccaacacagggctccaatctacctgctttcacataaaaattaaggcttagcttgattaggactcagccctggtgtccaaaatcctgaaaacttttagggatggggtgacagaaagagtgaggctggattgattcctctgaatattgggacaggaatatttactttgtcctgacactcaggaatttgttgaagcccggtgagttaggaaagagttgtaagttcttaggtagtcagagcattgatcttcccctcacaagagcttctgtaatggcttcatggtgaattaacacaccctacaattcagataggcagataatgtgtcattttatagcagtttataactgatataaccgtcttcatggccatctaccacaaagagtaggtatgggggagggaagagggagaggaacaaagttgctaattaa

SEQ ID NO: 117332 - DNA, 1027 bp, Homo sapiens
aagtgggaaaaatctatacagatgagtgtatagtccttgagttttgtttcttaggttttgttttccctacaggaaggaaaaaaaagaggttatagttgcttacagatgttaggaaacccagttatagggaatctagtcaatggtaagggatttttgagaatacatttcttctccagaaattacataaggaagaagggaccataacctagagtttgattctgatcatgctatacttttactttttcagaggtcagtttcccagcttgcctcacagttagtattgggaagataaatataaagcaagaataataatacatgacaatataatgggaaagaaatttcataaatgtttgaagggtgagtttcatcagctatttaaaactaatgtgtttaaagtacagaggaaaagagcccaaccaaggttcggtgagagctaatcattgggcctaaatgtcttcagatttacagtttttcagtaaaatgtgcgtaagaagtaaataaagaatactgaagtctaaaaccatcatcacagggttttaaagacagttctgagtacagtgctgaagaaattaacacccagggcttacatgtaacaccctccacccttttctgttttttttggtctcatgtattaataaagtgtacagagaggaaaaatgagtaagacggtttagcctcagataggaggaaatgcttgttctctaaatacacagcattatagcacatattatttaaacataacacagtaagaccattccccgcccccccaatagctcttcaaagggaaatacaagctttttggcatgaactacttatcacattttcctaatactaggtattggtagcaactcttaaagtttttaaacagtttattccacttaaaatatgcaatcaatgtagacacttcttctgggtagtacttatatctcctatttaataatcagatgttgtcctcatccttccctatgattgatggtcaaaaaaaaaaaaaaaaagcctgtcttgcttttttaagggctttctcctt

SEQ ID NO: 117333 - DNA, 1052 bp, Homo sapiens
tcataaaataatataatagagaataaatggccaggcgtggtggctcacacctgtaatcccagcactttgggaggctgaggcaggtggatcacctgaggtcaggggttcgagaccagcctggctaacatggtaaaaccccatctctactaaaaatacagaattagttgggtgtggtggcatgtgcctgtaatcccagctacttggggggctgaagcaggggaatcacttgaaccctgaggtggaagttgcagtgtgccaagattgcaccattgtactccagcctggactaaaagagtgaaacttcgtctcaaaaagaaaaaagaggaaatatttagattgattggttaaaagtataaggaacatattaattttctattttcagctatcagttttctgtggctgtcatattaccacaaactgggtgccttaaaacagcagaaatatgttctcttattcttctggaggccagacgtctgaaagcaaggtgtcagcagggctgtactacctctgtggctccaggggagaattcattctttgcgttttcatcattctggctgttgccagattccttgacttgtgtccacctccctttgctttatcttcaagtggccttcttctctgtgtgttttttatgagacacttgtctttgaatttagggactatgaaggttgattttttgtatgggtcaacttgtctatggtgttcagttgttgggtcagacacttgtctagatgtgttttgtgaaggtaccttaaagatgtgattaatatttatgagaaagcagattatcttctgtaaaatgtggatgggcctcatgcaatcagctgaggcctaaagagcaacagctgaggtttcttggagaaaaaagaattttgtctcaagactgtaacataaaaatcctgtctgagttttcagtctgctaccctgacctataaatgtcagacttaggactgcaacatcaacttttacctgaatttcaagcctgccagcctgccgtgtggatttcagaccagcacttagagttgtgggaactaattccttaaaaccagtct

SEQ ID NO: 117334 - DNA, 1037 bp, Homo sapiens
taatgggtactctagaagcctaatctctatcagtacgcaatatacgcatgtaacaagcaagcacatgtaccccctgaatataaaatatgataattttttttgactgaacttgttttcgtactttaagttctaaggtacatgtgcatacctatgtaataatttttttaaatgcagtgaaattaaagtaatttcagaggaaattcatgtttctataaacaagagacctaatttttcaacattaggtccagaggctaatacaaactatatttgttctattaatttgcatatttgccagagtttatgaagtttttttttagtaaataacttattcaagctatttatatatcagactgaaataaatatcgagcatattttaagttatatattaactcacaattttttaaagcatgttcaaaaaaatatagattttttttacacatgggattcagtgcccaaatgaaaaacagacttccatttaaaaggaaatttgcatttggtggataataaatagctcctggattttgttgagtgtggcttcttttagcattcttttctttcttgcattttaatatctgttaagattcagcagtagaatttggtcttctatattaaatggctatgtctattttttgatttttaaatttattttcttaccattttaaaactgaagataaactttacagttttttattgtatgcatgtaatctaagcaataattttgtgaatatatgtctactcgcctgaatctcaatcaggtatttgattttgggggtggggagagtagctgaaaatgaagaaaaaaataaaggactctcagcataaacaaataagccttttgtcttcaacttttggagcccaactttcatttatagttctacactgattgtcataaaggttcacaaaattggatgcatttcagtagtgaaactgtcactgtactagaatgttcttcatctgatttttcgttgttgtgacatctcagatatatatttgtgtcatagttttatatctctcttcttgctttttccctaaatttc

SEQ ID NO: 117335 - DNA, 1032 bp, Homo sapiens
ctcagaacaaagtggcatggaatttagcataacttcatcataggccctgtttcattctggaaatagtttggagttatgctgtcatattatgcacattcctatgcagtggctactaactagatattgtaaaattacatttacatttatagcaacttgacttgggttgtaattttgtcagagttcactgaagtagcccatcctcaatcattacttttcagatgtattagtgccattgtcatgagtattgaattatctccaggttattttataagaagatcctatgtaaagcaagattttaaaaatatatatggacataaaattattcttgaaaaagtgataggcagcaattcagatactctgttctcaaagttccaataattgatcaatatggatagttataattgagtcaaaactatttttctccagtattcccccagagaactaggttgctgttctttttttaaaaaaattctgataaacagggttttggtttttgtttcagatatttttcactgtgaatatgtgaaaatattttactctaatatcttacttaacctccccaagcacacaagttcaagtggatttggatatgagaataagagtctcagacttctttcagaaaatcattgccaattatgttattttactgtaccacgtgatacatttgtaatataaattctgtgataattttatttcattagcatgaacaggcaatgcttagctctgcagtgaggtaagtggacgtatgacagtcatgcgcttacacttttttgttaattcatataattttgctgcttttggatggtgtaaaagaccaatcttgtcactaaatccattaatttgtgttatgggcatatcactcccagcagtacaggagaagaaaacacactcatgggcaaaccagttatgtaaaacacctacttttgtgtgctaggcattggggatacagcagagaataaaatagatcaagtctttgccttttaaaccagcttttattctactgtagggatacagacaataaacccataaaga

SEQ ID NO: 117336 - DNA, 1036 bp, Homo sapiens
aaagcaagctctatcctctccaccctgccccacaatcactcaaatcagttggctgcttaattcttctctcttctagcttattacctcttttcagagcagaatagctaaggggttatatttgcttcagtgtctaacactctttttcatatggctgatagaatccttcagtatgttacaacgaaaaacatttttattatcaaaataatttatcaaccaactgtaagcataacacatctgacaattttataattgcttataatttacaaagcactttcatatatatttttaattgtggtgctaccaatggtcttgtaaggtaggtggggcaggaattaatattcttgcctaactctataatttatacactctagttgatggcaatttaatcagtttatgatgcaaaactttttacatcatgaaaatacacatatataaatacttaaatgttagtgttatgtttgaagttatctaaacatcaagctcatattggcatttccatgcataattccagagagccctttcaaaaaattatcctcctgcgttagtgttttatatttttatattattgtatatatcacatattataaattgtatagggccatccagagtctgtgcaaagtacttaatacaaataaataacttctcctttggctaacttaagtggcaatttgccatttacctaagattgaggttttattctttcagaaataattgtaatcaagatttcatgaaatggtagaaaaatgcaaaactgacaatcatttggattgtaatgctttgtcaaaaagttatattatcataaaagcacaatcccatatatgcggttatgattagttattggaaggttttatcaaagatgaggttgaatttattggttttgattttaaaatgtgataaagtttttacagcatttaaaaaaatgactgcattcacacttaggcttttcattagaacattcacatgctatattatcaacttcaaagcagatgcacaaatggaaacaatagttaagcattttatccacaagtattttata

SEQ ID NO: 117337 - DNA, 1037 bp, Homo sapiens
gtggtgtgaggaggagcaattagatacctgtatttggaccagcagggtctgggagccctacgggtggtgctggagcacaaggaattggtgggagtgggaaagtgatggtcttaaattgacacaaggatgcagaggagcccagaagatgtgttggatgttactaatctctacactaaggaaccatgggatcatggaacactgttgatagaagaaatgttggaactagagattccagaccatttagtttatagccagtgaaaatgaagcccaaagaagttccatttgagatctcatggtcaggttgtggcagagctgaaaataaaaaccagtcttctgattcccagtcaatggctttctctctgagctctttgcagcttcattagagacattctgtcaatagttacaccatgtctactttctgggtggctgtttttgtttccctggtttttttgttcataaacaagcttagagcataataaacaaattttttttatttttccttcatattttcagtgtgactacaaaagtttgtaaagatgttaatttttctaaaatttctaaattttctaaaatttcaccaccaaaagtttcttcaaaactacagatgtccagctacttatctggtatcaaacacatcataaatctgttaaatattgatgcttccagatcatttttcttgatgctcagaataacactgctgcatttccattaaattctcagcattaatgttttgctttggatgtttgtctcctccatatctcatgttgaaatgtgattctcaatgttggaggtagggcctggtgggaggggattggaccatggaggcagattccgtgaatggcttagcaccatcccttcggttagtgagttagcactctgagttcctgtgagatctggttgtttaaaagaacatgccactccccctgcccctcttgctccctgtttttcaggtgacatgcctgctccctcttcactttccgcaagcactggtaagcttcctgagactctcactaggagcagctgccagcaccacacat

SEQ ID NO: 117338 - DNA, 1043 bp, Homo sapiens
ttgcctctgcagttgtttatatttcacaatgaggattatgtcattaccctacaggtagccccatccaaatacaatcttattactaaaagattctagaatttaatggctatcccacaatagactgcttttcagacatcagtaggattttccaaatatcaaggatataatttgctgcattgaagttgaatgaactgcaaattttatttacaggtttttcatatacagatatttcttgcctgatcagagactgatgtagagcttctgaagctgcccaaaatatatcccatttgatgtttcctaaagttcttttaagagaacctgagctcttcctgttctctatcatggcggatcaaggtgaaaaggagaaccccatgcagaaacttcacatctgcaagctctgcctcaacatctgtgtggaggagagtggagacagactaacccgagcagccaaggcattggagcagctcacagggcagagtcctgtgttttccagagctagatacaatcagatcctctggcatgcagagaaatgaaaagattgctgtccactgcacagttcaaggatccaaggcagaagaaatcctggagaaggatctaaaggtgcagaagtatgagttaagaaaaaataacttctcagatactagaaactttggttttgggatccaggaacacatcgatttgggtatcatatatgacccaagcattggtatctacggcctggacttctctgtggtgctgggtaggccaggtttcagcatcacagacaagaagcacaggacaggctgcactggggccaaacacagactcagcaaagaggagatgatgcgttgcttccagcataagtatgatgggatcatccttcctgacaaataaacccgtttccatcaaaaaggccaataaaaagtttttggtggaaaaaaaagagaaccagaaagctcagccttccttagactttatttgctgggcacagaaaatcatgcgcagccttgccaaccttctaaggaatcagagaaagcctcatcccactgactcatgacatttag

SEQ ID NO: 117339 - DNA, 1063 bp, Homo sapiens
gaacctagggagcactcccctttgcccatcctctcatcacccccaggtaaggaactgaaggttctagtagggaagtcgaggctgaactgtggttacatagtctgagtcaatacagcagatgcaagaccatgatagtggactcaggcctcaaaccggaaaccaggtctacattggcagattatttctaaatgtcatgagtcagtgggatgaggctttctctgattccttagaaggttggcaaggctgcgcatgattttctgtgcccagcaaataaagtctaaggaaggctgagctttctggttctcttttttttccaccaaaaactttttattggcctttttgatggaaacgggtttatttgtcaggaaggatgatcccatcatacttatgctggaagcaacgcatcatctcctctttgctgagtctgtgtttggccccagtgcagcctgtcctgtgcttcttgtctgtgatgctgaaacctggcctacccagcaccacagagaagtccaggccgtagataccaatgcttgggtcatatatgatacccaaatcgatgtgttcctggatcccaaaaccaaagtttctagtatctgagaagttattttttcttaactcatacttctgcacctttagatccttctccaggatttcttctgccttggatccttgaactgtgcagtggacagcaatcttttcatttctctgcatgccagaggatctgattgtatctagctctggaaaacacaggactctgccctgtgagctgctccaatgccttggctgctcgggttagtctgtctccactctcctccacacagatgttgaggcagagcttgcagatgtgaagtttctgcatggggttctccttttcaccttgatccgccatgatagagaacaggaagagctcaggttctcttaaaagaactttaggaaacatcaaatgggatatattttgggcagcttcagaagctctacatcagtctctgatcaggcaagaaatatctgtatatgaaaaacctgtaaataaaatttgcagttcattcaacttcaatgcagcaaatta

SEQ ID NO: 117340 - DNA, 1033 bp, Homo sapiens
ggtttttgtttgtttgtttgttttgagacagagtttcgctcttgttgcccacactggagtgcaatggtgcgatattggctcactgcaacctccgcctcccaggttcaagtgattctcttgcctcaacctcctgagtagctgggattacaggcatgtgccaccatgcccagctaattttgtatttttagtagagatggggtttctccatgttggtcaggctggtctcgaactcctgatctcaggtgatccacctgcctcggcctcccaaaatgctgggattacaggtgtgagccaccatgcctggcctctggttctatttttgtttgtgaagttatctgcatagcttctctttattcctgcctattttcccagtttatctgtgagccattcattagtttcaagaaattagccgatggagaaattcttagcagaagcgattgcaggcaatagggaaagggtaggtggagagcttggggttggttaattggcctggtttgggatggaggcaaggagaacccagctaacattaaggaattggattttcacagcccttggcaaatagtaacaaaatatgttttttttttttttttttttttttttttgcgacaaggtctccctctgtcacccaggctggagtgcagtggggattatagctcactgcagccttgaactcccaggctcaagtgacccttccaactcagcctcccaagtagttgggatgataggcccatgccatcacacttggctcaaaatagctaattaaatcatttatttgatcacctgcagtgacatgccaattgaaggcaaggctttgggtttccaaatcctattgccataggatcacataaagggtaggcatggaatttgagggttgtgcaggtgttgtgactgcttctaatattgctgaacatcttaaaaagtaataacaaggctgggtgccgtgtctcacacctgtaatcccagcactttgggaggccgaggtgggtggatcacttgaggtcaggagttcgagacagcctggccaatatagcga

SEQ ID NO: 117341 - DNA, 1094 bp, Homo sapiens
cagattgcccaagcgcaggagttcgagaccagcctggacaacattggagaagccccatctcaacaaaaaaatacaaaaattagccgggtgtggtggcatgtgcttgtagtcccagctccttgggtgggtgaggcaggaggatcacttcaacctgggaggtcgaggctgcagtgagctgagatcgtgccactgcactccagtctgagtgacagagcaagaccccatctcttaaaaaaaaaagtttaattgaacagcagattttatttctaatttgtttcttgaaattagtaatgataaatacctaatcttaatgagtctccagttgtagattatgctctgttgggattaagagtttccaaatatttgctcaaagggttgtgtttcaatgagagttttaagatttgatatttcagcttgacagtttgttatttaatggcaagaagtaataaattgcctgtgcctaagaaactttttttccttttccagcttcttggacacttaatgattgttggcaagaaatgtgctgctgatctgggcctgaataagggttatcgaatggtggtgaatgaaggttcagatggtggacagtctgtctatcacgttcatctccatgttcttggaggtcggcaaatgcattggcctcctggttaagcacgttttggggataattttctcttctttaggcaatgattaagttaggcaatttccagtatgttaagtaacacacttatttttgcctgtgtatggagagattcaagaaataattttaaaaccgcatacataataaaagacattgttgcatggcttatagtctctctgagtgttgcgtttgatttgttattttaaaaacatatttgttggaatatgtgaaggtgggtttataattttggatgtttcttgctttttcttcccaaggaggactcaacatatgaacatcgcattgttttaatggtgttactagtctttgaagacaaataatgagagtttataaatttagctttaacttcgaaatatctttccaggctaaaataggtccaacttagatttttaagctaattctcacattttctaagaacataggaaattgaccattt

SEQ ID NO: 117342 - DNA, 1057 bp, Homo sapiens
aatgtcggttagattcaaaacgttatcaaaaatttaattaggttcctctaggtaaattaaaaaaaaaaatactttgtctctactcaggggaaattctttggttttagaaaaaatatttctttttaaagttcgcagttgcctttgagaaatggttcttgaaaaatttacatttgaaccaccgaagtccaactgtagaacggcaggaagcattctaaatgaatcagcattttgtagggagtacccagtagaattactcctgagacaaataagtgtggatgggttttattaaaacagctttcacttcagcagtgagcaagagattcgaaaatattcatgtcatatgtgtatttacagacactgttttaaataattagtctaaatgctaaagaatatcatatatatactcttcagctttacacaaaaggataggtatatttcttaaatagttgagtaaagtgagaatagatattaatcaagtatcagacaaatatgtagttacaaaactgattgctatcataaagaaaaaaaaaaaaccaggaaattgcacaactaggactctgacctgggagtaatgggacggggagggcaatcagaggtttttttctgttttttcttttttctcccagaaatcatgtatgtgctgggaatggaatggcggaatgactagcagtttaaattagacggaagttggggtttggagggggagaggatcattgaaaaagctctgagggcagagagctcagaaggccagttccatgtgaagacctgcaggagatctggagaggcaggcaaggattagcatggccaatttttatgcattcattggctcccagtttaaatgtcactgcctcagagttgttcttaaacacttaatctaaatcaggcttttcctgtaatgatcattcatatttttcctttgtaacatgtatgacctttggtgattatacttttaaagttggtcttcccataagacttccatggagtccgggtgcagtagctcacgcctgtaatcccagcactctgggaggccgaggcaggtggatcacctgaggtcagg

SEQ ID NO: 117343 - DNA, 1012 bp, Homo sapiens
aagtgatcttaatgtgtagtcaagattgagaaccactggtagagagagaaaaaaactctgttgaagagaggacttaaaatctgctgcagcagcaagaccttaaataatctaagtgctaagttgcagccagcaccacttaaattatcaaatcttgtcagttacagtatccaactttccctacaagcatccataggcagacgaagggtttataccagtaactgcattccccaggagacaagaaaggaggatagaaaaacgacttaggaatctccttggagctcaagaccaggaacttccccaagccggaggtccctgaggcgctctagcgcgctggccgcactcgcagcccaggtcgccagtgcgcacgcgcaagattaggtggggcgccagagccggggcacctgcgcaggcttggctgcgccctctcgcgccgcacgctctgcgggttcctcccttcttccgagcctctcctctggccgccgcgcgggagagaggccgagatggcagatgagattgccaaggctcaggtcgctcggcctggtggcgacacgatctttgggaagatcatccgcaaggaaataccagccaaaatcatttttgaggatgaccgggtaggtactgggcaccacctctctcgcctgctgaggtgggtatcgtccgcggatcctcgggtttctcgcggagggagaggaggggtcgcgagtgtagcggcgacgggaggggacctggctgccctggtccagcgggcccccagccagcggacagggcccgggcactccgaggcggcctgccggcgcgtgccggcgctccggttactcgttatctgccccgggcgcgggccaggccgccgggcgccctgagtgccgcaccgcggggcctgggcgcgtgtcggggcgcactggggcccccgcgtggaagcccgccggttccccggctgcctcggaccttgcctgtatcaggaatctcgaaatctcgccagcgctctgcctgacagagagaaacccgatcgcgc

SEQ ID NO: 117344 - DNA, 1454 bp, Homo sapiens
aggcggacagctgaggcagccaactgaccgcctgatgtaaaatggaaaggcagaccccccccctccccccaacttttcacgtctggaagtcgggagggtggtgcgaggggcgggcggggagggcccggggtctctaggtgagggtttcggggagcaaagacacctggctccggagctccgactcttcgcctgaggcgcccgacgcgttcagtccgcgggtcctgccgcggttcgccccgggccccgggcttgaaagcccttggctacctcgtcgcgggagctgagctactcttacaggttgttttacccagtgcttgcagctttaagttgcgattttaggcaacgggtgtggtaggtagcggctccttgatgccgcattaacagctgaaaaagcgccccgatccgctgacttcactatgtgtaagaaacaacattggggattcctctttagcttgcaattattttaaatgataagcttttttaggggaattttggggggtgatgtgcagtttacaaaatctaaatgtttcgttgaagggcctggcttatagtacgtgctcagtaaagtatttgttgaatgaatgaatcttgaaatatcagacaaagcttatctcacatctagtaaaatttaggcacatactccttgattatgattaaggaaagaatgtcggcaaacagtatgtatttttgatatacgttttttagtttttgtcccacataacatactgttgatgaacagtccgttcttactctcaatattatgaacatagaaaatatatatcaaatttggattttctcttttggtttgagagaagttggtatacattttctgtttcttaaaaacaggccttatttctaatctttaaaaataatggagaagataaagagggagtgggattgtattttgaaacccagctttctgtttcattatgaataaaggagtttatgtgtttttgagaagggactgtggtatggtcttgctgctttttgagcaagggagaactctaaatttagggggggaaaagctaatgttgcactaatataataaaatgtcaccatttactcaacagatattcattaagcacctgtttatgggcacaggcaaaatccgcaattatccttttcttaaacttgaatgcaaagttatttccttattattgatgtcgcaagtggtgactgtcttaaacccctagtggctatttcagttgggaaagatggcaggtgaactgcaggaagtgtaaattcataacagcctttaaaggttaataagtaactttgtacagctaaaattattgggttaagcttttatattgtcagtttaatagaatctgtctacattttaaaatgaagggaggaagacatttaataagctagtgtttttattatctccctggtccctattaggagactttggtacagtgtattgaagggtaatgtacttctggtcctgtttt

SEQ ID NO: 117345 - DNA, 1041 bp, Homo sapiens
tcctccctcagcctctcgagtagcagggactacaggcgtgtgccaccatgcctggctaatttttgtatttttagtagagccggggtttcaccttgttggccaggatggtctcgatcgcttgacctcgtgatccgcccaccttggccttccaaagtgctggtattacaagcgtgagccaccgtgccaggcgaggaatttagcttttaaattattagttttatgcatcctgctaccttggttcaaagcttaagtatacttgtatctttctataatactaacaaataatgagtagtgcaggatttagctgagactgctttgggccctcatccaaagggagttcctgaattgaaatgccaagaagacttggtaataagttgtcttaatcctgacactgtaaaatacctgttaatgtattttagtcaaatagattatggtaaaacatactccctctttttcctagaaagtattaggttaatttcatattaaatctaggtacctttgaaataactaaattatgagccctgatatatctgttttcttgcttacccacttagaaactcatgctgtgatttcatatttaatctgtatgatcgaatttttttatcttgtactaaaacataaaattattggccgggcgtggtggctcattcctgtaatcccagcactttgggtggctgaggtgggtggatcacctaaggtcaggagttcgagaccagcctggcctatgaaaccttgtctttactaaaaatacaaaaattagccaagcatggtggcacatgcctgtaatcccagctacttgggaggctgaggcaggagaatcatgtgaacccgggagacagaggctgcagtgagccgagattgcgccactgcactcctgcctgggcaacagagcgagactccatctcaaaaaaaacaaaacaggcagggtgccctggctcacgcctgtaatcctagcactttgggaggccgaggtgggtggatcatctgagttcgggaatttgagaccaacctggccaacatggtgaaaccccatctctacta

SEQ ID NO: 117346 - DNA, 1048 bp, Homo sapiens
cctgcctcagcctcccgagtagctggaattacaggcgcccatcaccatgcccggctgatttttgtatttttttttaatagagacagggtttcaccacgttggacaggctggtctcgaactctcactcctgacctcaagtgatccacctgccttagcctcccaaaatactgagattacaagcgtgagccactgcacctggcctaatccttctgtaatcctagtacgtttcctgatttaatcaccacagattacttttaatacctctcgtcaaacctctagcctcccttttttcctcttcattttcagctcatgaccttgtttcctgtatgttaaaaatgaaagcgatcagaataaaacttttatacgtctccttgtatctttacccatactttgcctttcctactattctgtcatcatggtctccactcgtgctcctttctccttttaaggacattgcattgcttcagtattcatctcattctcctgcattctaatgagctgcatcatttccccatttctactggattatccctatcagcatatagatgtattgaaatatctcccatctttaaaaaaacacctttccaaatgccacatcttcctttagttactcctctccaaaaaggtaaatatttgttgtcatccgcgctccctgtcttgtttggatccactacaatctgctttttttctctttcattctaccataacagctctttttgagattattgagtgactttgttggtggtaaattccctagttctcaagcctaatctcagtggatgtagaagcaatagcagcatttgatgtggttgataacatcatgtttgaaatcttccctttgtttctggcatattactgcctgttttcagtttcttttgttggttccttttcattgccccaacttctaaaaaatgaggcagtgtttcagggacatatgtttagacctcttctatatttatatttagttttagtcccctgtgatctcattctgtctagctagaattatatacatatatatatattttacatttttttataattttttttt

SEQ ID NO: 117347 - DNA, 2570 bp, Homo sapiens
agccaagatcgcaccactgcactccagcctggcgacagagactccgtctcaaaaaaaaaaaaaaaagtttttttttcttgaggcagggccttgctcatcctccaggctggagtacagtggcgtgatcttagctcactgtggccttgacctcccgggctcaggtgatcctcctaccttagtcttccaagtagctgggaccacaggtatgtgccaccacatccggctagttttttgtatttttatagagatgggttttcatcatgttgcccaggctggtcttgggctcaagtgatctgcctgcctgggccccccaaagtgctgggactacaggcgtgagctactgcgcccagcctagaattatatatttcaaactaaaaatgttatctttagtctggatctgtttcctacctccagacttctgtatccatttgcgtactccgcatttttaagtagatttctaataggcatcccagatttaatgtcacaactgaactccttgtcctccctcttctccatcacccctccaccccagtaattgtccccattcccgtcttcctcatcctattaaatgtcaactccatctttcagtttctttggccaaaaacctagtagacattcttgactctcttctttctcatactcccacatgtgattcaaataattagcatgaaaacatgtcccttatctatcttaaaaactgccataagaataaatgtaaccacaatttgctctcttcatctgctgccacctctgtaagcaaccatcgtctcttgcatgtattattttagtagtctctacatgctgcttctgctgttttctgttctcaaaccagcaacaagggcgatcttttgaaaatgaaagtctgattattttactcctgtgttcaaacccttagtggctttccatatcgtttataaaaaccagaatacttaatacctaagtattcaagaagtcttgacccttcatcgtctgtacgtcctgcttgtctgatttcatgtcttaccagtttctccttggcttcttccactctggccacatatagacctccctgaggtcttgaacttgccaagcatagtgttgctttagtgctagtaggaatagagcttcgttttattcactgcagaatccccagtattcagaacagtggagagcacataatggggactcaacatttcctgaatgaatgactgttaatcttgtcactcatgtctttggttacagcttatatgaatgtttctataactaaaagtatttgaatttcacctaaaaccatgtagtcctgtaagaattaagtagaaacaaatttagatgcaagagtatgaagtaagtttcaaatcaatttttgtgtatgtaaagtgaaaatacacagtaaaatggtaagggacagaggaggtaggaaaggaaaggagataaactgatggaataaagaaaaggaaaacctgatttggtagtagggtgacagcaccttaaaaaaacctattttgggcttgcgctatttttttttaaagtgatgtttcttcaattctgagtgttggtgatttacatggacttagacccttcaatttggactatattgtaatcttttttttttttttttgagactgagtctcgctctttagcccaggctagagtgcggtggtgtgatctcggctcactgcaaactccgtctcccggattcaagcaattcttgtgcctcagcctcccaagtagctgggattacaggagtccaccaccaggccaggctaattttgtttttagtagggaccaggtttcaccatattggccaggctggtctcaaactcctgacctcaagtgatccacccacctgggccttccaaagtgctgggattacaggtgtgagccactgcacctggccgtataattttctttttatcagggatgtaggctcaaatgagattgggtgccaaaacttcattatttttcttttcttttcttttcttttcttgctagtttttgctaaacttcttttgttaaagaaaggcagttactgttactgagatagctcgatggtatcctgtgcatttttttttgaaagctcaaatagaagtctcacagttttagggagggattttttttagtctacaaaaagttattagtatgcctgtcctcttagtactgtactgcctagttactctcctttcaaaaaaaaaagcgtatatttattatatttccatggtaaactagcagctacaataatgtacacaactctattgagtagtatttattaaatgcatatacatatttgtgttcctaaaaatgcttgtacatactaaaactgcaattttactgatagttgggaaatgaaagtgcaaaagaaattaatgacttgtgaagttctggtatttcattatgtcaagacaagattttttttttttttcctgagctgtagatctcatttgctgttggttgattaagaaaaaaatcttggccaggtgcgataggctaagtctgtagtcccagcactttgggaggctgaggtgagtggattgcttgagctcaggagttcgagaccagtctgggcaacgaggcgaaaccccatctacaaaaaa

SEQ ID NO: 117348 - DNA, 1248 bp, Homo sapiens
gtgcagtggcttggtcttggctcactgcaacctctgcctcctaggttcaagtgattctcctgcctcagcctcccgagtaggtgagactacaggtgtgcaccaccacgcccgactaatttttgtatttttagtagaaacagggtttcatcatgttggccagactggtcttgaactcccaacctcaagtgatgcgcatgcctcgatctcccaaagctctgggattacaggcgtaagccaccacacctggtgaatattggcaatttcttatggtttagtctagtagaattacttattttggtttaaagaaatttctttatggtggtcagtggagttatatcagtgcttttaccttctttttcaaagttatgttctctttacatctgatgattacttctagattcatttattgcataaaatgtgctatttatatgtttgtatattgtttaactgtgtatctaatagttcattccaaagcaggcacaaaagatcttcagatcctctgacagagtgttcttggttttactgcttatgctaaataagattattgaaaggcgttacttttctggtcaagaaagcagaactgattcagtttgttatatagcattttctcagccctccccccccccctttcagaataatttacataaatactcctgagttcaattttttttaacttttttttctgcttttacttattaccctttaagtgcttgcttactttctctgataatttactttcttctactctgtgatttcttttacaaatcaatgaaatggtgttgtcttgttttctcaagttttttcctgttacctttcctgtggtcacctggacattccagtccgttttccacactctccctctaccttctcccccagttctttaaagagacacaaagttacaggcagcattttctgactggagaaaaattattgtttaaaaattgaactctgagactgggcacagtggttggctcacgcttgtaatcccggcactttgggaggctgaggtgggcgattgcttgagtacaggagttcgagatcagcccaggcaacagggtgaaaccctatctctataaaaaatacaaaaattagctgggcatgagtgtgtttatgaccccagctccttgggggctgaggtgggaggttgcttgagcctaggatgtcaaggcttcagtgagctgagctcacaccactgcactccagcctggatgacagagcaagaccctgtctcaaagaaaaattgaactt

SEQ ID NO: 117349 - DNA, 1030 bp, Homo sapiens
agaatagtttttttaaatgataatagaggttgcctatggtggtgtgcgctttagtcccagctacatgggaggctgaggtgagaggattgcttgagccaaaggacttgagtctagcctggacaacataatgagaccctatctctaaaaaaacaaaacccagaccaggcacagtggctcattcctgtaatcccagcactttgggaggacaaggtgggaggattgcttgagccctggagtttgagaccagcttggacaacataaaaaaaccctgtctctgaaaaaaaaaaaaaattgcctggtgaggtggtatacacctttgtcccagcaactcaggaggctgagacaggaagatctctggagcctggaaggttgaggctgtagtgagctcgggttgtgctccagcctgggtgacagagtgagaccctgttgctccccccgccccaaaataaaacccaaaaccgtaaaaccaacagtagctgtatctttgtatgttactgatataaatttattcagccaagaaaagcaggatcatcagtgtaaggagtgttaatattctatattgattcatgattagcatatattataaataaaataatttctgactatggctaagagaacttttaatttttcacatggacctaagcatttcaatttataatagcagtgtagaataattcttgtgtatttgacttctgaaatgagggagaggaaaaatacaggcaatgcatattttaagcataatgaacagtattgtttctttcagagctccttgcaagaaacaaactctattctaggatttttaggcagaaagatatcttatggtaggcaatttggtacttacaaaatcattgcatggtctggaagagctggaatcagagggttatcactagattaatatattcaagaacataagcccatagctgtgactgagaggtcaggaaacaaactggtaagtagtcataggaacactgaatctggtaccacagcttcttccagttgcctttatatctggtgagtagagttaggctat

SEQ ID NO: 117350 - DNA, 1053 bp, Homo sapiens
ggaacaaattggagggactaagagtggttaccaggggtcagttagcagctattatggtattcgttgagagatgatggtggtgcctagaactctactggtgacttagtgttggggagaaacagattggacaaatagaacatggccgtttggctgtgggggatgagatggaaaggcaaaagttaaggataacatgcttgtttctggcttcgtaaactgggtagatgagagggaatttaatgaaaataaattgaataggattggggtgggtaatggtaagaaagaagcagagttgagttaagaagcagggttcagtaaagtttgaagcagaggtagcacatcctgtggagctgcactacatgcagctgggtgtgaggctaaattaaaagacaactaggctggagagctttgggctggagacagctgtgggctggaaatgtagatttggcgatcagcattgatgctaatcgaactcaggggagtgattgaaataacctaggggagcatttgtagagtgaaagatgagggcataggacaaaacccttaagaactattaatgtaatgttagtttttgagcctttggtattttgactggattgtctgagaaccagcaaaaaggagggaatcagggctgttctgatataggtatttagtagaaacccacctaaattatttgattcgaagagtaaagttctcaaatggtctatcctacccagcctgtcacagtatctgacatttatgctgttagtttctctactttggcttaaggtgttgtctctcttggagtttcctgttaaagtgttgttatccttagagaactagaatattaatcccattgttggtgatcgtggtagtgtttttagggtcactagcttttattctggaattcagtgaaaggatggatgggaatttgagaaaaataagatttgaaaaacatgccattactgaggagtttaggaccacagaacctggacttgcagcattgaggttgccaagcacctggataaggggagtgagaacaagtgagagcaagagagaggttggaaaagggggaca

SEQ ID NO: 117351 - DNA, 1036 bp, Homo sapiens
ccagcctgggcaacatagtgagaccttgtctctacaaaaaatttaaaaattaactggacatgatggcacacacccgtagtcccagctacttggaagattaagggtaggatggtttgagtctgggaggcagaggttgcggtgagctgagattgcgacactgcactctagcctgggcagcaaagcaagaccctgtctcaaaaaaaataaaataaaataaaattgcatagtggatacatgtattatttaacaaataattataaagcaaatacctgtgtagctaccacccaggtcaagaagtggaacactgtcagcattccaggagcccataagcacctcttcctatttgtaatccttgccctcaggcctagaggtaaccattctcctgactttaattataagtttccttgctttaattttatatgtatgtatgcatctctaaacaaaatagtttaaattgtttttgaaattcacagaaatcattgcatgtatattgtgtcatgtttcttatctcgccatgtgagaatcatctgtgttgcctgaagctgtcattcattttgttttgtgtaaaaccataattcaccttttttcattttcttcatttttttctagatagattttaggctgtttcttcaaagtttgcagcaaattacctgtttttgctatagcagaataatgctattttgccattttaattctcgtaacaaaaaagcatcttatatcaatacaaggtgagcatccaaatccaaaaatctgaaatctgaaatgctccaaagtccaaaacgtaaaaaaaaatttaaaatttaaattaaattaaattgttttgtagagatgaggtcttgctatgttgcctaggctagtctcgaactcttggcttcacacaatcctcatgcttcagctgcgccaaatgttgggactacaggtgtgagccactgtgcccagccagaattttttgaatactgacatggtccaaggaaatgttcactggagcattttggatttcaaatttttcagatttagggtgttcagtaggataagt

SEQ ID NO: 117352 - DNA, 1108 bp, Homo sapiens
atcctgtaatgtggttgttactgatctatagttggcaaagcttataaatgtgtgaggtctctttccagaatttacaaataagtgatttatatttcgccatttgggacaaaaatgttaacatctctttgaacacagtcaaattgatacatctttagtctttgatcttttcatttcaaggaaggctcattttcttcattctaccactctactttttaaactttatatccatttttcttgcaaacattgtctacacttgttgactctgctgctttcctttcactcacttaacctcctgtaatctgatgtctacccacactactttactgaaactgctgttgccagcgccacactgtgtttgctgcacagtctaaggaatagtcctcagtctttcctatctcagtggcagttaatactgccacccactttctccttgaaacaggctccagtgacaccacatttaacggattttcctcttctaattctggtaacacccaaacctccttagtagacttctctttttctacctatgatttaaatgctgttcttactcagaggactctgttgagcacactttgcttgtcatgataccgttttgcctagagatcattcattgctttagtcataatctgatgattgcaaaacttctccttggcttcagatttatatatcaaactgtctattggacatcttaacttgactattgtagtagtctgcaagtgatataaacccacttcatcataacttcaggctaaagagggagatatgttgccttacaaaaccaaacgtctggtgcacaggtgaaactgatcttagggatgcctagaatcagagattgatgtcatcttgacttcccacttctcttttgccgctgcttgtcagcattattacctcaaaaccatcttccacatgaggtataggatattattgactaaggacatccttaaagtcaacagcttggcagtcagaaataaaaaataggtttaactctttgtccaactgcagatagaacattgcctgacaaggattctgatagactcagcttggtttgccacagtgggatgtagagtattttgactaacatgcgttctagtaatgatggtaggagtgg

SEQ ID NO: 117353 - DNA, 1033 bp, Homo sapiens
gtggctcacacctgtaatcccagcactttgggaggcctaggtgggctgatcacctgaggccaggaattggagactagcctggccaacatggtgaaaccccatctctactaaaaatacaaaaattagctgggcatggtggcgcatgcctgtaatcgcagctactcaggaggctgaggcacgagaattgcttgaacctgggaggcaggggttgcagtcagctgagaatgcgccactgcgctccagcctgggtgacagagcaagaccctgtctcaaaaaagtactgatactaaagataatctcttgggtagtaattttacagttaagacttcattgtttataaacttttcaaattaattaaaaagactactttgaaaaaggataaaccctgaaaatgtagaaataatttcaagtttttttttgttttatagggttattgtgaatttctatattttctctgtccactattctgtaatttttttttgtcctgtgattgcttttattttgaattacaaaaaagaagtgtgatggcaccttgtccaccctgtcgtgattattccagtgagatgttactgttctgctctgaagaagatactgtcagacgaatcctgcatttccttcagctggcatgcatgcctttggactcatggacagagttctttggattgtcactgaattttcaatgtttaatcagtatggatctgatcttcgcatgatcttttttgtgaatgctaacaccattttgcagttttttttttctattttaaacatttttcttttcactgccgaccccctgccttacgattttattggaaagcaaggacctgctattatttgttaatttgccatcatttatgtatattttggaaggtatgagacccacaagcacaatgatcatttttatttgtttgtttgtttgaaacttcagcagaatagatatctgcatgctttatgaagttgttgcttcggtaagagcccatgggatgccagaaattaacatttctttgctgccatgggctgatgatgctgctattag

SEQ ID NO: 117354 - DNA, 1042 bp, Homo sapiens
aggcagctttcccacttttataaagggggttgtaaatctcaagaggtcatttgttccccatagcagcatatctcatttttaaattgaagcgaattaaataggattttactactcaacattcattatactgttaatctttgctgaaatatatgctaacaaatgttaagcaagggaaactgaagacttagtcatgtggattgttagcagtgatctgcattctgtaaaagaggtactttcccatgatgtaggcatgaagtggtgccagtaagcgtagagcggaaatgttgactttagttaacattgggtttagcatttccagtgcagcattatcagtgggcctttaaaaatacttcgtaagtacattagctttcactttgttgttaaattatagcagactcattatagagaacaagtttgccttgattttgtttaaaatgacttctgctaagcacccagaagataaaattgacatatttttataatataagcatactttttttgtacattgtgttcattcttgaataaaatgagttctgtgttggcttgtagatactaaaaagaaagtattgattttgattcaataaatgttttctttcaatcctggttggcctttcctttaaattttgtttagtttttcttttctttcaaggaaggaattatttaccagaattcagttagagcaccttttttgcattcttatattttcagtcatgattcctatcatgcaaaaaacaacttaaaactttttgatttaaaagagaatttaaatttctatcattgtaatctttaacttcacagttcacctcttaatttaacaaatacctagtcagaatgaaaattaaatggatagaaataggactaataaaacatttatgcctggtgcagtgactcacaactgtaatcccagctcttttggagatggaggtgggtggatagtttgagaccagcctggacaacatggtgaaaccctttctgtaagtttttattgcctatcaaccacatgatttttaacagaggtatcagatatctacacagctttcca

SEQ ID NO: 117355 - DNA, 1046 bp, Homo sapiens
aatcagttgtaagtggtaaatggtagtagttcatctttcccatcaacatgattgtctctttattttaggaataatagcatttcaaaaattcctgtggtaaagaaacattaatctgaaacttaagccttagaaattaatcgcaggtatgatagaatgaggcttggtggttccatagctttcttggtcctttgaaatgggaaataacctgaaccaaaaatcctagtttgaaagttacacttcagtgatttggcctataaacagtggtcctatgattatacattttttccttcactgatttgcataattttgttttcatggccacagcaaaacaatgtgaaatatatttttgctatacccactttttttatcaaattcagatgtctactctcaccattttatattcatttccccagaaaaatgtgctgttttcataatgtctttatttagcaggtctttcaaaccaaatggaagccttacctgtctttgtccttaatagtgtaaatatcttgcacagagtgttgaggcctatggttttggacttgcaccttacagctgcctttgttttatctatctagctttaactgtgagtgttcagatcagctgatcacattgatcaggagccaaagccaaatgctttgtagtttgttatgtatgtatcccttaaaaaatcatgaggttttgatttttatattttaactaagggtacattcctgccttctcttagtttgtcatatgactagaacaagagaagtcttaagctgcatttactccaattccagatctccatttgtttttgttttataaatttataatcttaatgaagagactagtgccctctcttcctgccacaactctcaatctgccaagactgttgaagcagttaacgctcagtgcaaacttttgccaaatagtaagtttcaacaaaatatctttatagtgaaagattttgagaattagtaaatccagtacatgattccataaaagcttattaaagttaataattctaatttactccaaatgattactttcaatatgatctttgggga

SEQ ID NO: 117356 - DNA, 1769 bp, Homo sapiens
cccagccaatggtgtgggttgtttgtttgttgagacaaggtcttgctgtgtcactcaggctggagtgcagtggcatgatcgtggctcactgcagcctcaacttcctggtctcaggtaattctccctcctcagcctcccaagtaggtgggactacaggcacacaccaccacacccagctaattttttgtatttgagacagcattttaccatgttgcccaggctggtcttgaactcctggactcaagcaatctgccagcctcagtctcccacaaagttggggttatgggtgtgagccactgtaccccgcactgatggtgtattttttaaatgaaatgggcaagctgcctatttctgtgtgcctagtaccctgtggctcaaatggaatattcttatctttgatgaaacagtggctcaatctaatgggatacttttaacattaatggaattgtattttaccttaatgcatggaaacttgaaactgtgtttcaaatgccaaattatctgaaatgattctattgatatagttccttttattagcaaaagtcttgactgactttgtacctgtgccaatagtttgagaaatgattgttttattgaaaataaatgaaaatttatgcttttaaacaagagtaataaaatgattaaaaaccatgaaattccagtttattgtcaaccttcaatgtgatcagaaatcataggtattattataataaaatctgggcctcgatgcaatgtttgagaggatttctttgttgacattgattttctaaatagataactagattattaggatctcattaatatgctgatctgccagttaattatatattttttattttcagaaaatgaacaagtttcagcagtctagcctttggatgacctatttgaaaaccactgaaagtcgtggaggaatgggcaagaaccacctcatgattctgcaggccattgctaacgaacagctcattgctacaaccagtccagaggttttattccctctactccgagcaatgaaatagacctgagttatgcttcctttcatttaatttctgcagataaatagtttcctgagcaatggatgctatgcctggataccagtctccactttgcacgccggaactgccttgggaccacagttacagaaaaaatgtaaactcagagtgatccttgtgtatattgctatagatttttctttaacaagctattttaaagataatggcattattatttccaagccatagcttgggctgaaggacaaattgaaattgtctgccaataccaaggatattcttgtatatttgaaaaataacttattatttgaattgttgtggttttgtttgtatttgagagctcttgttagctgatattcatgtttgaggtcataaaattgtctctggtctgaccaaacagaagtcatctttacagaggtgatatgcttgatctacacagagatgtgacttgatctgtagcaccaatgcaatgtaggtctcagtttgagagaaataggaagccctttgcagttgaggtgttaggaacctgctggtcatggtgtggaaggccaaatgaagctgccacagggtttcttgtcagtcctttgggaaatgggagggagtagtttggggaggagggtgggaaccctaatttccacagaatgaaattttgatgttaaatgacatgtatacaaattcttccttaagtgaaagttatgctgcatcgaattgtaactgaaagtatagatccaacaaatagagactgggttctagagagttctg

SEQ ID NO: 117357 - DNA, 1036 bp, Homo sapiens
ggcttcctatttctctcaaactgagacctacattgcattggtgctacagatcaagtcacatctctgtgtagatcaagcatatcacctctgtaaagatgacttctgtttggtcagaccagagacaattttatgacctcaaacatgaatatcagctaacaagagctctcaaatacaaacaaaaccacaacaattcaaataataagttatttttcaaatatacaagaatatccttggtattggcagacaatttcaatttgtccttcagcccaagctatggcttggaaataataatgccattatctttaaaatagcttgttaaagaaaaatctatagcaatatacacaaggatcactctgagtttacattttttctgtaactgtggtcccaaggcagttccggcgtgcaaagtggagactggtatccaggcatagcatccattgctcaggaaactatttatctgcagaaattaaatgaaaggaagcataactcaggtctatttcattgctcggagtagagggaataaaacctctggactggttgtagcaatgagctgttcgttagcaatggcctgcagaatcatgaggtggttcttgcccattcctccacgactttcagtggttttcaaataggtcatccaaaggctagactgctgaaacttgttcattttctgaaaataaaaaatatataattaactggcagatcagcatattaatgagatcctaataatctagttatctatttagaaaatcaatgtcaacaaagaaatcctctcaaacattgcatcgaggcccagattttattataataatacctatgatttctgatcacattgaaggttgacaataaactggaatttcatggtttttaatcattttattactcttgtttaaaagcataaattttcatttattttcaataaaacaatcatttctcaaactattggcacaggtacaaagtcagtcaagacttttgctaataaaaggaactatatcaatagaatcatttcagataatttggcatttgaaacacagtttca

SEQ ID NO: 117358 - DNA, 2240 bp, Homo sapiens
ttacagaaataattctagttacctgatatttttgtcatatttttccttatgattttaccagcttggcttcctttcaacagtttttttgtttttgtttttgtttttatttttatcaccagcttgtgctgataaaggtaatctttctcctgcattctgtcttgcaataactgatgtgtatatgttttatatataagtagatttttttccatgcattaaaaaatatgttgctagatttcaatttttcagatattatcaagatgttagaatttttaaatagtgaaatattatgtaaacaaggctaattgtgattgaccatgtcagggtttttgcatctctccctccagttggcagtatcatatctgatcacagcagcaagatcagtggccagagctgccccggaataggtggggcttacttgcaaaagaaaatccttcagattaccaggagcacagccaaaagaacagacagtactgagaaggccactgaggagaatagagacaggacaagttgtgagaacacaaccagaaaaagaatgacatccccgtttagaagacttagggaaagaatgctttcaagggagagactagtcaacagccaaaaagaggacacagatcacaatcaagctacagaaagctgtgagaaagtgaaggatgttggaagcaacatcaaagatgagaaagggagtgccatcttcaattcaaatagccaaggcaacagtaacactttaaactgcttctatacgcgattcaagtctaaaaggaggaagacactctgatgaagttccttatttaattttagtgttaagtttgttttcagttattaatgtatacatggcttaaattaaaccatttgtcaaagcttaggcagacaacttagtaaaatactatttataaacacttgaaaatgcctcatttgtacataagttattttactgatgtattgagttagtaaattttatactcttgttttctgtagttgactttatttcctactgttagctggatctgtgagtgaaatatgtagaggaggcttttttatcttctactttttacgtatctttgattgggggagaagggactagtctaacatagcaatatcagaatcatctgggaaacttgttaaaaaatgcaattactgtgtcccaccccagacttcataaacttgaattgccagaaatgggatctggaatgtttattttaattggcttgccaggtggttcttagtattattatatttgagaaatactgatcaaatagacataagaatgaaattattttttaaacaatgaagcaagattattgtgtagagcaatgactttttcttttcaagaagaaggtttttatttatttttaatttacttattacatccactttcttggtcctcttaaaaattgactaatcagctcatggacattgacaaatagcagtgatcccaagttcagagatgtatgatagacgtcagaagactggcttgtcttggcttaccctgttcctgtccacgtaggccaaatataaatcacacattttctaggcctttttctctttgaaatagttaacgaaacgacttaataagattactgtgcaacaaattattccttaaatgacttgagttatatgtgaataactccaagatccataaacagagaaagacttggaactaaggatgttgtcatcctctttctgcatgaagatgaggccctgagaattccagtaacatacccaaagcctgtaattcttcctaatgacatttctaggtattggtccaaaggtcacatatctactaaaccctactttcctctgtgagcaagaagatattttttacttctttgagacccgtcccttgttgggattactagggcattttctttttcttttatttctaaacaaaaatttggtttcttccagttatcaaaatagattattatgtacattagccattctgttgcagatttgtttttgggtccttcacctcagtgcgtccctagaatacagaagaacatctctctagttgtctgctgtgcagtaagtcacagaacaacatagaacatgtagatgctgtttttttctataacacattattaaacatgtatccactcagctgtttaatattctgcaaggttggtgaagaaaaaggaaactaagtatgacactaagtttaaacctaaaacaatttaaaaaactgaaacaggctgggcatggtggctcatacctgtaatcccagcaatttggtaggctgaggc

SEQ ID NO: 117359 - DNA, 1460 bp, Homo sapiens
gtaaaagtttctgtaagagattctttttaggccaggcacagtggctcatgcttataataccagcattttgggaagctgaggcgggtggatcacttgagcccaggagttggagaccagccagggcaacatgatgagaccccaactctacaaacaatttaaaacttaggcatggtggtgtgcctgtagtcccagctacccgggagactgaggtgagaggatcgcttgagcctgggaggcagaggttgcagtgagctgtgatcatgccactgtacttcaacctgggcaacacagcaagaccctgtctcaaaaaaaagaaagaaactgtttttaaccaactataagatttaggaaaacaaaaattaggaaaacaaatatgcttttccttttttagtaacagagtattaccttttttaaaattaggatttaaaataacctgtactcttgtggattttttacttatacagaatctcatgaggtaaaaaactgaaattcttgttcatttacgtgttttcataattcagactggagcatttcttttcttggctagcctgggcagtgtgcagcagatgccatttcatgttagctgcacatgtagcattctaaatatggtgtgtatttcttatattgacccttcacactctgtgtgtaccctggaaagaaaggggatttagtcctggcatcttcttcacagatgtaaaagaattacatatttaaataatcacaccagaggatggtacatggtcagagggaagacaagcttattataataattctaacaggagagagaagcttccagagcttgcttcagcttccaggctctaagtttcatctcactctgcagagctctttcttatttttgccacctatgtggcaattatgtacagtgatgtcagacctgagtttgaaccgtgattctgtcctccactgtagctgtgttactacaagtaatttatttatacggtcaggtttcctctctgtaagatgggaaaaagaccatctaggccaaagcaggcggatcgcctgaggtcaggagttcaacactagcctggccaagatggtgaaacccatctctattaaaaatacaaaaaaattagccaggggtagtggcacatgcctgtagtcccagctactcaggaggccgaggcaggagaatcacttgaaccaaggaggcggaggttgcagtgagccaagatcatgctattgcaccccaactagtttggtggctatggaaacgaagaaagaattggatgcagaattgttgcctaacctgggtgacaagagcaaaactccatctcaaaaaaaaaagaggaaaagaaaaagaccatctattttaacagcctcttatgtggtttaaatgaaataatatttataaagcctcatgtgtggtaagtgtttagtgaattggaatgtctcttttctttctctgcggccacctcaggacaccatagctccattactca

SEQ ID NO: 117360 - DNA, 1021 bp, Homo sapiens
acaggaatgtaaagatatatagtattatgaagattttaatgatatgttttttcttacattttaagttggatttgctggtcaacatttcttacaagacatcttgtcagaaatttctgcacttaaaaatgaaattttatgtttttatgtcccttgtaatttcattctgtcacttaaatgagtggcccaaaaatcttgccagcaagatgttcagaaattctattcctttaaggtcttttcccttaaaaactttgaattcaaaatttatattatagtaagtaaatgtttttccttaagcttcttatttatataagcttcctgatgaattaggtatttaaaatataattggtctaaagcatatttttataaagtattttggagcttttttgaccttcagtatatactcatcttaccctcctgccttccatttaaagtcattttactgttaagctgtaattttttcctgataaaatgtttctgttcttttctgtctgcatagtttctctgactctcaactgttgtcttttttctgtgctttcctattcaaacacatgcttcaatgtttgtggctcttgcttacaggaagaagaggtggcggagtctggggtaagtgtagagatgaacgcaactggaatgaaggttgtgcgactcttaacatatattgcatccttttcattaatgcacgcacataaaatagcatgaattctattaaccctgtcagcctacattcctgacaaatgccttctgctaacaaggtgaaagtagtgatagaactagctatttttcctttatttttccactattgatgccctataagtcctttttagattttgatttagctaggtcagttagatgatgataatgatagtgaatatttgttgtgtgcttgctatgtgccatacattgttctaagcactctaaacgaattatcttacttaattctactactaccctataaaggagatacttttctttccatagtatggatgggaaaggttgagttgcctaaagttttagttcatta

SEQ ID NO: 117361 - DNA, 1063 bp, Homo sapiens
tgaaatatgtttatataacttgagagtattcgtcatgattactttgtttccagcttgtgttgagaccctgaacaattcatgtgtccaatctatacgtgctgtttaccgtatgttcctcagtcttgccttcagggccttggactttgacagacctcagggtctacctcgggggataaatggggtcatgctatgttatagacaagtgtgaaaaaacaatgctataaacaggttgccctttgtttgggatttttgttttgttttgtttttttgtggatttttttgagttgagatctcactctgttgcccaggctgaagtgtagtggcacagtcatggctcattgcagcctcaaactcctgagctcaggcaatcctcctgcctcggccttccaaagtgctgggattacaagtgggagccattgtgccccgagcccatgaaactggttttagaagccatgcacagtttatcatttgactttattcataaccatcactcctatatggaacacagttcctagtggctcattccctaagagcagggttgaaccatgtatgggtataccagttcttaaaagcaaaattggcactgtgataaagaaggtccttctttgtgcccctcaagattaccagcttgacttttgctacttttatgtagataatttaattttgaacttaaacatttattttcattctataggaaatgactccaaagtagatggtttagtaaactttgagaagttaagaatgatttccaaggaaatccgccaagttgttcgaatgacttctgctaacatggacccagctatgatgtttcgacagaggtaggacattgaaatatgtaaaagtgttagagtggtatcaagggtgatgtaataattaaaatatttatcatttattgatcatatttattctaccatgtgtgctgtacaaagtgctttatatgtgtccgtttcatgtaatcatttatcattaataaccataacaggtaggtgatattagccttcgttatacatattaagaaactgaatgaagctcagagcagtttttacataatttgcaaatattt

SEQ ID NO: 117362 - DNA, 1485 bp, Homo sapiens
ccgcctgtagttccagctacttgggaggctgaggcaggagaatggcaggagcccgggaggcggagcttacagtgagcctagatggcgccactgcactccagcctgggcgacagagcgagactctgtctcaaaaataaaaaacaattccatttgctcatctcctgattttcatgcagttgttgctgtgcttttaacacaagatattgttgcttaataaagtcagtatttaaccttgcctgtatatttacttttgttgttgttactactattttttattcattcttgcatttcagagcttccgtattgctgggcatagtttttcggccttatagaacactgtttagtattctccttaagtgcaggtttgctggtgatgaatatctcttaatttttgtttatctgaaaatgcctttacttcattttcagaggatttttggttggcagctatcttcttcaaacactttgaaatgacattccattgttctgtgccttccactgttaatgttgagaagttagcttacagttttatttgctgttgctttaactgtaatctgcctttgtttgatactggctgttaagattttgttttttcttaatttctttctagttttgcttaatatgactaagtgtggggttttgtttttgtttcttattccgattggtgtctgtaggacaccttgaaacctatggttttgtacttttcatcagtttgggaaaattctcagtaattttatcttttattctctctccaactatgtctcatttctggtaagttcattactgatgtcctaattccagttattatttttgtttgttttacagcttcctttttctttttttagtttaatgttcttttccagagttctcattgttttttcttgtctttgaacatattcaacatcgttatttcaaagtctgcctctaataattccataatctggatcccctttgggtcttaatctgttttctcctttttactctttcatttctgtcatgttatgttttctcctgatgtgcctggttattattgaaaagtgagattacagaaataatctcgctttttgaatgatgttccatatctccagagaggattaaagtttgcttctggcaggcagttaggggtgctagaattccaaaatcactttaatccgttttgatgtaatttaacaaaagacttttatcccagtctacattcagtttatccttggtctcaggatatagctcttcagagtttcaaccaagcattggaggtttacaaggacttaagttgcttttccttttacctcaaaagacagggtgtctgtactcggtttttcagctcattatccctttctgaaatcagatacacctaggggcaagcactgggaaatgcaaaacttgcttctctgcatttttttgtacttttgtccagcttttctgatctcaccagaagtgttgttctaattatgtagtcttactgcctcttctttcattatcactcagttt

SEQ ID NO: 117363 - DNA, 1050 bp, Homo sapiens
gatttcattcctcttgcttcacttggaaatttatttaaaaaggaagtgagtggagtaacttctgaatagagatttttaaccgtcttgattcaggaatttattttgccttaattagaattcatgctattcataaacaaatatttacatagtaccaatcctctgtcagataaaacagtaagataaaagctttacgagggcaaggccagtacctaaaatagtatctgacagatagtttcataaaataattaagttcatgacataacaacattatttttactctttaatagatgccagttggtagaataagagacagacttctcaaaaatcttttcatttaaaatgttaacttttcattttatctgtaaattaatatttttggctaaaagttattaacagtaaaatgatattttacaacgacaaaaaggaaaagtgctcttatttaatcatatttatgaatacatttatttaaaaaaatttttccatttaggtattacttaaaaaataacatggaaacagaaaccttatgttcagatgaagatgctcaagaactagttaaggaaagccagctatccatgctgcagctcagtaccattgaggtggccacccagctgtcaatgagggactttgatttgtttcgtaatattgaaccgactgagtacatcgatgacctttttaagttaaattccaaaacaggaaatactcatttgaagaggtttgaggacattgtaaaccaagagacattctgggttgcctcagaaattttaactgaagcaaatcagctcaaacgaatgaagattattaagcattttattaaaattgcacttcattgtcgagaatgtaagaacttcaattccatgtttgcaataataaggtaagttggtacaaataggtacaaatgtctgtatggttttgtcattacatgcagctgattttctacttaggtattcaatgcctatgaaaagaaatgttcaattaatatgcctttattgaagtgttgttagatttaatgtattttccattttggtggtattggctttttctatttttgtt

SEQ ID NO: 117364 - DNA, 1162 bp, Homo sapiens
cattaggggtttggataattgaaatatataaaatacatatcatggagtactatgtcttcattaaaaatagttttgtagaagaatataatggcattaaaatgttttataagatattaaatgaaaaaattctggcttccaaaccatatatatagtatgagcccaagttttgtttttgggtttttctatcaatgatttgttatctgaaaaaaaaaaaaggatatatttatcaataaatgcaacagtgacttctgttaatattgtgaaatagaaatgtatatttcagtgttcagagggatcactgtgtttcacgttgctttttgaagggtttaaaagtgatttttttaaaaaataacaaagcatatctttctatttatgtagatatccctgatcaagttataagagttttcaaagtggatcagcaaagttgctacattatcatcagtaaagacaccacagctaaagaagtagtttttcatgctgttcatgaatttggtttgaccggtgcatccgacacatattctctctgtgaagtttctgttactcctgagggtgtcataaaacagagaagacttccagatcagttctccaaattagctgatagaattcaactcaatggaaggtgaataagcttattagtggatgtgcttatttgtagatgtgcttttgaagatttcctgttaaaacagctattgtaagtagaaacattatcatgttttagtgctcctaaattcactccagaagacgcttgataaaatatcttgtcactcctgctaaaataaactcttagaaccactgatataatctagttcctgtttttttatagaggaagctgaatgatacaaatcttcatatatatctgaatgactgtatctactaatttataaatttgtttttaatatggccagtatgtactttggcaaaagaagccatggttttcacagttctttttctaagtagttttcctttaatgaatatgcaggaaaattttaaaaattttaaaatgtgttctgaaaattatttaataaactagattatttctgtagtacatttgttccttactctggtttttttttttttttttgagatggagtctccctctgtcgcccaggctggagtgcagtggcgcgatctcagctcactgcaacctccacctcccaggttc

SEQ ID NO: 117365 - DNA, 2198 bp, Homo sapiens
ccttttttatggacttaaaaagatagtggaaacccatttgttcagtatatttctcttggcaaattgaaatttccatttgtttgcaataatcttctagcacagggtagagaggtatattagtccgttttcatgctgctgataaagacatacccaagactggacaatttacaaaggaaagaggtttaatgcactcgcagttccacgtggctggggaagcctcacaatcatggcagaaagcaaggaggagcaagtcacatcttggatgacagcaggcaaagagagtttgtgcaggggaactcctctgtttaaaaccatcagatctcgtgagacttgttcactattgtgagaacagcatgagaaagactcacccccatgattcagttacctcccactggctccctcccatgacatgtgggaattgtgggagttacaattcaagatgagatttggttggggacacagccaaacctttcaagaagtatgtctgattttgatggatcttgaaacagtctgaccttaagtcttgtaggtttaaaaacctgatgatgtcagcagcccactaagtattggctcatcagaatgaaatctgaacaagatgcatttgatgactcagatttcttaatacattgaggaaagagagtttgatgcatccttcttacagaaggaaccagagtagatgaagtattctactttcaacttgagaggacccagaacattcaacatatgttggctaagactccttgtccctggaattatattcatgtatattcagttgaatctttcagtcctcagagcaagtctttttttttttttttttttggtcctcagtctcaagaggaccaaaaaatttattttatgaaaatatttcctgccatatctgtatctgttccatttctcccttttaaccagggattatacctcaggacattttgagataaatttgtaatttgttttgttttgttttgttttcctctaaaggctaacagtgtccataatgctaagaaggtgatgctggacaaacagtataattacttgagcccccaaaatcttccatcctgcccccactgcagtcatcacacacatacaaaaaagccacagtaatatatattccctaattctttttttcttttttgagactgggtcttactctgttgcccagagtggagtgcagtggcatgatctcagctcactgcagcttcaacctcccaggctcaagtgatgctcccacttccacctcccgagtagctggaactacaagaatgtgccaccacacccagctaatttttaaaaattttttgtagagatggggtcttgctatatatccaggctggtctcgaactcctgggctcaagtgatcttccagccttggcctcccaaagtcctgggattacaggtgtgagtcatacccagcctgtattcctaatttttttaaaaaggaaacttttgcaacagtaatttattgtcatagggaaaatttttagcatttgttcatgctataaagtcacttttcacttaaatttaattatattaaatattagcttatcatgttgaacattggtccagagttctataatgacaaaaagaaataagatagaacaagggggggtggaatattattatttacatgtgcttatcatataaacattgtctcaaattagaatttttctactaatagcagaaatcacaagggcaaagactaagatttcaccaggtgaacatttaaaatgttcttgtgttacaaataaataaaatatggaaactaacattttccacttcatagttggactaagtgttgttatctactacaatacagcaggaaaaaaacataagggataccaaaaaatatttttaaaaagacataatggttcattaaaccattatcagttactgagtcttaccagtaaccaaagaaatgaaaaaataatgatatttttttggagggaggaaaagaatagggcttatgaaatgggaaagcaaaacaaaacattaatatacaatttttgtaaggatgtgaccaaatttgttcccttacactctaggattataaaatattataacgtctctggagaacagtttggcagtatatttcaaaaaccttaaaagtatgcgtgccttctaattcagcaattctgtttttgagaattttcacggaggaagtagattgcctgcagaggcttacttacttttgacagggggta

SEQ ID NO: 117366 - DNA, 2083 bp, Homo sapiens
gttctttttagaacaaagatttaatgagtcattactttcctaagacatttgtagtgatttttatattagtgaaatgtcattcatgagacagaagacactccagttatttgatccgaagttaatgtgaagattgttaccaaagtataaagttaattaaactatttaccggaaagggtaaaggaagcactaagatatcacagaggtaagaaaactgcaaactggattcagttcttggcacgtaaaagaaatgtcactaccagggtgaagaagaagtgttgctgacctgaaccccctttctagcctcttgttctgtcattctctccccactattacttcaaccctccttcctgagtatggaatgaactttcagaatgccctttctttgcccatgtttgccacccatggccctctccttgcatgtccagtaagcttttttatttgtcagtgctgaactccagtgttacctcatctgggaaacccacctccctctgccacagagtcagtctctcctattgtttgctatgtggcaggatgggaatttatttctttgtctctgtgtgtgtgttttacagcagtgcttttcacactacgtagaacattcaaaaataaagtgtcttcacacttccaaagcacaaattaaatatatgctttcatgagacaagtattagggatcttatgatttgtagttttaataatttatatggctgtatgtttgccataggtatatgtaggatgtggggctgagggaataagggatagggttgtaggaggaggcaagagagaagtaagttggagatttagctggaggaacaaagagaagaggttgaaattattaagttttagaaactaagtccccatggagctgaaattcagacctataaagaaaaggtgtgttacttaacttgatttcaagttgattacataattctctccttgagaacatgtttaaaggactaaagataaagatgcctttttaaaatctgttcagagaacatctgatatgtctcagtctgcaacatgtgcttataccagtaatgtgaacacatatatgataggtatttaacttatatttttaaacccccaaatgtgtaattttgtgaaaggctttttatctagtgatggatattatttatatttggattgaaaaaaacatcaattcccagttaattccaaattcagcttcttatgtaatttatacaacacaaaaatttaaatgagccatgtacatcacatatgtatattataggacatgtgtaacagccaagtttgattaatgtttattggtcttgagcttacctatatttatccttcattttcaaagttattactagatcaaaatgaaagtgggggcaaagctacagaactgtaagtttgtttttgattgcttactttgattttgctttatttttgctgcatacagctgttggtttttattgtaagtatcttaaagactgtagtattctattgcccttgtttgtatgtattattttgttattttttaaaagtccaatgatacagaattgaatgaagtagtaagcacaacttttctttccacttagaaggtagccagtattaactggcatgtgtctttttagtcatttttttgaatatatatatgtttttaagtttggatggaatcagtatacatgctattctgtaacttctgaaatgttctttgggatttctgactcaatacaaaatgagtcctaaaaaaaattaggagtgtggctaagagaaatttgaaaaggaatttttttctatatctgcatgtagaacttacagcttacttcttttcacttaatagcccaaacccttaattgatttatttcatatagtaaacttaattttttcttcattgaaaattttttattattagtttttaattataaaggaacacagtcatagctttaaaaaaattaaactgccagaataagatagaatataaaagtttccactcctcagaatttagttattatttacttgtatatccttccagaaatttcattgcacataaaatgtgtctgctgttgctttcaccccaaatgagatgttttacttttcttccacttaactgtttcacttt

SEQ ID NO: 117367 - DNA, 1070 bp, Homo sapiens
attacaggcacgagccacccgacttctggctaattttagtatttttagtagagacggggtttcgccatgttggccaggctggtcttaaactcctgactcaggtgattcacccacctctgccacccaaagtgctgggattgcaggggtgagccaatgtgccccgccctattctcattttaatttttgtaaaagtaagtccattcttaagaattaaagtcctgttttcctttacaccacaacattcgcctatattacctgatttttcagtattcctgggggagatagtgttgctcacatttacagatgagaaaaccaaagtttataaagagaacgaaatttgcctgaagtcaagcagctagtagctcaggtctgtctgacatcaaagcttgcccttgaaacactaatctttgctttcttccatgtctctttgcttttctctgactcttcagctctgtcatatcctggccttctctttcatgtctgactattaacagtcctttagcagtttatttaacagtctaactctccatcttgcatagttttctaatctacgtaaaatcctatattttacatctagtgtaatttaaatgtatttcatattattcatttataatactatactttaatctttttcatgataataggtaagtattctgtgatacttctgttggtatgtatagcaagtactaggcagaatgctgcatttgataaaatatagacaagaattaatagtaacagagcattggttttaatgtaagtacaacccttagaagtagtttttggttattgatgttgatggaaatttttttcactgctatcttatgtttttataggactgttttgcttaaaagtaagctaaaatttgggggtatctaaaacctaagtgacagtgtttgtttctttgtttttattttttctctaggtggatttagaagttgcctatgtcacatttctaaaatattttaaaggaagaatattttgtttgcttaaataattagacttgagagattaaataagaaataatgtacccttagaatgaactttagagactgtaattttcataattctat

SEQ ID NO: 117368 - DNA, 1089 bp, Homo sapiens
tctcgaagtttttccaatcagatatcctcatcttcctgagttcttatttccagtcagggaaacacattttctcctcatttaatttggaactcagaggattaaaataccctgagttttttctaaaagttcattactcattctatccttgaggtgagtggcttataaaaatcattactttaaaataccaaaattttgaatgtcaagtgtactgtagcaaacactgtaagaaaaggcatggtctcacaaatggggatcgagtaaggagaatgttagaggggccagcccacactgaagaggtcagggatggttggggatgactggaagtcactgtgaaaaagggacaaaaccgaggatccagaaggcagaaaagaatgcatgaggagaattcctcagggggtaatgccctgagttccacttccagaagccttaatgggttttgtctggaatagatctttcttccattaactgcgtctcattttgaccagcgacacagttgtgacatgtatcatctaaagacagacaagactgtaattacaactctcttcaacttgttactatcacattctcaccagctgtactcaagttttaggcagctaaatcagtatctcatctccacattatcctttggtgagggtgtgggaattagttactgtacctgaattctgtctttggttacagcaagaggtgtaaaactgaggtcgccaggaacagtcagttgagtattttcaagcattataactttatattggtacccaaaaaagaggactatctggtaaaaatagttttgcttaaactcagaagggattattgggtctcttgctttgtgccaacaagaaaatgcttggttatgaatataaatatgaataaaatgctgcactgcagaagtttatattaacctgtctgtcccttccaaacatgtttccaaggagtaaaatgctaattatttcagccacataaatacagaaaaaatagtttatcttggaagtcaaaggtttctggagcctattttgttgggagagctgtcttacctatcagactggcctttttgcatttcggagaatgtatcttatatttcttgacagtcatctg

SEQ ID NO: 117369 - DNA, 1108 bp, Homo sapiens
actaaagaaagaagaagatatagctgctaaaggacgggtaaatacttgacagtgtttagttgaatgagactgagaaagttcaaataatggaaagtcactgtgtttatccttaaaatttgttgttggtataaaaattttctgaagagaagaaataaaatgacgcatttgttttatttccacagtgttcaaagagttactttttaggactgaacaagagaaatctggtgttcctcatattcccaaaattgctgaaaaaaaaagtaatcgccattctatccagcatgtgccaggagatattgaacagacatcacaggagaaaggaagtaagaaagttaaagcaaatactgtttcaggtggaagaaacaaaatcaggaagattttggataaaacacgatttagtatcttgcctccaaagctatttaggtaggtaatgccgatcttagctatgcaggaattttcatcttcactgtaaagtttttatttggggtggggggaggcttgggtaagttttgctttgttatataactaatgtatcataaagtcttcaaacagtactcaaataagaatacatttgaacttctccctatcactttcatgaagttactactttcagattatataatagcattattttgaattttgggaaagactgtccattttattttatgaaatccatttttaaatatttttggtccacttttagtctcctgatctctacaaattgtacaccttaaatcttgggacttattcaccagttttttttttttaatcatttttcctttgcagcaccatttattccttcttgaattctaaagttgaactttttaatcagacctatttctatttccaaaatgggatatcaccaaaacttagtaatacttgaagattttaaatgtaaattaaggtctgtaaaatactgatggaattagtccactaaagtgtcatgattggcgatgactctagtatatattacattagcagcttcctgaagcaattacaaaagttctaatcaagagcagtacaatacttagcacatagtaggcactcagtttatatttattgaataagttaagacagtgaataatcagtgaatgaaataaagcaagtt

SEQ ID NO: 117370 - DNA, 1036 bp, Homo sapiens
tttcattttatttattcactattaaacttttaaggttgtaggagtaactaatactgttctgtattaatttgtattttttaaatacttttaagattatggaagtaaatggacaaaactttgagaatattacatttatgaaagccgttgaaattttgaggaataatactcatcttgcacttactgtgaagaccaacatttttggtgagttttgttgtaaaaattgcctgaactctttcttcttaatttggtaatagaaaagtcattacagtggaagaaaagatagtaaaatataaacatgtttttgtctaagctcttcagctagtttcagaatctttagttttgaactattatgtattctagaattttcatttttcattatgtttttaattattttgatagtaagttttaaaataggtgtacagctaccttcagttatttatgaaattcctatggagcgtgtattatgtactctgctggagggatactgaatgaaatatagaatgtccggaataaaactaagaagtcataatcaggcattttttcccccagctagtgtgcaaattagtctacttctaatctttaagccagctttctgaagtaatatgaatgccagattagctgttttatggaaataaactgagtaaagcattgacttaagtacttagtgaattacagatttctaataagagcatactctacctttgtgtggaaaaatgattacagtgcctctgttgtgtttttatcatgtttatatttaaataaaaccagtgactaagctcatacttttaaccaaatctactgtgtgtttttttaaacttttaggaaagatttaatgtgatttgattgccttagacactttaggatttttcagaaattctgaaaagagtaacagtaaaaatcatacagcaattgaaataacaaagaaactttaagagtccttatgaagtagggaggaaaacaaatctctctaggttttttaggttacaatttgagaagtaagagttggctttaaaagctatgcctacggaagggaagt

SEQ ID NO: 117371 - DNA, 1004 bp, Homo sapiens
gtggattgagttgaatgaagtgggaaaaattggcaaatttggtccctttcattaccccttggttcctattgacttctcggcagcacatgtgctctatacaaaatggggagagtgaacaacactgggaacttgattaaaaggttatagaggtactccactatcatttgagtcatcctgtgttggctttgtaaatattcaagggacatcagaatgtgggaaaaaaagtcatgggatttttttttccagtaatcagttagccatcaggtattcattgcattctactttatactcaaagacatcaatgtaggatcagaacagatgtaagacttggtgtctgctttaaaaaaaaaaaactttagctttttgttatggacatgagatttgcacatattaacactatttgagataattgaaactggaattagaactggtagactattactgagtttaaggaagagctaaaataatacaagaaggaagtcttttctggacgagatgaaaacttgaatgtttctttgaacattggacaatatttaaaaaggtggttcaagttgttcaaggttttgaataaaggttttaaaagattctggttttatataacagccaggagataagcaaggtgggagtagagtgtgtattaggaaaagtttaagaaatgataagtaggtcgggcgcggtggctcatgcctgtaatcccagcactttgggaggccgagacaggcggatcacgaggtcaagagatcaagaccatcgtggctaacatggtgaaaccctgtctctaccaaaaatacaaaaaattagccgggcatggtggcgggcgcctgtagtcccagctactcgggaggctgaggcaggagaatggcatgaacccgggaggtggagcctgcagtgagtcgagatcgcgccactgtgctccagcctgggcgacagagcgaggctccgtctcaaaaaaataaataaataaataaataaataaataaataaatgataggtaattttttgtc

SEQ ID NO: 117372 - DNA, 1010 bp, Homo sapiens
tgttgccttgagacaataaatacatgccctggttgtaggagaagtggcagtaacagcccacaccagggctaagttagtgaagttcaaaggtcctgctatgatgaaatgccagtgaaaacagcttcagctgagtgagtgctgttggctatttatttctctgccttttctgtctctcaacctctgggtgctggtggattacaattaagtttgcattccaattctcccagcgctaaggatttaaaggcgaaactgtactttgacgatttgtctaatggagtagctacaaagcggagtaatcaacaatagttctttggttcttgggtcatttgtttattttctaatccttcctatccttggatttttaggcaacacctgagcgtctcataatgcatttaatagaagaacattccatcgtggatccaacttatatagaagattttctattaacttacaggacatttcttgaaagtcctttggatgttgggatcaaactattggaatggtttaagatcgacagcttaagagataaggttggttttataaggggcatgaaagtgattttaacccaaaattttattcatgaaacttttatagttgatagattacctgtttattatgataataagattcagtacacctaaaaaaattaatgaacctgaaccatcagtataaacattctctgcttacttttatgacagaatagcatgctaaaagtggacgagagccttaaaaggcaaaaactgaaataaagctctggtatagctataggttcaggaaacataatagttacatgagagtattttagaattttactgaaatacttgattgtttctggagatcaataaaacattttaaaacggatttaatattttagaaagaatattcatcaaatacatttttttaagagggcagattgcttttaagcttcaaaatgggaatatttttattttcttgagttacagacttcacaatcatttgaaaacaatttatcaaaccttaatatgtctctc

SEQ ID NO: 117373 - DNA, 1057 bp, Homo sapiens
gttgcccaggctggagtgcaatagcacaatctcagctcactgcaacctccgcctcccaggttcaagcgattctcctgcctcagcctcctgagtagctgagattacaggcatgcaccaccatgcctggctaatttttgtacttttagtagaggcgaggtttcaccatcttggccaggctggtcttgaactcctgaccctgtgatcctcccacctcggcctcccaaagtgctgggattacaggtttgagccaccatgcctgatctctaagatggtttttacacattttaatgatgaaggatgacttattgccatttaatatcagagtaggtagggtattattttagaatatactggtcagagttttccttttcaaacttaatattgtatgccactgagagcgggagtcagtttcatcaaagactgcaatatttagaaacaaaacagaaaatttaaggaccagtcataaaagcataagtaatcctagattaagatgcagagtgcttctggatctctgtggcactgaaatatgcattgacttctctgaacctcacttttcttatctggatatggaggtaattcaagactttattagggctaaatgaggtaaatcaaaagccttagcacaattgtagagtctgagtattaacccccatactgttttcccttctgtaagttctgccctctcctaatacttgccttctcacctccttttctctttaaagacttggatataaactgaacaattatagttgaaagaggggaaataaacacataactgtttctcttttcaagctagtcttggcgaaattattgccactattaattgcagatgaagcagtttacttaataatatgagggagttaaatcagagagataatttgaagtctgatgtcatacttcttcttcccttagagtcaggctattcctcagagatctttcttttcctaaacagatgagtgtaagctttgtgtgtagaaatgattaacatactggtggaatgccataggcttacacatatactttttcattttaattcatttttatctttttgtgagga

SEQ ID NO: 117374 - DNA, 1143 bp, Homo sapiens
cttttgtttagtaagaactagacaaaagactttttcactaacctattagatcaaaggccataactaaacccatggagtggctaggaatattagataaacgctccgctttcatctgaacctgtatggtccttgttctctctggaggttgtgaattctgttatcttccaatatgcccaggtttatatgtgagtctgaatatacatattaatcaaataattgattttaaaaatcaacggtcaaatagtaccttagtttctctactttagcaacataaatttataagttgattgtgaaattgggaattgaattctagatttcgttgtatttttaaggtatagtcctcgatggtctttataccagaatttctgttttcttatagaacaattgctggagtttatgcaccagctccctgcatttgcaaacatgaccatgtctgtaaggagagaactctgctcagtgatgatttttgaagtggtagagcaggctggagctattattcttgaagatgggcaagaggtaggtcaataaataaattacatacatttattatggatactaacttttaaaataacttaatttccataaatttgtcctgatttttgagtactgatttttgaaatttatacagatttcttaaataaatgccaagtttgagttagttacaatttctgaagaggtaagtttttgtttttgctttgccctaattttaaatttattcgcagtagactctgcacaaagtcagtgctccataaataatattcaatgaaccaaatgtttttacttctcagattacattaaatttaaatagatgaaatagatttaaaagattcttgaatatttttctatttgtataattatatcattattgtttaaaatgtttatcaagaatttttcttattccttatttctattatacatttaaaagaaaaagaatgaggaacatgtgttggtaccagtgcatcctagggaactgctgacagttgaagcgtttaggtgacaattctatgttcaaaaatgctcggatgacagcttgtggatgggtggaggaaggatgcaaagggattggaaggtattattgccatcaggaagtgcttcattatttttcctatcaaatgtactcatttgattaatgctgagatatca

SEQ ID NO: 117375 - DNA, 4293 bp, Homo sapiens
gaatgagaccagattgaaataatctgggtcaggggatgaaaaccttagattaagatgaagacagagtgatttaaaaacctgaatttttaatgcagattacacttaaaaattgataaaatagaaaagggatatactaggagtgagctctcctgcatattgagaaattaaattgtgtagaaaatactgctttaggttttttcccagtcgtttcttagattaaatcagtgtatataaataaggtttttggaaagtctttttagcatgtacacatatttaaatttaaaactacttgtctttaaaaaaggattataacctgcaaacaagtttgtggttctatgtattattcagaaatatactccgtttaaaccctgtaatttcatagccagtaaacaactcagagcgtactagtcagtcatgagatacagttgcccctatatgatcctgtcttagtccattcaggctgctgtaacaaaatactgtagactggggggtagcttataaacaccagaaatttatttctcactattcttgaggctggaaagtttaaagatcaaggcaccagcaagcagatttggtgtctggtaaaagacctctttctgattgttagaggtaccttctaactgtagcttcacagagtagaaggggagaatgagctccctcaggcttcttatatactaatcccattcgtgagagttctcatgacctaatcacttcccaaaggccccacttcataattccatcactcaaaataagaattttgaggaggtacaaacattcagacaatcgcagacccttaagaactagcttgtctaatttaaagatcacaatttgagtatttagtctagattgttaaatgactattacttaaagctgtgcagaaatccaaaggaagtataagacatggtcttaggaaacagatccagactcttctagttgtaggtgtcagagccttaacttgaattaacaaaagccaaaaggccagtgcctgtggtcctagctactagggaggctgaggctacagtgagctgtgatcataccactgcacaacttgggtgacagagtgaaaccctgtctttaaaaaaaaaaaaaagaagaaaaaaaatgtaaagccaaaaggttagtttattgaccaccagagaaagcagaggcaactctagcctcagggtacctggatgcttgcaggtacgtctgccccgtctgcctgtttctggtcttttggctccgtacggcttgcttatttttccttgcttgcttgctttgtgacactttctgtcacaaatgctctttgcagcacatgctgtgctctttctttctctgccctgcatgctctgtttctgttgctttgttgctctgagtctttgtttgactctcttgttcagtgtcctcctccccattccctttcctatttccctgcctattggtttcattttcttctgccacaggaaggcgtttccatgaggctataggctgcctactctcatattcttccaatttagcaaccagttaagaaaggatgctctgcttccagatctaattgtgtacagaaatctagagaaaagctctttctaacttagtttacatagctagggaacagggcactgtttcccactgtaatctctgggtttaagatggagaggaaaggtagtcctcaaaagaaggaagatcagctgggcatggtggctcaccctgtaatcccagcattttgggaggccaaggtgggtggatcacatgagcccaggagttcaagactagcctgggcagcatagcaacctcccccgagtctctacaaatatttaaaaaattagttgggtagggtggtgcatacctgtgttcccaggtattcagggcgttcaggagagaggatttcttgagtccaggaggacaaggttgcagtgagccgagatctgcagtgcacaccactacactccagtctgggtgacagtgggagaacctgtctcaaaaaaaagaaaaaaaaaaaaaaaagatgatctttttggcagtaaaaaagggtaaatgttcaaaacatgagatacttaatgaattaagattctgtagtcttcactaatattcatatttgagtgctttctacttattagggaattcttgtgtgttcactcattttttctataatgcctttaatacccatgctttttcattaacaagatgactcaagtgagtataatatttagaaatattttttaagaatctacttagtaccattttatcttctaaaagacattttcattattttctatgaatgactttttaatatatggtttttaaaaattttatagtttctttaaaatatgtaagactaatatgtttccaaattgtagttgtaagtataaggtcattttatagagttcaaaaatcacagctctttgcacacttttagatcctacagtaaagtattgggaaatgaagagtatttgttcagtcctttacgatgggtctattttagtgcattttagtactgttctttaccttactttaaacttctgttcttaatttatatgattacctaccctactaagcctaagtctctgtgatgaaagaacagtatcttcttcacaatacccagcatagactaataggtactcataaggtgattgttggtaaactttttctttcctgtacttcatgttttagtaaacttagtacttttaggaaatacaagtgttgggtggaaaacagatattaatacatttagtgatgtttgagtctcctgaccattttacatttactgattctgatttatcacctagttgtcacactgtggaaagatgagcctctaaatttggggcagaaagaaccttttataaataagtatcattttattgtattcttgatgcagcatccagcgttgcccaagtcttttatattttgtagggatgggtagttttgattaattcagactgtgacttataatattttttacatgaaatggtaagtgatcaagatttcttttcataggctacggagagtgaggtaggagatgtagatttgacacgtcttccagaaggacctgttgattctgaggatgacgaagaggaagatgaagagattgatcgaacagatccattgcaggggcgagatcttgttcgagaatgtcttgaaaaagaacctgcagacaaaactgatgatgacattggtaagaaatatatgtgttcacaataagaatttgtaacttaatttatatggttacctatttctgcataacaaattattctaaaacttaataaatgtgtgttgtgttaagccattatcttagagtttttgtgagtcaaatttaggagcaccttagctgagtggttctggcttggtatctcccatgaggttgttgtcagaattgacacagggctgcagccatccaggtcttccctgggctgagctgtagaatctgtgtccaagatagctattcaaatggcctttggtgcatgaccttcagttcctcatgtgggcctctgataggctgcttaattgtccttacaacatacttaaggggaacttaggcttccccctaagtaagtaatccaaaggagaataaggcaaatgccacagttttttattatctgtattcaagagtaatgcatcatcacttctgctaaattctgtttgttataccaggtaactctgatacagtatagaatgggtctgtacaaggacatgactatcaggaggcagggatcactgtgagccatctttgaggttggctgccacaatatataaaataaaagctttgattgcattaaactgatttttcccttcatgtctataagacatttaaagcacaagcatagtacaatgttcagtgtctgtgaatttgctttttgaaaaacttgcagattttttaaaaccttatatttttatttccctagcttaaatatatgtatgttttgtgtgtactcttatttttttttttgagacggtgtctcactctgtcgcccaggctggagtgcagtggcgcaatcttggctcactgcaagctccgcctcccgggttcacgccattctcctgcctcagcctcctgagtagctgggactacaggcgcccgccaccacgcctggctaattttttgtatttttagtagcaatggggtttcaacgtgttagccaggatggtctcgatctcctgaccttgtgatccgcccacctcggcctccctaagtgctgggattacaggtgtgagccaccacgcctgaccatgtgtactcttaaaacattataaatttttttatgtaatattttacagaactagttaccatactttagttgggaagttgaatgatactaa

SEQ ID NO: 117376 - DNA, 1946 bp, Homo sapiens
gtgttcctatctttaggtccatgtgtacccaattgttagcgcccacttataagtaagaacatgcgggatttggttttcctgacagcagttcttaacaggaaaactgtttacactgttttatatggccaaatgtgtggctacacttctatgcatttccttcttgagagttttcatgtcttctggtctaaaaataaaagcccttggccctcaaagaaacttcaaaatatagcatgtactatagtgtggagggaaaaaaaggcaaatcaatgattccagtgtgaatgtgtttctaatcagcatagattaaaattttaaagtatacattaaggtgtaagagtgttcttagatagaatattttctgcatcttcaaagagtattcaagagaataaggagtacttctttctagattcctttttctatttatttcagtcttttccatgagctggaaaactgtgaaatattgactcttgaacaaaagcatgttgtctttttgttaactcattcttaaacaactccagacacacatttatccaccacctaccttttcagtttctatataggcagtaagcgtgttcttaaaaatcccaagacttcagttaccacctctatggcaacatgatttcctaatgcacagctcggagtgccaatctcttcagaactctggtgccacgttttcaccagtatgttcttttgtcaactcaagtcaccacatgttctcttacacctttctttaatatttctgttaagaatatcatctgaggctgggttcggtggatcacttgaggtcaggagtttgagaccagcctggctaacatagcaaaaccccatctctactaaaaatacaaaaaaaagtagccacgtgcggtggcgcatgcaccagctactcaggaggctgaggcaagagaatcgcttgaacccaggaggcagaggtgcagtgagccaagatcgcaccactgcactccagcctgggtgacagagaaagactccgtcacagaaaaaaaaaaaaaaaaaaaaaaaaaaaaaaaaaaaaaaaaaaaaaaaaaaaaaaaaaaggatatcatctgagtcctagtcaaaatctgttatcatcttttgactatcatttttaaactcccacttgaaataaattgctctgatttttaattactcttgtatttaaaaagctttaattcttcactgttatctaaattacactcttaattttaaattccaagccttttacctctaactacaatgtagttttatattttactgttcccccacttacacattctagattctgccccatcacatatgtacgttattccctgaacatgtctgccttttcctagtcttgtgttttaatcatgctcttctacccgtagcttcatgaagatgacattttcatgttatctcccatgtctttccaacaagaagaaatgtctccttccttggaatccctcagcagtttttctctcggacatgtcactttttctctctgctttttttggtagttacttgtaaacttgacatttttcatcaccagagtaaatttatggagtgcagagttgatgtcttaaatttgtatcccatggtgagtcaggcacagtgttggcatttaggaagtactctagaaattctttttttgcactgaattatatttgaaagtagaaaccaatattggcttcaaggaaaatgcagatctctgctaactaaaactttattatccagggcaaaagagacttgattttgcctgcctgccgtgttgtagaggttatgaaatgggtcaacctggactgaaagattaacttcatagagttctaaccctgaccaggaagacctaagaactaaatggtccatgaaaaggttaaatgaaatactaaagatgggaatacagaaaagagaggcactgaaagtctaaggcttaacacttgccctaaatttgaaaatgtggtttttgtaagttt

SEQ ID NO: 117377 - DNA, 1009 bp, Homo sapiens
tatacttaaatatgttatacttgtagatacagaatgtaaatccgagttcaagaacaccagttagtaacagtgtttttctactagtggtgggtttgtgggtagtttttattatgtttcttaaacgaacatttttatttatttaacaaatattaaggaggacgtaaatagattgtatagttaaaagttgaaaaaaaaattggaaaatatttaaaggagagtaaaaggaataaacacagaattataatagattgataagatataccctccaaagtacaagatttctataattttaatccatgggtaagagaaatgtctaactaaattttgtgtgtgtgtgtgtgtgtgtgtgtgtgtgtgtgtgtgtgtgtacatgcgcgaatgtttccaatcagatcctcgggaataaacaaggagaagaattaaatatcagtactggacccttgatctttcctttcaccttaggctgcctttagattcccttttggagctatgaatataccccttagttacaggtgtacattgccaatgtatgtatcttagcctgggatagctgaagtgatttgtctagttatttgaattttagcatttgagagattttttaagtgaacacctagcctttaacaccataagaaaagccttgtgaaatgatagaagtatttttaatttggacagttgaggggaagatatcctaacagcaatttttttttagtgtttctgcttttattcttctagaaatttagaaacgtttcaagtgaaatccagctttttttgtggggcagaagactatatatagattaatttgggcatttttttctaacgtggagtcttcttatccagaaaaatggatgtctccccaatttttaaaaataatttcaacttttattttagatgcaggggggtacatgtgcagatttcttacatagtatattgcgtggtgctgagtgtttggggttcgaatgatcccatcacccagatagtgagcataatacccattcggtggtttttcagc

SEQ ID NO: 117378 - DNA, 1011 bp, Homo sapiens
gtgtcaaatttgtaagcatgattaaagacgtgatctgtcttttgagaatgattaagtatggttcagcagagtatgaatctagtgttctctttcatttatccaggtgaatccatattaatatctaatgcttgttttggttaaaaaattagttcttggaataactgaacttaaacttataaaaaggctgatttttgttataattgactgtatatgtcttctgtagttagaagtcatgaagaaaattagagctgcttttctaccataaagcctctgttgtagtctagcgtgaattaaatagcaaattagtgagaatattgatggacttttccattttctaaaacccaagaggaacaatttcaaacctactgagcttttcagtgatcattgtaatattggggagaaggttctaggaagacccataaactgagagaatcctcacatgatcctgctgagattgaacccaagttaggttcaagccagggtaataagtatttcaggatccagatagtggaacttctatgatgtcttctttaatgcaagttgtaaggagcagttccctgggtgtggagcccagtggttgattttgtcagagatcatgagtatagaacataaaacagtttaaataaaataacaagaggatgcatgatattgagggttggtttgttaaggaattcaaatatattacctatttcagaactgtcaaatagaaatttaatgtgagccacgtatttaattttaaattttctagtagccacattaaaaaatataaaaggaaacaggtaaaattcattttagtaatatattttatttagtgcagtataaccaaatactataattacaacatgtatttaatgttttaacattatgcatgagttaccttacattacttttgcatattaagtcatcaaaaaacagagtttaatttaaagttacagcacatctcaatttggactagccatgttttaagtgcctaataaccacatacggctagtggctaccatatactaagaa

SEQ ID NO: 117379 - DNA, 1082 bp, Homo sapiens
cttcttggccttttagccttttctttaggaatcagaaaatattcttaggagaaaaagtaacgtcagaggccagatactgtgtgtgtgtgtatgtatgtatgtacttcaggttttctgtttgtcttagtactaggattcgtctgaattatctaacataccattatcagcaggggaagttcgtgatgtactttatgtgtaatttttataattacattaactcctcttgagataacataattcagactcagtcattccctcagaatacatttaatatacactatgtgtgtgtttctttaatgtttttcattagtaaagcaatgaggaaccctattttaaaaattaaattgattttgatagccctgaatagcaagttgcagagaaatcatttggaaaataaattagcatacttcttatgcaaaacttttactactctggaatgcagtggtttgtttattgtcttaatttctgtagcttgtattttgtgagatgtctcttttacggcatgaaatatattgtacagcctgcatacctggtaagaatgcgaccatattaaagatgaggtggtggagtcatttactttttgtgtttcttgtatacctgtgcctagtacagacattcattaaatcatgttgattactaagaaatctctcaggggccaactagaagctaattcaatattaagtgtaaagatgctcacagaatttttggaatatttaatgtaatcaacttgttactggtcttaagtcttgctgccagtagctgaacttgattccaagatattgctgttttattcttgtatcagtcaccattttttattaggagggagggagggagagtgagtgtgtgtgtgagagagagagagagtgtgtgtgtgtgtgtgtgtgtgtgtgtgtgtgtgtgtgtgtgtgtgtgtgtagggtaacattcctacccttaaatggacaggtctgatatttttatttgggaggatagaagggccaagtttttcctctgaaatatcattagtaatggcttttgaaaactgttcagtgagcttaccattgtaggattgtctaatagtttcagagagtaccatatggttc

SEQ ID NO: 117380 - DNA, 2409 bp, Homo sapiens
gacaaacctgttacggcatatatcatctaactgccatttgctcaactttttttttttttaaacctctggaggttaagaatataaagaagaaactttaatcttcaggatacaatgtttgcttttgatgcagaagaatcactgcagtgcttgttctacagaatgaaataagttgaagaaaagacaaagctatattacagagaggaaaggtttcacggaatccaggaacacagatttggtgcatgttgcctgatttgctttgactgataccgtattaactgttgtgctaccactctgcatgtctgtgccaggtgcctgaggccgcatgtatatgtctgtatattctgagccagaattgtaaacatcttcatttactgtgatttgcttgttaaagtgaacgttttaatttagaacaatactgaaagctcctgatttcagttttaaaaggggtttggagaggctgcctttatataaacactgcagtggtgtatgatttgtaaaaagaaacttaacagaattttatcaccgtactcatcactgtagctctggtttgaaaaggaaactaccctttccagcctaggaaatggcttttcttgttcgctgttatgccaattgtcttcagccatgggcctccaaagtaagtaattgttattttcttagcaattgatttaatccagttattaaattttattttgaactgtaaatgagctttattgcgctcttttctaaactttaaaaataagaactacaaagtagtctttctcattgccatttttttttaatttaaatatctaaaacattctaacgtgacctctaagagatttgaaaggtgcgttttaaatctgtagacttaaaatgcagtgcatttgagatgtactctcttcagactgaattattttttgattatggctattgctgtacttatcagtgatcatactctaacttgcttcattttcttaaatggttgatatatttaggtatgttagtctaattgccagattatatgacatttttcattaatatgatgctgtcataaattatgattgaattgtgctattttacaattgaattgtgctattttacaaagattagttgataattcttgagcagtgaaataatatgaagaaaatactcatgaaaatcaattatatgaaaatatttaaataatgattctaagtattttcaagatagtaaaccattagcagctggagactatttaaggtcatctatcatacttgtcatttttaaataaacataataactcacaaaaaagcaaagtgctatacaaccttccaggctaggttgtaggaaaatatatactctaattcagtgagttttattatacacagtggctatttatatagtctgtaatttgatgccactcaagttatctttcctgtctcatgtatgtattataaaacagtgttttttcaaaacatttaaattgtaacatttattaagattttttatggttctcttgcatacagacaggcacaatagaggcacttcttagtatggtctgaaatcatgtctttgtttcaaggttgtcctgttgatggtgactaaggaagaaatcctatgatagcatcgtggtgtttttctgttttatctggcctagctcactgcatgtctttcttaaaggcagcttctggaaagacatttaaattcactgtccatttggcaaacagctgattgaaatgtaaatagatgaaaagaagcctaggtacacaatgtatttgtgctattatctggctaaggcttaaatggcctttttagtgaaaatgacacctatatggcccaagcattgctgatgcttgatagctgcactatactacaaaggtttaaaccacttgtagaaaggaagtgagtgagaccgtgtaaaaaaaactttaaagaaaattaagaatgagatataggggttgttttttaaggtaaccagcaaaataaaatagcctttggaatgctgatagccaacttttgatcccagatttaacaaatatggaagagtcaaaatttcaaaatcagcttctaaggtttcatgaaatgccagcaaacattatatgagcaggattctggattggtactctactgtgtaaatcaagtatttgtaagagtacatgtctccatcccccttccctcatgttactgttgatgaaattttgactctggattgcaattaaacacataaaacttagaattttgttatacttcttttcattttccagtacattttactggttttatttttgttcatgtatttttgcctatgctactatgtacttgcattttactacttctgaattcattaattttcttgctaaaataaatagtcgtattagcatggttctactgggggttggggaagaatgaatcataaatgccttcctttatatttactcttaagataattgt

SEQ ID NO: 117381 - DNA, 1056 bp, Homo sapiens
tccttctttgtgtgttgatcagcatgatttataaaaagggggaaaggtgtgcattaaaattttgctttttgattcggctataatatattctgttggtactatacatgaatataattactgtctggtgttgaaattcttggtattcttgaatcttgctactgatatttatgtgtaaaatactcatcttttagaaattttatcttaagtgaaagtttgtcttcatgtacatacaaagtacctactatcatttttctgttttaaagaatgattaacattagattttaattaatgtacaatattaagtatcaagtggaattccaactcacgtatgattgatttaaattaaactgaaaaaaaaaaaaacacattggtgcttgaaaaccaacctgtataaatattgcatgttttatgtttagaaaactagtcatgcttgtttgcatttgtgagatttaattttatatttaaatgcgggtattgtgtattttggtattgtgtcttttggaattttggcagaaaaacattcttaaaagctttatgaaaatctaaataattacatattttgaaagcataacttgtctttgttcaaaattatacttagtttaacttaaattctagttttataagtagcagtgtaattcagattggcagcatagtgttgttcagaaagtgactcagacttttctcaaagatattgaagaacttattttttttgtgcttaacaacaagatgtttcttctgcagtcagtggagtcctttgttaaaagacctgtctcccaggtaacatctcctcttatgttgcacaccccattttccccaaaataaaagtgttaggtaaataaagcaaaataattatattgctttgatttgttcagtgattgtttttctcataattttgccgcctggaggtataactaactatattttactattgggaactgtctttctttggccactaggagcaaccattgcaagcttagttggagtatctaatgccttgtagcagaagcatgaagaacaaggatgggtactagtggtattgtgtttcagatggaagag

SEQ ID NO: 117382 - DNA, 1013 bp, Homo sapiens
atttaaaaatataataagtaaataaaatgcctgggttagtataaatccagtttttgttatcattagttttgtttgtttttcataatgcctagaatgtttatcctcttatggcttaccttcatctatggtaacctttctctgtccttcttttcagtgttgtcacatattaacataaaagatgtgtttacagttagtttagtaactatcagaaccttatctttggctttctaaacaatatgattttaagtatttcagtttgtatttttgtttataaataatatacacagttaacataaattttaataactacatggcatttacacttttataaaagtattttgtcatgatttgaatctttgcaaagtcaacatacattgctctattttatagtagtgcaaaagacctttctaaagctaaagatttcattaataagggttagcatcatggcatttcatatgcaggggaaacgtgttcataagtggctgtcctgtagtgattcctagacaataggtagatcaggacattctcctttgctgcacttaattcatttgaattgataagataatgagatgagatcgtgataaaattctaaaagtgatgcaagggaaaaataggttattcacctagtcatttattttagttatttgataaattactattctcttcaaaggatgtttatttcttcattcagtagttaaaaggtgaagtcattatttcctcagaatgctggtggatccccgtgttgagtatggaatttggcctgtttcttttcttagtattgttacacagggagatttagcatgataggttcactatacagttccctggaatcgaagatactatgagatgattggtagaaaaggaaaaggatgatgtcatcttcacttacaagccaaactaaaggaaaagagaattttgttcctttactgagttggtgtttactacagtaggtctaacatatggcactagtggattgcatttctcacactgggcagcagttttttaaagcagct

SEQ ID NO: 117383 - DNA, 1569 bp, Homo sapiens
actagactagaatgcagtggaatgatcacagctcattgcagctttgacctcccaactcaagggatcctctcacctcagcctcctgagtagctgggattataggcacatgcctccacacccagctaactttgtttttttttgtagagacggagtttcatcatgtttttcaggttggtcttgaactcgtgggctccagcaatagcctgcctcggcctcccaaactgttgggattacagatgtaatcaccaccacccccagcctctactgttatttttaatgggattttcccaaaatattttctgtctgcagtttcttcaatctgcaggtacagaacccatggacacagagggctgactgtatatatcttttgattaatttaaatattttaattaatttagatgatgctgaatgtttagttatgtatccttgtgtttgtgtttctcatgcagttaaattttttccaaaacattactttcaatattaatataatgctgtatgagtgtaacgaagtattctcacgtggcttccaatttttctcctattacaaacaacttttagggaaaaatctgtacatgactgattatttccttaggattgagttacagaaattactgggttaaaggtatgaaaattattttaagtttctacatgaatattggtaacttctcaataggcattttaaaattgtctttattattcactatgtataaaatgcttgagtactgagaggaccagagcagggcatgcccctctggttgtctggggcagttcttcctcccttaatggtgtgacactaattcagacagatttgcccagggaaccagaattaggaagactttttatcatacttgaaatattttatggagtaattgctaaagaaggagcttttgataattgtttaaagcaactcagatactaatgtataccagtggtctaagactgattatgacagtgttccagttggaaggggaataacaactactcagacatagcaaacaaattaatgctgacctaacgttattaccttttagtttgatttggtatgtgtttattaagtgtgctatcttgtgtatgtggcttttacagtgctagaaaatgtagtatttaaaagtagagaagggacgtaatggtcatctttatgaacaagggatataaaggaacccaggaattcacagatagttttaaatgagagttcattttttatcatttatatatgttactctctttttgaagaaaattaatacgctgtttgaaactttaggtttgcatatacttgagtaactatatacaaaatgtatccttttgtgcaggtatgaagatgcttgatacgcagtgtagacggaaagcagaagcatagtggtgccttttattgttctttcaatttcactgattctaattatagaagcttacatcaccttggttgatgatgacggtttctctctccttcttggtttttcttcctctattactccctaagggtggatcatatttcatagtgcatgtgtgtccagctggtggctgtgacagattttcaacaaaaatgggggtgatcagttagtggatatatat

SEQ ID NO: 117384 - DNA, 1019 bp, Homo sapiens
attgtggattttttttgggggggtgggcttctttcacacattataatgattttgagacctttccctgtcgtgtgcatcaattatattttttcccctctcttgtgggtattatttcattgtatgaatgtaccacaatttgtttctgtttgcctgtttatgaatatttggattgttccagttttgggcaattgcaaataaagctactgtaaacatttatgtacaaatctttgctgatacttatacttccatttctcttaggttaatacccaggagtgggtgactggtcatatggcaaatgtatgcttaactttataagaaactaccaaaattgttatttagtgtggctgttgcattttacataatttgtgttctttgaaaatgacagtttccacatcctcaccaacacttggtattgtcagattttattattattatttttaaaatttttaataggtagtggtatctcattttgattttatgtatccctgatgacttacggtgttgagcctcttttcatgtacttattagtcacttgtatattcatattcttttgtaaaatattcaaatatttttaaagtttgcaacaaatttaaatgtcttcatatagtttcagaaatttcagagctttgatctttgaggcagatgactttggtatttagatagcagaaaggtgatcaagagcaatatttagtgagcaggataagtaatcaagccaagtataaaaactccagtatttagatgagccatctatcttgaattcttgcttcactaactgaatgatgaggacagttcatctaaatcttcggtgcttcacctctaaaaatgacgatattgtaataccgggtttgcctgtcttagggggtggttgttgaaatttttagaatgtgtgtgtattcacagtctaatcactcaataatatctatagattcttcctttcacatgtttcagaatttgtgcttttcacttaatttgcccatgtcgtttctttagtgttcacttttttctttataggactgttg

SEQ ID NO: 117385 - DNA, 1682 bp, Homo sapiens
tgcataaagttttcttgttttactttttaacaattaactaaaaccataaccaggattgtttgctaagtaaaatatgtgtataatcaggcagtttgtaattagaggaactcaagttgtaattattgaatgtgtaggtgtagttaacagccttcatttctggtaagtgactttacttagaggatgtatgtttatgtgcacaagagagactgtttcctggacggaaactgtggtctccagatctttataataacatcacctctaatctttaactcatgagcgttgtgctatacagactgttttcttgaggcagtttcttgtaagaagtaaatgaagcttccttatgagtctgttaagactccatagattgtcaataatatggaaaaatttgatatttcatcaggaatatgaacatgtgtttcaggtagagaatgccaaagataatgaagatagtattctacaaagagaaattcctgccagacaatcccgaagaagatttcggaaaattaactataaaggagagcgccaaaccattactgatgatgtggaggttaacagctatctttctgtgagtatatttaggaacacttcatgaatcttccttaattttcatatctagtatctttaatttacatgtatctttggtaatatcaacatgctgggctctgtatgtgaaaatttggggcaggtaaatatataatctttttaaatgcttctgtttggttgaattggttaggaatgctcttaccagtgggagttctggttttgcttttttgttgttgtttaaatagtgaaaaaagttattaggctgggtgcagtgggtcatgcctgtaatatcagcactttgggagacctaggcgggcggatcacaaggtcaggagttcaagaccagcctggccaatatggtgaaacccccatctctactaaaaatacaaaaattagccaggtgtggtagtgcatgcctgtagtcacagttatttgggagactgaggcaggagaattgcttgaacccaggaggcagaggttgtagtgagccagtatcacaccactgcattccagcctggtcgacaagagcaaaactctgttgccaaaaaaaaaaaaaaaaagtaagctgtgtcttcaaaagtctttaattgtgaatagcttctttttagactgaaaagtagctgaatcaagaaataagggtaatctaaaaaaatcaggtgtatttttgaggggagaggtttcatagttaccagtttccaaagtactcacgatttctagaatattaaaacaattagtacagagcatttcctcttgtttgcatttgttaaaaataataataaaaaggatggttgaatatagtgaaattcccaaggatgtgtttagttttttcagttgtcataaacagatatttattcattccatgttaggtgttaggagtaagaaagattatttcgagagttgtttgtactggaataagtgttagaattaaggcagctctaatgtttgtcacatttgcctaattgcattgattcaatacaagaatatgaaatagtcctaaaatttatcatatccagagccacaacaaggtttatttcctgttctcactatttaacaatttctgtttttgtattgtaaatttcccatcactaattaaggtgacatattttgctttactgtgtaagtaatatgtgtcttttttt

SEQ ID NO: 117386 - DNA, 1355 bp, Homo sapiens
tgttagtccctgagaactgaatatgctggattgatattgcctatggttatattttaagattattagtatttttctgttgaacactcctgctgttctgaatggtcaagatctttgttatgaggacttttaatagcccttaatcaactgcaataattcactactagtttgtgatcaagacaatgaagtttatctttttaagtaaataatcagaatgtttgagattttagaaaaatcatggtatgcattaatgtaatcataaacttcacaggaaacatgattatggaagtttaatctttattctaaagaataatactgattagggaatttatcttttgtgtgaaagatttataataggctattgtaggttcatttttaggatttgtgagttactataacaaataaactacctggaataatgcttagcatatattaagcatcaagtaatttttggcttcttcagtcagaatacagaaaccataccgtaattggaacaagtgaagtttgatttttttattattatgattttttaaatttgagacagagtcgctgttgcccaggctggagggcagtggcatgatcttggctcactgcaacctgcgccttctgggttcaagcaattctgccttagccttccgaatagctgggattacaggtgtgtgccaccacacccagctaatttttgtatttttagtaaagacagggtttcaccatgttggctagactggtctcaggctcctgacctcaagtgatctgcccgccttgggcattacagtgctgtgattacagacatgagccactgtacctggcctgagcaggtaaagtttaattttaaaattaaactagttcaagggattagctactaagaaggataaagcagaataccctacagctgagggcgagttcccaaagacaaaacaaacttgaaagggagacagaccccttcctcacgactagagttgagacttggttgaagaatgttagttgcagcccaataaatagcagagacattcactgggttgctctgggacagagctggtccacagttgtctggtcaaggctggcaggaaggggaagggaactgctgaccaggagtggcacttaggagaccccccttaccaggatgcagatggcccctgaagctggggacaggaaacagaagccctccaattgcagaggaaagactttcttactgcagtgttactctagcaccctctgctgacaaaactgtaacattttcagctagcaaaggagaacatttacacaattctcatccttatcacaaagtatggcaataaagggtagatttgaagctgagagccagtatgtttggagaggcagtaaataactgtcacagt

SEQ ID NO: 117387 - DNA, 1005 bp, Homo sapiens
acaataaaaactgaatttgtttttcttattcagtttttcttagccatgggaccttaagtcagaactaacctttaactgtggttttgtcttcaataaaataggggtaatgatagtatctttgttgaagtatttcaaggattaaatgaaaataagtacctaaagcaaaacacagtgttgaggttgtgctagttagtaaagacaaaactcctgttatctttttgtagtttgtgttgatatttattatgccaaatgcttcagctgggtatggtatgttgtattatagtgttgtattatacaagtgaaaggagcaggaatcttgatttggcctaagctcctgtggagaaaacccataaactttctgaaccttgtttttttcttctgaaaaatgggctggctatctgtcctggttatcatatatcattatgattatatttataaaaacactttcgagtgctataaaacacttaactatataatattttaattaaacatgtgttcccaccacgaacagcttatccagtgacttttcctgggttttcatcaagtttctggttattgaccagattgataaaatataattattagagatttattatttattatatattttctgtataacataattcagctgttagtgtatgccaaataattatatcaggaagaaagaaaactgaaaaattagcattttgtaatactcaaaatattttttattgcaaactgatttatatattcagcaatttttttgtatgtacatgcctctgccagtaactgttcttcacactgaggattcagtagtgaatcagacaaatgtatattttttgtaatgaaaacattatttggtgtgaactgacagattttgacagattttgtaatgtacataaagagtattaaggttgatgccactgaatattacctatattattgcattatgtatatatataaaatacacatatatttctaaactctctgtagtttagtgacaacatactggtagatttggtcatt

SEQ ID NO: 117388 - DNA, 1050 bp, Homo sapiens
gtggcactagtctttattctgtgcccctctggaagaaatagtcttttatttactgtcttgttctggggaatggggcagaggtttccacttggctttttccattgtgacggcttttaccacacaggtcatggacccattatttagggtattctaactgccaagtatataaattctaattataaactgagggagtggggaatgaccattattaggtggatctgcagactcagtggacccactgtgagccacacttttgccatgactctctttattacctacattcagcaggttctggctgagtggttggtgcttttaccccgtagagcctcaattgggatcattcttttagttccattcaattggtagctctaagctgctctaggaaggcataacttacatatctagtaccttggtgttattccatgtggcctttctgcctccctaaggctagctggagcttcctcacaacattagtggtctcagggtgcttgaatcttttatacaacctcacttctatcgtattcttttggtcagaacaagtcacagagccaacccacatctgtggggagggcacatagattccaggttttgatgggtaactggcaagactgcattgcaaaagagcatatgggataagaaatacctctgtggccatctttggaaatacagtttaccatatcagtgcttcatctgctatctgctaaaatttggtagacctttcttttaacctattcaaatctttatttttatatacttaaatatctttttcactgttactttagtaaggatttagcagaaataaatgtggttgttcaattcactgtggttaattgacagttgttatctttggaattagagattattgccttttttttttttttttttcccttgagatggagtctcaatcgcctagactggagtgcagtggtgcgatctcggctcactgcaacttcttcccaggctcaagccatccctcacacctcagcttcctaagtagctgggactacagatgtgtaccacaagcctggctaatttttttaaattattttt

SEQ ID NO: 117389 - DNA, 1036 bp, Homo sapiens
ctcccaaagtgctgggattataggtgtgagccactgtacccagccgacttccctcttgaaagctacatagagcagctttcaagtgcattcagcgtaaatgattagcacctccttgaatctagcatttaaattttttactgccgaagactgtctgtaagacttccagtctgactctgtcagggttctttctttttttatttgtgactttatgcctaatagataatatagtacctcaagcttatcttgcagataattgacacaaaagccccaagaaacccttttccaagctcagcattacagactccacaactccatgctgtcctgtgtaaacaaaatgccataacccccacatcatatgaaaaagaattaatcagctcaccactacaaccattctttattctgttttgtgaatgcttagcattcttgtgaccctcaaactaggtacacaaagaaagggactaggatttactaggcatcttaatgcttgttgtctttcgctattaataggtcagacaatccagagtgacatagatcccacttataaacagtggttctcaaactttagtgtgcagaagaatcacctgtaggacctattaaatcacagactgctggtccctacaacccagatattctgattgactagatctggggtgaggcctgataatttacatttctacaaagttcctaaatgatgctgattgtgctggttcaggatctcacagggttattacttacatgcaacagaacccaattttggccaatcgaaagaaataatttactgaaaggattctgggtagctacagaattacttggaatactggaaaaccagacttggggctaggcttgggatactagaaaaacaggcttgggtctgtgacccttatcacagatttggtagatactactgctactagcagtgaatagtgagtgccacagtttgcactgtggaccacctgtactgtccattgcgtatgttgtagacccttgatatggtttggctctgtgtccccacccaaatctcacgttgaattgtaat

SEQ ID NO: 117390 - DNA, 2552 bp, Homo sapiens
ctggaattacaggtgtgagccaagttgcccggctgcttttaattttcaacattacttgtgctactaaattcacattttaatggaaaaatcctactgctctttaacagcagaattatttattttgaaattgcctattttattttttttgagacaaagtctccctctatagcccaggctggagtgcagtggcacgatctctgctcactgcaacctccgcctcctgggtcccggttcaagtagttctgcctcaccctcccgagtagctgagattacaggcacacgccactatgcccagctaatttttgtatttttagtagagacgggatttcaccatgttggccaggcttgtcttgaactcctgacatcatgatccgctcgcctcggcctcccaaagtgctgggattataggtgtgagccccgcgcctggctgaaattgcctatttttgagccttaggaaattttctaaactgttcataaagttatgttggccactgtgtgctgtgttaagtactttattgtgcttaattggaacagaagcattgttcaagggaatgctaaacagctgcccacagtacacagaatgtagccctgacatctagcagcataagaggttaactgatgcattggtagtgcttttgaatgagtgtagaatttgtttggggtaaagaagtatgaagaaggaaatctgaatcctagtgatgatttgtttgtgataaataatttgacaaaattctcccaagttcatttctgttttcagaaggtccttttactggactcccaagggtctattatgaatatattagctctatagttgcttattgggagtctagcagctgaaggcactagtctgtgcactatgttgtatccataaacaaagcaggtctgccctagtaagacttacattctgatagcatgaagagtggggaaggcagataatgaatatactaaaaggtaagttacataatatgtagcttataattgctagaaaagaaaagagcagagtaagagggattgaaagcaaggggcaagggctgggttgcagtttaaataaggtggttcgtttaacttggttgagaagatgatttttgatcaaagacttgatgcatgtgatggcattaactataggggtatatggagaaagtgctttcccagcaaagggagcaatcgttgcaaaggccctatgttgagagcatgttttgatgcattccagaaatagcaagcagctttgtgtgactggagaagggtgaacaggtgtgagagtagtaagagatgaaggaggagtggagataatgatgcatagcatagggcacatcctatttgacttttcagtgagggggagcactgaaagattttgaagcagaggagtgatattgacctacttaacctttttttttttttttttttttgagacagagtcttgctctgtcacccaggctggagtgcagtggtgcagtctgggctcactgcaatctctgccacctgagatcaagcgattctcctgcctcagcctcctgagtagctgggactacaggtgtgtgccaacacgcccggctaattttttgtgtttttagtagagatggggtttcaccgtgttagccaggatggcctcaatctcttgtcctcgtgatctgcccgccttggcctcccaaagtgctgggattacaggcgtgagccaccacgcctggcctacctttttgtttttaaagagggtctcactatattgcccagtctggtcactaatttctgggctcaacagattctcctgcttcaacctcccaagtagctggaactacaggcatgtgccactacacctgactaccttactgggtagtctcctggctgctgtgttgagaatagactgtaggtgtttaagggcaaaagcaggaggttaacggctgttattgcataaaatcaggttagagatgatggtcactctgactaaagtgatagtgatagtaatggaagtggtgagaagtggttaagttttagaaatattttgtagggttagccaacaggatttgctaatagatcagatgtggaccttgaggaaaagagaagaatcaagcatgacttcaaggtttttggcctaaataactggagtgttggagttattgtcagagaggtttgagctgccatcagcgagatgggaaaagctgcaggaggagtaggttttaggggcaagatcagaaattcagttttgaacatgtcaagtttgaaatgtctgttagaaatgagtaagaggttgcatatacaaatttgtattactaagaagcctgagctggagataacaattttatagtcatcagtttatagatattgaaagtcatgagactgggtaaaattaccaagtagtgagtgtacgtagagaatagaagaggaccaaggacagtgagtaccatgggacatgagatcagtataaggtcggggagaagagtagaaatcagcaaaggagaatgagtggaagcaaacagtgcagtaggagaaaaaccgagagagtggtggtgccctagaagccaaattaataagctgtaaaatagaaggggataaaatta

SEQ ID NO: 117391 - DNA, 2045 bp, Homo sapiens
agccggacttggccacaccctgggcttccggatttgggcacaacagttctctccagtcagaacgcctccccacggttctgccccaaaatgctatttttgctcaggtcctcagcgcgtttccggtgtctccaacggatggagaagacggaaccacaacgccaaggcagaccccgtgactgatttaggtgaggtctcgcgaggtgtctttaaatctcacgacgacagcaggaaacgacttactcgcaccgccccaattttaacgtcacagtggagttactcccttgggcgtttcttagcgtgcgcgtgcgtgctgcgcatgcgcacttactctcccccgcccccgcgcagacttgtctccggccagtcgcgcgtgggtagaggccttaggcgggcgttgcgaagggttgtttgctagagttcggaccttgttacggcgcgaagttccctccttggggcgggggaaaggtaccgcacccgctacctagtgtgaatgaactgtggcgtgggctgctaagggcaggctgcggagtacccgggccgtggccatgaactcacccgtggaccctggcgctaggcaggcgttgaggaagaagccacccgagcggactcccgaggtgaggctggttgacctttatgtgcgtctcacagtccagtagacagcatcctcctgtctgtccgaaatccgcggcgactgccctcttgccagagtctcgcacctgctactgggaatctgttcgcttgagtctcttccctgacccaggcccttgtcgccagcagggtgccgaccgcccttcctgcctgtgatgcggtcttaacccgcgtacccgtccttgccgggggcttctgagtgtcgttaagaaagcaccattactaagtcgtattttctgagttgggtaatatgagtttcgcagttagatgcccattcgtttaagtagactatgaaaaacgagatggaaattgtaagggaagtatctcagccatgtaatttagaaatagtttttctttaaaggtctctgaaatattgtacagttgcctaaaaaaaagataaagttttcaaagttagtttaaaagtttacatccagtcaaatggtgaattctgtagtagatgatgcatgtttaaagaacaccactgtaggtactttttcagactgtcactgggaaattttacagtattttgtacttggatccaaaatttgctgtgtcgagttaacagttatggcatcagcttaaaagatttttcattcgaccttcatgaaggctagttttcaggcatataactaaaacctgttagctttgcttatcccggtagaatgctaaggttttggggaaggttttccttgatttggaggtttctataacaagtgggacatattttctaaacaaaacactaaacagtgtgagtggattattggattgttttgtttaaagttgcagtaaatgaaatgaaatgctttggttaattcttcactttggagtttttcagatatgtagtgttttgcatactgagtctcagtaacgttgggctgaccttttgggtcgtgacaattattcaggtcacaacggaagccatgataggtcaaattatgttattgaagatcctgatgtttgcataggaacaacacaaattctaccactttccagagttctctttttgagatatacatttataattcgatgagtgtttgtttccttatgatgattcttgaagtcaatgtgagctgatttatgaatttcagtaggcgaattatcttacagcctttatagcattggaaagtattatacaaggcttacgatgtgtattgcaggtttcaatttaatttaatttaatgttattttattttttatttgaaacagtctcactctgtcacccaggctggagtgcaatggcgcgatattggctcactacaacctttacctcccgggttcaagcgatttttctgcctcagcctccggagtagctgggattacaggcaggcgccaccacgcccggctaattttttgtatttttagtagagacggggttgcaccatattgcccagggtggt

SEQ ID NO: 117392 - DNA, 1078 bp, Homo sapiens
ccttataggattcctgagttactgttttgttcctccccactgcttcccattcctgagttttgtaattcctaatccttctataatttctattaccttcaccatagtcattctttccttacgcaaagcccaaggaatgagctgctgctactttaaagtgtggtcattatgatgaatgtgaaaagagttttggcttgttctaaataatttttacaagttatggtacagacagttgttacatatcaaaaaaaacctgtttattgaaacaggaaataaaaaagggatcttttacattatagaattaaaactaattttttcttgtatataaactaattggtttgattttaaatatttctggcttttattaatatgtcttaattttgagtttgaaaatgttaagtgcaataaaaacatactagtacagattttgttttgttccaattggcatactctggggatgatcacttaaaaaaacagattttacataatgcctacttctggtagatgtcttatgagattgttctgctttttctaagttacttagatgttggatatgtacatagctgtttcttgttctgtatacatttctcaaatgtacacttgtattataataacctcccagttctaggggatatttgtgcaataaatacacatgtcaacttgatggatggtgttggtctttctttcatatattaaggtatacgtaacatggactgatgtctgtccagacatcagatgacagaagttatggactgatataacttctgtcaaacttagaagtttgacacttctaaggatgtgacctttcctcattggtatttccatattggtaatttaatagaatctacttcatgaggtggttgtgagaatcaagtgaaataatgaatgttaaggatttagctcagtactggcatactccaagtgctaaataatttttggctgctacttttaccagataatctgtccagccttcctcttgtggccccccacctattgttttgcgaatttttagcgtatgttcttatgaataaaaacatagtaacagaaaatataagagtatcttcttacagcgagcaacaaa

SEQ ID NO: 117393 - DNA, 3773 bp, Homo sapiens
tgattttgacttgagttatacagagagaattgttctccagtatttggaaaatcagtaacaggatataaccttgtttttctggggagtgagctgtgtgtttaatgcctttatgtaaaaatatttaagacaagttttaaaaagtaacataaatgtaaccaaaattcacagtgcattttggcatacaatgaaaagtaagtcattgtcttcttcccccaacttccaacccctactcaaacactgttaacagattgttttgtagaatttttaaatgaatattatttaaaaatctaagttgagttatactcttgtgtccttgtacaacttgccttttactatatcttgaatgttcatataagcacagaataatctcattcttcctaatggctgtctagcattcccttatatgttggaatttagattatttttagttttttgctactataaaccagtgccagactgaatataagtctctgacatttgtaggataaattccttgaaatagaatttttggttaaagggcctgtattgatagatagtttgacagattatactgaatactctccagaaagtttcaaaatgaattcccacaaacagtaagaggcactcttctcagtactggctattaccagatttgatctttgctaggctactatctaaaaaatggtatctgattttattcacatttctctaaccatgagggagtctgattaatattttctatgttggttggccatttttcttttcctataaatttgtggtaggatgtattttgaagtagctcccattacttccaatacatcttattatagaaacatttgaatccaaaacaatctgggtacacattattattctttgtttttttttttttttgagacagggtcttgctctgttgccctgctgttggtacatagctgacttcagcctcaacctcccaggctcaagagatctttctgcctcagcttccagagtagctggtaccacgggcacacaccaccatgcccagctagtttttaaaatttttttgtggagacagggtctcattatcttgcttaggttggtcttcaactcctgggcttaagcgatcctcccaactaggcctcccaaagtgttgggattacaggcacgagtcacctcacccagctattattacactagattgcagttgttagtcattgtgccatgccccagttcatgttccatcagcatgtcattgagacacttttctacgtttatgatgttgttactcgtatctgtagttctgtgttttatttactgagaatttttcctttcggccagagtggcctagctccttaaccgttgaggtatagtgaccttacagttggtggtcattgcctgtagagttcatgtcctcagtacagaaaatcaaaactgacatttttttcccctttatttcaggattgaatccagtgatcttccacttctggctgctgtagcaagcactcactctccatatgttgcacaaatactcctttaatatacctaaaaattgttagaaattggtgggaaaataggtagaaaccaaggaagcagacacaacatgcatttatggagattctttttcccttttagacttccatctgaatgagtcagtcaccagggtattctgcatagcattgtatattctgtgtatgtcagatggctttttctttttgactggacttttgggtggtggtagatttttaaacaaatgaaattaaagcaacaataattttgaagcatttgaaaaagccaaagtgtacggtagaaatttctacaaaatgaatattatcaagagtttcatgtgatcactgcagtgttgtcacagctcataaatagcaacagtgtctcatgatttaatggctcagaaatagttattcattagtttttaatttttaatttctaaggtacagagatctataaaaccttgattatttgttagttttgcaattcaaaacagctaatgtctggttatttctcaaagtaagtattttaaacagcctgttaattataagaaactcagaataatgagtgtaaatgtgttatgttatccacccaagtgtacatatgtacctatttttttttaaaaagcagaaatagaaatacaagactggtaaacatgcctttaaaaatatatatattttcaactagtattgtctataatgctgaaatattacttattggtgatttttctgtttcacacactctaaaatataagtaaagccaaccttttttttaaggctgagattcccaaaatgagaatactactttataccatttgtttataagtatgaactgttcttataaatattaatatttacatattcactaatttaacataaatgaaaattaggattaaaaattgcaccaaagcatcggcaaaaacaatactatattctttaaaagtgctcaggtagccaaggcccttgcttttggtatcaaccctcatgaacccataggagctgaatatttgtttcactgcttaataatcctcaatttacactattcataactcttaaaattattctctttttttctaagagtccctcccttccaaaagtgtatttttttcaaagattttcacttctcaattgttgcctttgtacatactatagagtgttgcttgtaagaaaggctaatatggaaccaaactcttgtaagtaatgtaaatagaaaggtgggtggataaagttttcaatactttctactacctcagtttacttgagtactacattatagtttattctttgcttatctggtctaagagacttttaatgctagtagtaaagttggtttctgctttcattgactattttcatcataatttcatcattgattaaaaaaagaaaaccacttgtttattcagttattaaatatatttactatataacacatccattcttgctgtttaaattttcaatagttaatggaaagttgtctttgaccttgaatttacagcattgggtcacattttgccttgctgtgtatgtattcaagagacttccaactagacaaagaaaaaattgttgttttaatggaatgtaaacctgaaattggtgtgtctgcaatctgtttggcccatgaccttttacctagtcccagttattacctgagtctcccatggatgacttgctgccaaggagtgtttgtggatatattttctttggcttaattttcttattctgtgcattaacaaaattatccagttgtctgattttggaattctatgagtcaatctttttggcagaattcagaatattaaaaagttcatacatttgcgggccattgtacctttttttttttttttttttttttgacggagtttcactcttgttacccaggctggagtgcaatggtgcgatctcagctcactgcaacctccgcctcccagttcaagtgattctcctgcctcagcccccaagtagctgggattacaagtgtgcgccaccacacccagctaattttttatttttagtagagatgagatttcaccatgtgttggtcaggctggtcttgaactcctgaactcaagtgatccacctgcctcgacctcccaaagtactgggattacaggcgtgagccactgtgcccagccttgtacttttttttttttttattgtagctctgtatagcacttggataatgtctgggtgtctccttaaccatcaaactgttctttatttaaaatgtttaattaccgtttagaaattctagtcctcaataagtgggtggctcatgctattgttgttcctaaagctaagctttgctgggaagga

SEQ ID NO: 117394 - DNA, 1019 bp, Homo sapiens
ccagctactcaggagactgaggcaggagaattgcttgaacccgggaggcggaagttgcagtgagctgtggtcgcgctttgcactccagcctggttaacagagcaagactccatctcaaaaacaaaaaacaaacaaaaaatggttaaaagggcaaattgtatgtgtatttttgcacagttaaaaaaaaaaaaagacgctgtagaagctaatctttgatatgagccagaaaaagtttcacttctctttttagctaaaactacatactttaaaaatgtgctccaaattttagttcatattgaaataaacaaacagaattgtcaaaaacattatgttttggagtttgccatgactgagagttgcaaactgttttctgacctggttcttggttcctccctaactgcagtgtgtaatgcatcttgaagaccggttgcaggagctatacttcaaaagtaaaatgctgtctgaatacctgagggggcagatgcgtgttcatgtcaaggagctgggagtggttctggggtatgttaatggtttcttttttggctttgctttcattgccctgtcatcaggcaaggaattttcctcagaattgccctttttccttttacgtgtcttctcctattagaagctggaggctgttatcatttaggttgccctgtaccatgtaatagcaggttccctgtcatccactaatctgaaaggcattatcccttgtgccattacatacagtaggttgagaatataatcacagtgaattaaaatctgaatttttgtctcagaaacataagtacatactcatttattaaatatgttgcaaactcattattccaagtatctgccctgccttccacatgagctggttgaggtaacagaagtctgtagatggtaatacgttatccatatattactccttcccccccattaactatatattatatctgtctactctgcattattctctggcagaaaacagttatcaaaaatgcttactgaaggaggaatgggaagttggtaggggg

SEQ ID NO: 117395 - DNA, 1177 bp, Homo sapiens
gcggaggttgcagtgagctgagattgcaccactgcactccagcctggctacagagcaagactctgtctgaaaataaaataaaataaaatgtttgtctctttcagggtaaaaaaacattttctttcaattgcctggcacatagtagacacttaatacatttgtcaaattaatgaatgatcaaaagactgttgaaagttaagttctggactaaataatacaaagtccttgtaatgaatacaaagtctcaatctacgatgatatctataatatgtctcagggtatttgttaatgagttaattattcttcttggtcaaggagatattgaaatattgaagtttaatttttttttctgtttttgtttagtaaaccttcattgctgaattaccattatctttggaaacttcatttgctaaacataagatgaattattcttttatttccagcatccagttttggatgaaccaatagcagaagctgtctgtattatagctgacatggataaatggactgttcaagtggccagtagccagagacgagtgacagataataaattgggaaaggaagtattggtttccagtcttgtttccaatctgcttcattccacacttcagctttataagcataacttgtctccaaattttgtaagtatgtgtaacactgcttgcattactttaagcactgcttaaagctttcatcattgttttttctgaaaaaaagctgttagggactgaatgtttgtgtcattacccgaactcatatattgaagccctaattcccagtgtgacagtatttggagataggatctttgggaggtatctaaggtaagattagatcttgagggtggggtgctctgatggtattagtggcctaagaagatgaggaagagaaagattgttctgtctccaccatgtgaggacacagtgagaaaacagctgtctgccagcaggaagagagcccttaccagaacccaaccatgcttgcaccttggtcttggatttgtagcttccagaactgtgagaaaataaatatctggggttttttgtttgtttgagacagtgtcttaatcccatcacctgggttggagcacagtggtgcagtcttggctcactgcagcctcaacttcttgggctcaggtgatcctcctgccttagcctgctgagtaggaggaactacaggc

SEQ ID NO: 117396 - DNA, 1056 bp, Homo sapiens
acaaagtgatttatccctggcaagagatgaataaatatttgaatactgttttataaaaaacaaatataaatttggggctccatggaaaatcttcccaaggtatatttttggacttttcctttgccattctcttcttatttctcaatatcatttctcacaaatgtagccatttgcatctacttctatttctgattcttactcttaccgaattatccatgttcttctcccatttttttcaccagtagtcctatctatacacttcaatgtcatagtcctatgtccctttcactgcgaaactccctatcacacagatcccacgattgccctcctctacttcccagcacttggtttctgcttcatcagtaacacattttttttaaagctagatgtatttattttgatctccctcacaagtctatgagttctgttgtctttgtttctttagtttccaggaaagagctttattcagagtagttgttcattaactaggcaaaggaatatcatttgaggatgccaaacctgggcttatccaggagtaaacttttgtccttattgtggtaccttatcctaattgtagtaacattaaaagttagagaggaaaagccattggtctcagtatttcatattatagttttaatctcagtcttgttgctgctattccatttggccagtagtaaaaaaaaatccttacctttccaaatacagaaaaatattaaaggtagggtcactatctgtttctggcagacatgctctgtacttaattgtcatttttggtctttgtttgtaaaccgggggaaggtaaggacatagccatatgccttgtggctctttcatgactatgtatatatgagtcaaaatattatttttcactgtcttaacatttttaacaatgaaagtaaatgcttgtgataaaaattcaaacaataagggctgggtgcagtggctcacgcctgtaatcccagcactttgggaggccaaggtaggtggattgcgaggtcaggagttcgagaccagcctgacctacatggtgaaaccctgtctctactaaaagtacaa

SEQ ID NO: 117397 - DNA, 2001 bp, Homo sapiens
aaagaagtaggtttctgatcattaaaaatagcttacttagctgtgtcagtaaaggacatgtccaataactgattttttccattacaggagacttgtatggcgctattggctctcccgtacggttagcaaggactgtggtagttggcaaacgacaagacatggtccagaggctactttattttcttacttattttataagatgctctgaacttcaagaaacgcatcttttagaaaatggagaagatgaagccatcgttatgccaggcacagtaattactaccactttagagaaaggtgaaatagaagaatcagagtatgtccttgtcacaatgcatagaaacaaaagcagtttgctctttaaagagtcagaagaaattagaactcccaattgtaactgtaaatattgcagtcatccactccttgggcaaaatgtagagaacatttcacaacaagagagagaagatattcaaaacagctctaaggagctgctaggaatttcagatgagtgccagatgatttctccttctgactgccaagaagaaaatgctgttgatgttaaacagtacagagataaattaagaacttgctttgacgccaagttagagacagttgtttgcacaggatctgttccagtagacaaatgtgcattgtcagagtcaggcttagagtcaacagaggaaacatggcagagtgagaagttgctggattcagacagtcacacaggcaaagcaatgagatccacaggaatggttgtggaaaaaaaacctccagataagattgtgcctgcttcattttcttgtgaggctgcccagacaaaggttactttcctgattggggattctatgtcacctgattcagatactgagcttcgaagtcaggcagtggtggatcagattaccagacatcacaccaaaccattgaaggaagaaagaggggctattgatcagcatcaagaaactaaacaaacaaccaaggaccaatctggagagtctgatacacagaacatggtttctgaagagccctgtgaacttccctgttggaatcattcagacccagaaagcatgagcttattcgacgaatattttaatgatgattcaatcgaaaccaggactattgatgatgttccatttaaaacaagtacagatagtaaagaccattgctgtatgttagagttttcaaaaatattgtgtacaaaaaataacaagcagaacaatgaattttgtaaatgtatagaaacagttccccaagattcatgtaaaacctgctttcctcagcaggaccaaagagatacactctccattcttgtcccccatggggataaagagagttcagataaaaaaattgctgtaggaactgaatgggacattccaagaaatgaaagttcagacagtgcccttggggatagtgaaagtgaagatacaggtcatgatatgactagacaagttagcagttattatggaggagagcaagaagattgggcagaagaggatgagataccttttcctgggtaagtaggaagttttcacctataatgggccctatataaatatgtaccattctcttttttagctgttctctgaaggttagtataaaagagatcattgttctggatagctctcttgttttcatattctcttaactcataagaaggagtaaaggctaagctccagaaacaccctggaaaggttttatgaagacctcaaataaaagttaaaggatctggttgataagtataagatttcttactgcttagaaggtttcaagccatttaggagtgacttatgccccccaaaggacatatgctgagcctggcagttagggagcactaatccctgagatgttagaatagctgttagaaatagatttggccaagactaagaggaaaacagagaatgtatactttgggtcaagtatgcaaggagaatattcatgcttgagaaacattacatacctagctttggacttgtgaggcatttaattgttttgttttagatgattgtt

SEQ ID NO: 117398 - DNA, 1050 bp, Homo sapiens
acaaaatgatgcagataaactgttgttttgagtgggtagatggataagctgttacctcatttagaatattttctttttgtacatgtagttgattatttgcggtatatttaagtacagcataccccgtagaaatgtggagctggaatgggctttagaaattatcatcgtatcctttcattttacaggtatgggaaacaaatgcttaaagtagggaaataatttactctagggcacacagtcactggtggggagagccaacaccagaaccaacatattttgagaacatttcccatggtactgtgttgttgacaaggaaagaaggacttggtccattgtctttcctcaaaagctttaataatctagatgtaaggaccaagctggcaatataaacttaaaattattttaagagtatgtaactcttggaactatacatttcataatgtgtcttcctctttttagaacaacaatttgtaatctttacacgatgccacgaattggagaacctgtctggcttacaatgatgtcggggactccagaaaagaaccacctttgctatcgtttcatgaaggagttcacctttctaatggaaaatgcttccaaaaatcagtatgaatttatttattataactagatatctagattgtaatcaaactcaattacagatgtggaagaatcatccattatctttggaattattttatattattaatcaaaattaataatcagaattctaaaaaataattaaatgatagggtatggaagagtattacagaaccttatgaatgaaaagcagtgaaaatgtctgtaattatgtaattaaaattcctgacatattgtagaattatctgaggctgcccatttttttgtgagttgtatccatttatagttttatttcatagaaaagaggtagaaaacatttaaggatggccaggcgtgatggctcatacctgtaaccccagcactttgggaggctgaggtgggtggatcacgaggtcaggagatcgagacatcctggctaacacggtgaaaccctgtctctactaaaaatac

SEQ ID NO: 117399 - DNA, 1207 bp, Homo sapiens
gggagcacactagtagtctcagctactagggaggccgaggtgggaggggtgcttgagctcagaaggtcgaggctgtagtgagttgtgattgtgcctctgcactgtagcaacagagtgagtccctatctcaaatagtaaaataaaaaacatcattgtcacatacacatttctcaagttattgtaaatggttcttacatatattttagtaggtctcctcaatttaagtaacagtttccctgttaggccatttctacttttgcacaattgttgctaccctatcgttaacatcttggcgaattttccagattattttttagaggagattcccagaagttgagctgataaaatcagtggctgtcaccagagttttttgcaacagtctgtggaagggaaaggatacaaagaggaatagtgagaggtacaactggcgaagttaatgagtacctgatgacaaaaaatgtagcgtgcttgccagggagttctgactttgtctttaaggctgtttgcaagttgtactttggggagattaacttggcagtgtgttttgtatatggctgctgaaacgagcacttggtagtgcgttttgaagagactggagtaagagacgagaggtgggtagacccgttagaatggtttagaaaggaaaggatgtatctcaataactcattagtgactaaggatgatctgcctttagagaagacatagatgttagttattcatattgagtatgtcaaaaaataaatagttcattagcaatacatttttattgaacaaatgagtaaaggccattttcatttaccttttcttaagttagacactgattacatttcttcaattggctgcactcacattttgtagtctagccaaagtcatcacacacagtaataagttgtgggtgaactgacatttttagttatttggagaagtatttcaaactttgtataaaacttgaaataggcattatagaactcattaaagattacttttcaagtgttttcatgttttaacgctttgataattctgtaacctaaagcagcagtccccagcctttttggcaaccagggaccctttgtagaagataattttttcacggatggggctggggaggtggggagttgccatggtttcagaggcattagattctcataagagtgtgcaacgtagatcccttgcatgcacggttcacaatagggtatgcgctcctatg

SEQ ID NO: 117400 - DNA, 1517 bp, Homo sapiens
ttgaggctcatgaagcaaaataaagtttaacttaacctatttgtaattttgttaaaaagaaatttgtcattatgcttagtcattattgacttatacttgttgttcttctgacttaacagcatctctcagcagcttgctgatcactccatttccttccccaaactcctcacttacccgaagttgtgccagcagctaccagcgacgttggcgacgcagccaaacaacaagtttggaaaatggggtatttcctagatggtaagttggaactttaaacacagaacaagattgagtagttccttaaacacaattttatatgggttttttagaacctggacttgtattctgtgtattttaagtttgaaactgaaaacttttaaaatttactacatttttaaaattgtggtaagttatacataacaagttacaattttaaccatttttaggtgtacagttcagtgacatttgtttaaataccttcatattgttgtgcaaccatcatcaccatccaactccagaactttttcctcttcccagctgaaactctgtatccattcaacgtaattcctcatttctcccttttcttcctcttgtaaccaccattctattttctgtctttatgaattttcattcataccttgtatgaatgaaatcatacactgcttgtccttttgtgtctgccttatttcatttagcataatgttttcaaggtttatcgatgttgtagcatgtgtcagaaattcattcctttttatgactgaataacattccgttgtatatacataccacattttgtttatccatttgtctattgatggacacttgggttgcttccacttcttaactattgtgaataatgccgctctgaacatgagtgtgcaagtatctgttcgagtccccattttcaatacttttggttatatatccagaagtggaattgctggatcatatggtaattttgtttttaaatttgtgaggaactgtcacgctgcacactgttttccatggttactgtaccattttacattcccaccagcaatgcacaatggttccaatttctccatatcttcaccagcacttattttctgtttttttgataatagccatcttaatgagtctgaagtggttcctcattgtggattttatttgcatttatctaataattagtgaagttgaacatcttttctattcttttcttttctttcccttttgagtcgcccaggctggagtgcagtggcataatcccggctcactgcagcctcaacctccctgggctcaggtgatccttccacctcagcctctcaaataactggaactacaggcttgccaccacacctggctaattttttttttttctttttttttagagatggggtttcgccatgttgcccaggttagtagaacttctgggctcgagtgatccacttgcctcagcctcccaaagtgctaggattacaggcatgaggcaccacatctgacttgatcatcttttcttgtgcttattggctatttgtatatct

SEQ ID NO: 117401 - DNA, 1113 bp, Homo sapiens
gtagaaaacttggaaaacacttttaaaaggcaaaaatatatattagccattttatcagccagaaatacctgcttttttgttttttaaagaaaatggggatcatactattcaaataaatatctcaatttattatagagaattttgaaacatacattgttataggcagaaacagtacagtgaactatgatatacccaccacttggtcccagcaagcactcatactgttcagtagcttgctttttttcatttaatagtatattataaatatgtcactgaatatgcttccaaaatatgacttttagtcactccttgcttctttagatattatgttttagattcttatactgtgtatcaaatcttcacagagctctcaaagcttgttcaactgagtaatagctcttggtgttgggttggtgccatgctattgaaaaaaataagggaatgcaatgagatgagcatgatttcgtttgctatttaaaaggagctgttcatccacctgaatagcaatatattttataactgacagtttcatctttatttatagttcacagcaacccaatggacatgcctggaagagagctcaatgaggacagagacagtggcatagcacggtctggtaatgtcacgttcttgtattcagttttttatgagattactgttggcattgattttcttttttatccctccctttattatcaaatttgttcatattgatattagccttacaagagaactgtgaaaagaccagagcaaagtcttataaatttaatatttttcatgtttacttttaagtgtgctaagtaggataaagccaggatgaagtaaagccagagtaaagtacactggttgaagcttagtgaatataagaagaaaagcattggtcagaaaaactgcttagaaactgtagtaaaaaaaaaacacgtttgcttatatttgcttgctgctaactaaagtttaaattgtcatattgtctcttgcccagaaaagcataggcattttgaatcaatgttatactttttttttttttccaaatatggacctgtccaaaatttgtaggtctagcaaacatttattgaaacatggtggacattaaaaaaattaaagcccagagtc

SEQ ID NO: 117402 - DNA, 1422 bp, Homo sapiens
acacttagaaattattgaggactgcagagaacttttgtttatgtggattacaactactgataaatactttattagaaattacaaccaaaaaattgaagaatatttagtaaatccttgaaaaattacactaataccccctttcatgttattacaggcctccaaaaaattagtaagaagagtggcattgttttatatttttacaaatctccttaatttgtggatgaggatacagctaaattctcatatctgcgtctgtattcagtcttttgtgatattttcgttgaagtgtatcaagaaaatcctgtctcacacagatatgtagttggaaaatggaggacttcgcagaccccctgaaagtctcggggacccaacgggtccttggatgacattttgagaactgctgaactgctgtaggattagatatatggagggtggtagaagagaattgattgtgtttaagtgttgacagaataaggaagttataaggagcatgaaattaaagactagaagtagtaattgatagaaggaggtttttgaagaagaatgggggattggggtcctagctgacttagagttaactttggaagggaggaaggaacttaggattttttaataagtcactagcacattgtaaggcttgaataacatgacagcttaggcaggaaggaggcaaggatggatgagagagtaagttttgaagcagggtgataggaaaaaaaagggttccaatctggttaattctactgtgtgtatgtgcatatatgcatgtgcatactctaggaaacaaaagttttatgctgagaagaagaggtagggaaggagtttgaagaagtagataatttttaaagtaacgagggaaagaaagctaggacgaattaaaaagctgaccattgagacatggaaggattgctgtacatgtgctgtaattatagaagttcttgctacagaaaaataatatctgttagcaatttgaaaactacagttggctggatacagtggctcatgcctgtaatttcaacactttaggaggccaaagcaggaggatcacttgaccccaggaatttgagatcaacttggcaatgtatcaagactttgtctctactaaaaagttctcaaaattagctgggcctggtggcatgcacctgtagtcctggctcatggggagggttgaggagggaagatcactggagctcaggagttcgagcttgcagtgagctatgattatgccattgcattccagcctacatgacagagcaaaactctgtttcaaaaaaggaaagaagaaacatgcaattgtcactttttaaaacagaaagccccgtattccatcctagttaaatgtccttcatggctatttagactattttcatgaagcataactaacaggtaacccagctgcttgctttcaggctataatgtcct

SEQ ID NO: 117403 - DNA, 1027 bp, Homo sapiens
gcctcccaaggtcctgggattacaggtgtgagccaccgtgccccagccaaaaggaattcattttaacaacacaaatccattattacttataaaggtaaattatactatagaggttagatatacttgtcttcacttttaatatagagtagaaaatccattttacatactactgactttaaataatgagcaacatttacttgcactcttttaattgtgaatcaaggattttttgtgtgtgtgtctaccatttcttattttctttcaatttccaatcaatcagtcaatcaatcaataagtatgtggtgagcacctgtaatataccaagcactctgcttggccctgaagatgcagtggtgaaccagacacagttcctgcctcaatggatttatagtgagtggaagtcagaaaagtaatacaacaattacagtatactatagtaaattcttagagttaaaagcagtgtgtgattaaaataaggagaagcactcaattcagtcctggagagtcaatgaaggcttccttgaggacatgaggcttaagcttgaaggattagtcagatggttaggggaagaaatgttctatgaagaagcagtggtacgtacacagacctaggggtaagagatcatagagtatggaaagaatgtgaataaatcagtatgtgtggagcacagagtaggggtaaagttaatgaaaaagaaagaatggagcaaaagctagatcacaaaacacactgtaggccacactgaggaatttagagttaatgcttggtgtagtgtagttgggcaccagtgcaggtgtgttggttcgggtcctttacctgttttttttaacggtttgccaaagacaggattaaacatgcaacaattgtattaggggaaatgactatgtaaaggaaaatgaggaaaatgctgggaaaggctgagagacccatcgaattgtgatgtaagtctgaccatgaatgaaggagagaggggtagaatgttgactggaagtgtctcagcccgctatacagttcaagggagggtta

SEQ ID NO: 117404 - DNA, 1093 bp, Homo sapiens
ttctcactcatagatgggagttgaacaatgagaacacatggacacaggaagggggacatcacacactggggcctgtcgtggggtggggtgaggggggagggatagcattaggagatatacctaatgtaaatgacaagttaatgggtgcagcacaccaacatgggacatgtatacatatgtaacaaacctgcacattgtgcacatgtaccctaaaacttaaaatataataataaaaaaaaatatatatatatttttttggctttgtgagccagacaatgggttgtagtttctcagctctgctgttgcagcatcaaagcattcatacacagtatataaatgaatgggcatggctgtgttccaataaaactttatttacaaaaagaggcagcagactagatctggcactccaggctatagtttaccaacctctgatttaaatgattatgttagttaatttgtaatgctaataggaagaaactgtttttgcacttaaaatttcatcaggatgtacaaagaattgtccttaaaccataaaatgaatttggaattaattttcttctcaccctccataggctacaagatagtcttgaattcatcaatcaggacaacaatacattaaaggctgataataacacagttattaatggactgcttggaaatataggtaaatggttcctttgattttataagtttaaaaaatactagcagggtaacaagtgttttttgaagttattccttaataatgcagatctgtcatgataacaaagaatttcaaatactgtaagtggaagaggcatttaaattgccagtatgtataacatttatttggaaaacatatttttcatatatttgaacacaatatttattttgtatctgataaagagtactgctgtagatatatctaatttgtcttcattgtttttcgttgttaaatttgatgcatctttgaaaggtgtcagtgataagaaaagcccttagtagttcttttggctatttcagctgaggaagactattacaccttcttccttctgtcttccataaccataaaagttattttaaaatgatgcttgtttttgtgacctgtaactcagat

SEQ ID NO: 117405 - DNA, 1597 bp, Homo sapiens
aacattttaaaaggaagaaaatcgagttgcagaacagcgtatacagtgtagaagtacaactcttaatgtagaataactatatcaagaatttttaataaaaatcaacatatgaaatagtcataagcttttaattaacacagtttgttaatatgtggttattgtttagggttctcggtgctcttctgatgccaatatgcttggagagatgatgtttggctcagtagcaatgagctacaaaggatccaccttaaaaattcatcagattcggtgagaggttttctgatttttttttaacgagtcccatttttagatattttcgtttttttagagagaattttatatgatcttcactcagattgagcttgtcatactccatttaacatgttctatggttttaatgctacttcatggctcttgcagctatgctgtgaaacctctgtgacttacacatttttatttataataaatccaaaaggtcattatattttagttttggtctctctctttctctttttcttcatagttcccctccacagctcatgctcagcaaagtgtttactgctcggactggcagcagtatttgtgggagtctcaatacgtaagtgcttatggatacagggggaaatgtatcactttagatgtgcaaagtatgaaaactaaccaactgcttttaggactgcagcacaagttcagattttctgtctttccttaagtttaaaagttcatggaagccagatttcactcttaattgagtttagttgagaaacatgagatgtggtttctgtttctgtgaattgctagaagcagtatctggaagtagaatgttgaatggatttccgtcttagggcaacatgctgatttttcagttttgcggtaccacgctgagttacctgagttaccacaatctgtagggttggtgctcttcaattttcagatcccctacgaaattaaccctaaagacaggactgacctaggtcagccatactgatattgcacatatacactatataatgatagccaccagggtattacaagctattaatgcaaagattagaatagtgaagctgaaacaaaggcaggcctggtgtcaggatcatgggccatgtgccagaacctagtaaattactggggctaaagttaggcagtggaagaccccagagagagattttgcaggtgccatatcagagcaagactcattggctagtcagagcccctgggggtaacccaaggtcaaaggcagcaaggaagctactccagactacagaaattctgtagagcccccattaattgttaatgccttaaaaagacctgtttggaagagttttattagctaagtttctaatacctgtaactctttggaaggaaagtgggaggtagtctttttttttttttttcgagatggagcctcactgtgtcaccacggtggagtgcagtggcgtgatctcagctcactgcaacctctgtcctgggttcaagcgattctcctgactcagcctccagagtaggtgggactacaggcgcaggccaccacgcccggctgacttttttttttttttgtatttttagtagagacagggtttcactatgttggccaggc

SEQ ID NO: 117406 - DNA, 1073 bp, Homo sapiens
gatagttctgtgacttcatcttctgatataaaagaccagtgtcttaagtaccaggtaagatcattgatgtcatttatttattcattcatttataattagttttgaacatcatccagtggactgtggagatataatagcaattagtccttatcttcctagagcttgcattgaagctggagagacagataaacaattatgtttatgaactttgataaatcttagaataggagaagtagaaagctataggcatagattgcatgagtattttctccttatatttcccaattcagatttattgggttatcagaataatttcttattttacatacttttttattattgaaaaatgaagataaatatactaatacagtttcagttgtatgaaattaaagtatgattggaagtatacataatacacagttttatttctcaaaagtaatgtgacttcttgtaaaatatggaattaaacgtattagtaagtataatacataggaacttctctctaaatgtattacattttatataagatcagtatttggtctcatgcttagcaagtgtcatctgatgtaaatttatctgtgtcatccaagtttgcattaatcacaagtattttatatttactcagtatcaaaatagaatcttgactttttaattactggtaatgagatgattgtgttttgatggaaattgatctttatacctaatcaatgggacaagctatgtgaaaagagtctgaaattactaaactccacttggatttactgcacagttccccctgccttcttctattccatctcccctttaggcatgataccttaacaaatccataatagtcctgtgctatacaacaccatcatgacttacaccattttgcacaactttgaaagttttgtgatttttaaaaaattagccatgtgggccgggcatggtggctcatgcctgtaatcccagcattttgggaggctgaggtgggcggatcacctgaggtcaggagttcgagaccagcctgaccaacatggagaaaccctatctctactaaaaatgtaaaattaggcatggtggcacatgcctgt

SEQ ID NO: 117407 - DNA, 1123 bp, Homo sapiens
cttgattgctctccacttttttttttttggcttgttttttgtcttgtaagtcctttgctattatttaaactgaaaaccatttcatttttcacatttccatattggagaaatagtaacaaaactacttaaaaatatgggttaaccttattatgtcatcttggtccatgacatgaaatcagtacatattttcattatgttaaatatacttatgtatatttattaagttaatgctttcaaaaatcacgagataactatattttatatatactgatagttaccagtattatttttaaataaagataattttgttttgcctttatttttactttaaagttttcagccatgaactggtgatatttaatataaagatatatatattatttaacaataagataattttgggctttattatatagatttatttctaataatgtatatggaatatttattaatgtaactctaatggatctttacttttccttacttttctttcaagttggcctttaccagagtttgatccaagccagattcgactgattgtatatcaagactgtgaaagacgagggagaaatgttttgtttgactccagtgttaagagaagaaatgaggacatatcagtatcggtgagcatcattattgatttggttgacttttaatgttgaacattttgataattccagtattatcaaactggataattggggctgagggagaaggaaatgactggatattggggctgagggagaaggaaatgtttggtgaatctaacattttgatttgaatagctgaggagtggtttgatgcttaggagtcatagaattggagacagtcaagcagacagttgaaatccaaggctaacttaacaaatgtgataagcatgacttctttgtatttagactgctgacaacagctcagcagaacttggctgaggctgatttttttttaattatctcgattattttttattactttttcagcaaacatttattgaagtttttttttttgtatttgatagtatcctattgaatttcaacatatgcctctcccttactcttaattttgattaatgctgttcattttgtgtttgttcagcttttctcttttatgttaaacagccctgtaa

SEQ ID NO: 117408 - DNA, 1154 bp, Homo sapiens
tatatggtgtatgactattttatttcccaacaactgctattctcttttttactctctactatccccacatcttaccacctttcccttacttgccttcacctgcttgacaaagaaaatggatctcttagatatggattccctccgcaccttaccttcatatctacaaatctttctgcacccatgtacatctttatctcctttctttccatcctagtgtgagagttattttctttgagctaatgctttcacttgtgctctatatcctgttctctacttcctcagaggccttgtatttctcctccacctcagattctgtcatcagcatatatgtaaacatgttcagatgtgtcattttttaaatagcagaatatctgtcactctcactctacttgaggtttcattttctttctctttttttcttaccagttgtctgttttctctgctcctattcactcttcagtcccctagaatctgacctctgtactctttattccttagaactgtccttgctatggtcaccaatgacttttgcttctctagtggatactttttagtgactcccgtggtagttctttttcttttctaaaatgttctttttcactggtttccgtgagacccctttccctattttcatcctttgtcggtctgttcctttacagtttcctttgcatggtatgaaagcacaatttagtagaaacagttcagtgtgatgcaagtcattgtggtttaaggaggagtctctggtttagcctggatgtctaggtaggtctttatcatttactagcacacagacatttactaaagattagacagaagaaaaccaaaattatattttctgtcaagaatttgggatgaagatgttttatgttgccggttacacatagtttcacatacgttgacagagttagggttaaggctctcttaaggaagtgaagaattgtgcctggtggacaacccacataatggcagaaaatattcacaaactgtacatttgacaaaagtctaatatacagaatctataaggaatttaaacaatttaacaagcaaaaaacaaccccaataaacagtgggcaaaatatatgaacagacagttctcaaaagaagacatccaaccagccaacaaacatgaaaaaatgctcatcatcactagtcat

SEQ ID NO: 117409 - DNA, 6426 bp, Homo sapiens
tcttcaatcaattgctatatggttattccttccccactgcctccactgaaactgttccagcaagagtaccaaagacaccaaattgctaaattccatgaacacttttactcttcataaattttggtctttctgcaacatttgcattgtgcgtgattcctttcttttcatcttcattaacctttttttttttttgacacagtctctctgtcgcccaggctggaatacagtggtacaatctcaatctcggctcactgcaacctttgcctcccaggttcaagcgattctccttcttcagcctcccaagtagctaggactacagacatgtgccactatgcccaactaatttttatatttttagtagagacgagggttcactatgttggccagggtggtctcgaactcctgacctcaggtgatccaccagcctcggcctcccaaagtgctgggattacagacatgagccaccgtgcctggcccatcttccttaacttttgtaacagtgctttaccatgagttttcttttcctctctagtagtctgtctttactgatcttccctggcttctctgcttttcttctctctgttcttaaaatattgatgtatcctaaaattctagtttattagttcttcacattcttttctattttcaattaatatgttctgcctgaagatttcactaccaattgtgtgtcagtaactcctgtgtctggaactctgttcccagccattctcctcagaccatttttctttttctttttcttcttcttcgttttttttttttttaagattgagtcttgctctgtcacctggtctggagtgcagtggcgtgatcttggctcactgtgacctctgcctcccaggttcaagtggttctcctgtcccagcctcccaagcagccagaattacaggcgcccaccatcatgcccggctaatttttgtatttttagtagagatggggttttgccatgttggccaggctgatctcaaactcctcatctcaggagatccacccaccttggcctcccaaagtgctgggattacaggcgtgagccactgtgcccggccaccagaccatttttcatcaatcggttgcacatcttttcttcagctgtctcgcagcccccttgaactcaatctggcaacacccttatcccaaacttactccccctcctgagatattctttatcttggttaatggtatctcctttcatgaaatctgaaagctgagagtcagccattctcatcctttattccccatatagtcttcaggtcctatctctgccttctaaataagatctagctctatccctttctattttcagtgctattccttagttcagggtatataacattcttttctccaggcttctctctatcttgtcagttcttcaagtttctgattttctaaaatgcacaagtgatcttgtcagctattgtttaaaacctttgtttactcattgcctggatgaagaagtctgtatgtgtgtgttgaactggttatgtctgttgatctgatgctccagcctgccttcatagctgtgcctgttgcttcattgcacacttctgagctagggtcactaagaattacagcagatgctgttttcttcttccagagaagagaatgcccttctcccctgcccatcacttgaagctgaaacttgaagtatcacttcctactcaataggccaaggccatacacaatgatttagataatggactgaaagactgcctggaatctaaacccagctttgacacatttactagctagctgtgttattttgggcaggttatttattatttattgtatgtcgtttatgatttttcttcagtaaactcttacctgacctgcttatgcacacctcttatctagattgtaagtttgcctcagtcatagcatgtatcacgttgataaaatcatttgtctgtcttttctgttagactgagcatttcatggtatggctatctttttcttttcatgctgaatgaacgcttttaagtcagtgaatgaatacataaagaatgtgacagagaaatattcccagtacctggcattatgctgtgagtgtggtaaatgtttaatatgtctgttttaggccggacatggtggctcatgcctgtaatcccaccactttgggagaccaaggcaggcacatcacgaggtcaagagatcaagaacatcctggccaacatggtgaaaccctgtgtctactaaaaatacaaaaattagttggacatggtggcatgtgcctgtagtcccagctactcaggaggctgaggcaggagaattgcttgaacccgggaggtggaggtttcagtgagctgagattgtgctaccgcactccagcctggtgacagagcgagactctgtctcaaaaaaaaaaaaaaatctgttttaatgagatgtccataatgtaatgtaacttgatgaatatagtattactttttttagtagtctttctcttttaaaaattgagctataatttgcatataataaaatgtataatttattttgaaaaatatatgcatctacttaaccacaatggcaataaagataaaggacattttgatcactctggaaagttccttagtatacatttctcctccatttccctcactccctatccctgatcactgctttgatttctatcattgtccattagttttacctcttctacacataaatagaattatcagtaggtgccccattgtgtctggattctttcatgcaacagtattttttgagttcatctttgttaccgtgggatcagtaattcattccttggtatttctgagtagtatttcaatgtaggaatatatcgtagtttgtttatccattctctgtggcatttgggtttaaataaaactgcagtgaacatttctgtgagagtatttgtgaacatttattttcatttttattggataaatttcctgtgagaggaattgctgaatcatagctgtcaagcaatattccaaaaatggttgtacacttttacactcctactaacaatgtatgggagttccaagggcttcatattattaccaaccactggtgttattagtcgtgtcagttttagccattttaatgcttgtggccattttttttgtttgtttgtatgtttttgttttgttttgaaacgatgtttcactcttgttgcccaggctggagtgcagtgatgcaatcgtggctcactgcaacctccacctcccgagttcaagcaattctcctgcctcagcctcccaagtagctgggattacaggcatgcaccaccacacctggctaattttatatttttttttagtagagttgggatttctcccatgtaggtcagactggtcttgaactcttgacctcaggtgacccacctgccttggcctcccaaagtgctgggattacaggcgtgagccaccgcgcccggccgtggccatgttttaatttgcatttctctgatgattaacactgttaattatcatttccacatactgattatccattcatatatctccttttgtgaaatgcccaagttgtacctgtacccttttaaaattggattgtttattgcttactgctttgtgggggttgttttggctgtttataagtttttatcagatatgtgcattgcaaatattgtcttccaatctctggactggtctttttttttttttttagatgttcaggtttaaaatttttataaagtccaacttaccaattttttattttatgcatagtaatttttgtatcttgtttaagaactctttgcctaacctaaggtggcataatcacctgtgtttctttatagaagctttataattttacctttttcataaagtcctattttaaattaacaaagaatacaaattcatggctgggcgcggtggctcacacctgtaatcccagcactttgggaggccgaggcaggcagatcatgaggtcaggagatgaagaccatcctggctaacaaggtgaaaccctgtctctactaaaaatacaaaaaattagccggacgtggtggctggcacctgtagtcccagctactcgggaggctgaggcaggagaatggcgcgaaccggagaggcggagcttgcagtgagccaagatcgcgccactgcactccagcctgtgcaacagagcgaaactcttgtctccaaaaaaaaagaatacaaactcacaaataagtttggtaataaagccttttttattattgctgagatatacttcacattccataaaatctactcttctaaagtgcgtgattcagtgttttaggttggtttggttgttgctgtttttgtttgtggtatatttacaaagttttttggtgaccatcaccactgtctaattccagaacatttcatctccccagaaagaaacctcgtacacattgcagtcattatggatttgcctattctggacaagtcatgtaaatggaatcatcatacgtagcctttttgtgtttggctttttttccttaacctaatgttttcaaggttcacccatgtagtatgcattctttttatggccaaatactccattgtattgacataccacattttgtttattcatgagttcatggacatgccttttaactttttaaagaaagcacatttgttttttcttcttctttttttttttttcagattgtggaatccattcactcctgaaatatttagtgcctatgatattacatttacttagggatatgtagttttactcatttaccaagcttgggactggggattcaaagatgaataagatcttccctcagggagctttttttttctagtggaagaaacaggcatgtgaacagataaattacaagacaatctgatgaagatactattagatttataatctaaggtaaagtgtaatcccaaaactcagtagctaactctgcttggaggaatgaataagaactttttagagtaggtgacatttggagctagatctttaagaataaataagagtttgccaggagagtgagaatatttcaggtagaagacatggcttgtacaaaggcatggaattgatatatcttggcacctttgagaagctcagtatgataattatgggtaacatgaaaagagtctggaaaggcagatctgggccagcccatgaagagctttacatctaagcaaaggaacttggattttattctttgggtgtctgggagaccaaaggagtttggctaaatgaaatggcatcactgcttatataaggtctgttagaagaccacatatccagtgaagcccaacttttcattttctccagaaaattttgtccatattaggcaccttttaaaaaatgaatgtattggccaggtgtggtagctcgtgctacctgtaatcccagcagattacttgaggccaggagtttgagaccagcctggccaacatggcaaaaccctatttctactaaaagtacaaaaactagctgggcgtggtggcacatacctgtaatctcagctaattgggaggctggggcacaagagtctctcaagctcaggaggcagaagttgcagtgagccgagatcatgctactgcaccccagcctgagagacagagagagactctgtctaaaaaaaaaaaaaaagaaagaagggaagaatatacctcccctcaacccaaaccattctctcactaccaccttctatcatagtctattgacttacctgaagttatcaagttaatttatttctttgcttagctactgttgtatctttcttccagagaggttcttttttatcttgccctaaccactgcttggcacatagtaggtacatatctgtatttaatgattaaatgagctattctacctctaatatcttaaactctaggatcctgccctgtgattatagcctcctattccttgtcctctctgcctcccactctccttctttgcgttttttcagcactttgaccgtactgcctccattttcttttgttattgttgtcccatcactacgttccctaactagcttagatcaattcagctgtattcttgtcagtcttatactccatttccatagccttccttttcttttgttccgtatacctatcaaaacccttaccttggcacagtctgatccaaattcaagcacatgaggtcctactggagaaaatcacctaactgtagtttgcagccagtacatcgtcctagttcatagtcttcaacgttatgtagatgtacagcattgcctggaaatcttatgttttctattcaacatacactcatgcaccagtgaatgatggggctctgttctgaggaatgcattgttaggcaattttgttgttatgcaaacatcacacagtgtacttacacacactagatggtatagtctactacacacctaggctgtatgataatagcctattgctcttggggtacaaacctgtacagcgtattgctgtgctgaacactgtagggagttgt

SEQ ID NO: 117410 - DNA, 1462 bp, Homo sapiens
gaccagcctggctaacatggtgaaaccccgtctctactaaaaatacaaaaattagccggacgtggtggcggacgcctacaatccaaggtactcaggaggctgaagcaggagaattgcttgaacccggggggcagaggttgcattgagccgagagtgcgccacttcactccagcctggacgaaagagcgaaactccttctcaaaaaaaaaaaaaaaaagtatatataatatgtatatatatatttatatttatattgataaattcaatatggaattattagatgatacatattttatttttaaatgaactgttttattatccttactgttacacttgtgtataaaagatgctttgggattttactttttttcagtaaatatatactgataaatgtttacatgttaatttaaaaagctcagaggaaagattattcaactttctgaaaacatagcatacacaataaataactgtttgccagggggcaaaaaaagctctgttgtcttctagtaccagttggtattacgtaggtttgtttgctgtctcatatcttatttatagaagtttggaactggaaactagatactaaacaaacagtaatgttccactgtagtttatgcattagaatccttctttgatcataagtatttttgcatatgcttccgtgaaactagcaacttcggagaaactggcaacttgcttggatcaaatccatttttatataccttaataccgaagcaatatgtagcacacctaaatgtactgatttgtttagataatatttgtaaaagctttgtaacattactaataagttataaattaatagaagataccatagcagttagagagcatgaggaaacatttatgggtatcatatgtctgactttagaagctttgcagactccttcctctcaagaaaagagcttctgttgggagaaatttcaaattccatgactgtgtttgttaaaatatttcagatatatactaaatattctggtgctctcagaatttgcaagtatttaaaaatcatactagtggataattttagttgtgtgtttattcttttattggtcttcagcagctgtctaaccttgctttcctccttgaacatggagaccaaacattgggatgacttcattttaactagaggttacctttattagttagcctgattactcttttataataacagagaacctttgtgaatgaatttttcaaaatcttacagaacgtatgggagggtgtgaaatgaaagataggtgtgtgactttcaaaagttgatctgaaagagctcttaaaaatctaagacttgttcagtgttacttttttagaggtaacataagatgttatatcggatatactgcctttacactatttggaaaataaagactattttggctttgttttaaaaatgcaaaggaggccagacgcagtggctcatgcatgtaatcttagcaatttggga

SEQ ID NO: 117411 - DNA, 1001 bp, Homo sapiens
ataaagaaaagaaatttataaggctcatagttctggaggctaaaaagtctgagagcatggtgctggcagctggtgatcccgtggaaaaaggcatcacgtgggcaagagaaaatgcgggtgagagcaagggggtgctgaactcacttttataacaaacccactctcgagataatgaccttaattcattcatgagggcagagccctcataacctaatcacctcttaatagtctcacctctcaaaattgttgcattgaggattcagtctctgacatgtgaacttcggggacacattcaaactatagcactctaatcccccaatttctcttttccagccttcattttagtttgtcctctagtggtagcctctaattaggaccatttgatgtttcttgagaataatctgtttcatgtgtttgcaaactgcttggaatactttggatgtgacgtattttacagctccaatagaacccatgtttttcctgtatttcttcattgtggcagatacttgcttgtgttttaattgcatttttatatatctatattaatacttcactagattgtaagttctataagggcacagcctttgtctaacttagtgctgtacttctggtatccagctcaaagaaggcattcaataaatatttgatgaatgaacaaatgaataaaaatagtcactgaactgaaaaagttctaattcatttaacaaagatgcttctgttttgtgttgcttgcctaaagttattcattcaatgagcaatttaagcagatttttctttgacatcattgtttatcaatttaaaggaaaattttatttattttgatttttttaaacattgcaagggtggcctcattttccagaataagtttccagaataagttttggaatcggttatgactcccataaataaggattttgtatgtattttgattaatttctagttactttagaatataaaacacaaactgcacatttgtaaaaaatagacattatttgtgaata

SEQ ID NO: 117412 - DNA, 1004 bp, Homo sapiens
gcagagtcatgtgctaaatgttgtgtttaactttaaaaaaaaattgtcagacttttccaaaatagttgtaccattttgtattctcagtagcaatgcatgaaggttacaggttcttcacaatctcttcaatattgatattgttatttttgttcttttttaattaaaaatttttattgtaaaaaaaatatgaaatttactttttttttttttttttttttttttagatggagtctcacttgttgctcaggctagagtgccatgatacaatcaaggctcattgcagccttgacctcctgggctctagtaatcctctcacctcagcctcctgagtaggctcctaagtatcctcccaccttggcctcccaaagtgctgtaattacaggcatgagccaccatgcctggccaaaatttactgtcttaatcgtttttttattcttttgattatagccattctagtggtatcttgtggttttaatttgcatttcccgaagatcatattcagcatctttttatataacccaggtttttgagtagactaacattttgttttcattctagtataccatgctttcattgctggaatccttttttgggtgttttgttttgttctagtcagcctaaattgttaaatcaggcttgggtgtagttagccattggcaactaactgtagctcagtccctaagaggcagttcctagagtaaccaatatacaaagctcagtaattgtaagccacagcaggactttagaataggagagacttccgataaagaagctttaggaacctttctgtattgtcttttatggttaccccattggaagagatggccaggaaatacccccttcccttgtcttcactctaaggtctcttaccatatcgatttctatgtgcttatctaagattcttgagctggagatgagtttgaaaaatattatggggagtgtattttttcagtcatttatagaattgagacagtaatttgttttctccatttcaagaatttggg

SEQ ID NO: 117413 - DNA, 1984 bp, Homo sapiens
ggcatcgtccccgcgccaccccggcgtaccctctgatggtcgctgacagcttcacaggggaagatcgagactgacccttctcccgctacacatccctagccaccttccagtcctgtcctctcggctcacgccccgcccctgccacgtgacgggacccgccagtgagcctatgggaggcagctccgccccacgcccccaccttgccccttgctccgcgcgccgccacgtgatgcggcccccctccagccaatgagtgccggccttgcctcgcgccccgccccgcgcgccgtggccgtttgaagtgactaatttctgtcatatgactgaggcgcccatgggggtggcggggcggctgtaggagcaggggcctagcaagcgcccagcggagcgacccctgcctggccgtggctagcatggcccctacgctgttccagaagctcttcagcaagaggaccgggctgggcgcgcccggccgcgacgcccgggacccagattgcgggttcaggtagggcgctgtggggcgggggtcgcggagccgatggccttgtgggctccgggctccaggggtgttggggccttcggtgttccgacccgagcggaagcgccgcgccgagagcagcatctggtcctcggtggggtggagccggctgcgggctagcgccgaagggttggagcgaggtcctaccttttattttaccccacccgcctcgccgttgccccttccccctcctcccgtcggtttgtttacgacctgcccccagccacgcgcgactctgctcctccggacctagcaccgcggcctgagactttgggtccacacgccttcctggcaccgagtagagttgggcgcgggctggattggacctcagccgccgtactccgggccgcgaagttctcccctcctccccgtgaccagttgtcctccgggcgctgcgttccagctccgttggcgttgtggagagagcggcacgtttggccaagcttctgagttgagagaaggctggaggagcgagtaggcaacgtgccgttctttcaggtttcttggacgctaaaattggaggtgtgcagtaaccggaccgagcgaccttaatgttatcgaaggagaaatgtgaaacttgagtttagggttactgccgaaggaagaccaaattgaatgaaatctggccttggaattggctgtagattcttcctcctcgaattgttactgaaaaggagtcttaaaaattgaaaatgttagtagagcattttgtagtgttacaggctttgttaatttttcattgtagtacctgttgctggcagagtaacttttcagaattgtaagatttgatataaacctgaattcaaggtaaaatttagtcgttaaactgcacctgaggagattatgtccaaacagcctttatacgtattgcagtgtggaaacttgcaaatataactaggctaaatgtcaaatgccacacgttttaaacttggtaggatagcaaagagcccagttgtacaacaatagtagaaacaaaaaaataaaataaaaataaaaaaagagaatctgtcaaattttggaacaggcgaagttgccacactggtttaagaaattttgctattcttaaaattattcactctctcttgctaatgcaggtctcatcaggaaaaattcagtaaatgcatatggaattgaagaggtttttctacgtatctgtcttttcccctgaaaaataaatgtgtcatgctcatctgtctctctttaaacatttctttagtgtttttcctttgaaaaatgaaagtgcaggttagataatactacattgagccatctagtaactcaagcgacaataggaaacaggttccgataggatatttaaaaggtggcatttgaatagacaactgctttctatttctggacaaagattgactttgggtacgtaggtttacaaggctctcaagtcactcatatgaaaaaacattttcacgtctggttttcaaaaatgta

SEQ ID NO: 117414 - DNA, 1028 bp, Homo sapiens
aaaagctaagagacctgagctgagagagtacttcaaaaaacaaatagaagagctttactcaatctccatgtgaagttcaaggaaagttcttctcagtgtaatgaactgtctagcaatattatagttattcttgaaagtaatgagtcaaaatgacacagctgaaaatgaataagcatctgattttatgactgagccttttcctgtcccaagaggtctttaacaatattttctctatcatcaatgagtatattttatttttattataaaaatgatattgtggtggactgctaaaaatatcacaaatggcaatgtaaaaatcaagacattttctcaagaactgtgtaccactaaaagtaatatattgtcaatgttcacagaactattaaacataaaggaaaaacataagtgatatattctacttaattatttgtgaatcagtaaccagatgcagcaaatatctaggcaatgtggactacctcattcagtaactgattgtcaaaatcacaattaaatcagacttcaaaaattaaagctaggtgtatagaatcatgctaaaagaaaacatgataactcatagtctacgtaacttcagagtctttaaacatgacaatccacattgtcatatgtgaaaattttctctctgatttttactttcattcatgaaaaatgaaaattcagaaattctttttttcctttttgttttgagacagggtctgctctgtcacctaggctggagtgcagtggcttaatcatggctcattgcagtctccatctcctgggctcgagtgatcctcctgtctcacctcccaagtagctgagactacagtacaggcacatgccaccacacctggctaatagaaattttttttttagagattttgctcaggctggtctcaaactcctgagctcaagggatcctcccgccttggcctccctaagtgctaggattacaggcatgagccattgttcccagccaaattcagatattattaaaacacatgtcatatttatatagtaacttacaaaga

SEQ ID NO: 117415 - DNA, 1021 bp, Homo sapiens
ttacaaataggccagatggagtagatagagctggcctgtacttgttcattccatgggagtaagtgggaatgattgcctgctaatggagcagggggctgaagcatccctggtagaatcagccagccatcaatatctgtgatgagtccccatcaagtgtcacagagcagcatgtggccaaggccagagggctcctgagggagaagagatgacaaaggcctagggtggccagggcaggggggaaagatggggaggatgttgcttgacagaaggcaggagacagttcagatggctgctggctgttccttgtcctctgtttccatccctgccatatccacagtggctttcctgatgggtagtgcaccttatctccgtatgcctggtgacagcttcccatctcctgattcctcatgatgtggctgagagaagccatggtttttgtcccatagatatgtgtgagaggaccaaatgtgttcaaaggctacttgaaagatccagacaggacgaaggaggccctggacagcgatggctggcttcacactggagacatcggaaaatggctgccggtgtgtatgtttggaaccacggagctccaaacatttggcagtgggagggtgtgtggtccgggtcactgaggcaggagtcttctccaaatcccccctgacaatgagtcattcaggagcacctctggggcctggggggaggctcttccttccctgagccccagagcatcttcctcttctcactccgtctcatgaaggtgatgagggacctgtgcaggtgggtgtggctgaggtcttggagactgaattcctatccttaatggtttccagaaagacatctgacagtgtgtggaatctgatgtgaagtaggaggaacagggggtacatgtctctaggacgtctgagaagggcaaggcctgcaagccctccaatgctggcccgcagccaaaaggtggcactgagtgaaggggaaagcttggagacaggagggagaatgccttagttcctgtggctttgccagc

SEQ ID NO: 117416 - DNA, 1114 bp, Homo sapiens
gggtcagagggctcagaggactttagccaccccacttgtccctcctgggagcattgttccagggaagcccccaggcctgccctgtcttacccatggacacactcagctgagagagaccccagctgatagcatcttctcagagagtattgcagctttgcagaagtgctttaccattcaagctctgtgcagtacagctccgtttatgaccaaaacacttatgttccataacttttataattcacaaactcctaaaagagaaaacaaaagagtaaagttggggaatgaaactggcatggctcttcaggctgcagatggggactggcctgaggctggccctgagacaggccttgtggaagtacagagggagtgggaggaggaatccatatgtgattatggagacaaggaattctccatatatgtgtcactcaagggaccagcatatgaaaaaactgtgtcttctaggcctttcccattttgccttgggggaggtcttatgtaatagtgcaggtaaggccgtggcatctggagagcatgctttccagctttccagacctggattcaatgccagcaattactgtaaattagttttgtgaccctgggcaagtcatgtaacctctctgagctttgtgttccttacctgtagaaatgccacttcccttatagggttgctatgagcattaaagaaaggagcatatataaggcccctggtgtactcctagtcccattaggaaccagccaggggctcccccttggcctcgcactaaacagcacccacagccaacttcagcagcatctccagtactcatggggcttacacaccttcaccttcccagaattccctggggaaatccaacaactctaagacctggagcagacccattagtaggctgtagtacatctcaaaggcctgagtccccagggaggcccatgtccagggtttgggagtaggtgaggggggcacacgccagtgagaatggctgctttggcatctcccagaggctcaggattccactccatcttctgcttcatctccctgtgcctgagtgggacttggttggaaggtgagggggtgggggtcacctcagatggcattcatcagtgtctcatggcagca

SEQ ID NO: 117417 - DNA, 1154 bp, Homo sapiens
gatgatgccaatatgttagaagcagtagggaaaagcaggtgtaaactccttgcaggcagggccaggttacccttcactggagaaccctgtgtgctgagaaccagtgcagcctggaatagaaggaggtgctccagaagtgtttgttgaatgaatgaatgaatcaactagtgaacccacagcttctgggtgaccagttttgtggaagagagtcttctctgagggctgctgcttccttagagctccaaggttccagtcacctgacagattgggagcttgggccactctgccaagcatagatgagaggaattcccagtcaaggtcctcacctcactggatggtctggtgtgatgctcccattccttgcgttggcctcgccagagttcccactaaccatccactgggtccacagattggtggggttaggggagtgctgtggatgagatgctgctttgagcccttggggttgtccttcaggatgcccaggggtggttcctcatcatttgctcggctgcctcgggagatccgtggtaggtgtggttattcctgggcctacttcctttgtgtagctcctaattcatgtgaatcttggggcctgggacaggcagaaatgggaagatgggaagtggattggaacagaaatttcaagccaagccgagctatctattctgagacccaaccaatactctcagagccagaaggatttcaaatcccaagaagtctcacctgaccctatttgccagctcttcccagagatacccttcctctccctgcacctaagccaggcatgtagtaggggcgtctgggggagttgggaatggcttctgatttgccatctgcccatttaagcttgtgttccgagatcactgtctcctgggaatttagagcaggaagccaggccagtgagggaacaatcagcatcttagtgctcagcccctggtataagcaaatgtgggctggcacctgttagggccaggaacagacttagtaattgatagctattggagaaatgagtgagtaggtaggcccaggttgactgggcagctctgggacagaccctattgaccagtgcctgggaccccgcctcactctcagcacagcctggcccaccagtgcaggatgtggattccaagggactgatcaagactcagctctgc

SEQ ID NO: 117418 - DNA, 1036 bp, Homo sapiens
cggggaaggtgactaccgaacaagacatgctgcctgccctgtgcttgtgggctgcaagtggggtgagtgtcttaaggggtagtgttggtgttggtggcctcagcttgggctttgcttattggccttagattctgagctgggaggcaactgctgccaaatttgctgagactgtctcccttcttaggtttttttctgctgttattaccatccagccatgtaatgtccatgcagctggtaaatgccaaggcagctggttggaaacactcagagatacacaggaagctgaagaaggcctgaggacgaatagctgcataagcaccataggtccaggaccctctggcaaggcttctgagggagcagagtggagagctggaagcagtgaggggaaagagtgtctcaggcaaacaaggcccatatggatggaggcacaggctaaaaccagcatacgggtgtgggggctggctcccttgtcacttgaagaaagggaggcctgtggcacaggggccagaagatgaggctggaggctgggaccaaactgcagaggctcaagcttgagccttatcctgggagcagttgtggtgagcctcggagaggctcaaaccaggatatgacaggaagtgtttgtaaggagatgagtgtgtagcccccttggagagttttgaagataaatagtgataggtttgcagataattaagcaaatggaaaagaaaacaaggcagttgctgaattcaggggaaaaaaagttgtacaagaaaggaaatgtaagtataatctactagatggctcaggtgtaacacatgatataattatgtacacactgagtattactttaactaaaacttatgatttacctgtactggaaaggtgggaggggatgagtttgtgttttaggggtagaataaaagaattccaaagttgaaagtcaaggaatagaactataagcatcttatctagaaaaatgaggttaaatatcagaagaaacagctagaggagtttaatgttccctgggagtggagattagggatgggaaggagag

SEQ ID NO: 117419 - DNA, 1019 bp, Homo sapiens
ctggtctcaaactcccgacctcaggtgatccgcccccctcggcctcccaaagtgctgggattacaggcgtgagccactgcgccctgccattctggttcctttttgatgggcccagtgctagtctggacttttgggatgggtgccctggagggttccctccttggcatcagagtgaggagatagccttagctctctctagatgagagctgcctttgtgttctccaaggcttaatggcctgattcccacctcttgcctctgttttatccataggttgtagggtttatctttcacatgaggagcagtttcctctcccctctgctgagagccagctctaaagaggcatagaggcagtaaagtaacttggagacagaagcctgtgtccattttttccctttatgcttttattgtgtggttattacatgctggggattgtgctgtgtacatgctggtgagcagaacatatgtggtctctcttgtgcttgaggtccaatatgagagacttattttaaacatcagagagattcttctttatctttttttttttttttttttgagacagactctccctctgttgcccaggctggagtgcagtggcgctatctcagcttactgcaaactctgcctcccaggttcaagcgattctcctgcctcagcctcccaagtagctgggattataggcgtgcaccaccatgcccagctaatttttgtatttttagtagagatgaggtttcaccatcttggccagactggtctcaagctcctgacctcaagtgatccacccgccttggcctcccaaagtgctggcattacaggcgtgagccaccatgcccagcctaaacatcagagagattattatgtagttatggagacaggtgctgtgaaccccaggcttggggttcagtggaggcctctctttggaagtaacatatcagttgagacttaaaagttgagtggaaattagctggtagaacatggtttctggcagaagagagagtgtatgtagtcctgtaagagaaaa

SEQ ID NO: 117420 - DNA, 1054 bp, Homo sapiens
tgcctggctaattttttagagacaggtctatgtcatctaggctggtcccaaactcctggtctcaagctatcctttggccccccagagttctcggattacaggcatgagccactgtgcatgcccacctgctgggacttttgttttcttctgtggtgtggtgggagggagcagctgctggccatgaggtgagtccagtgtctgcagacagccagactgggaccgaggattaggactcactcagctcagggcctgttactctgtgctttccagacaccccgtagacagaagaggcttttctgtaggtaccaccatggcaacagggccccacagctgctcattgcccccttcaaagaggaggacgagtgggacagcccgcacatcgtcaggtactacgatgtcatgtctgatgaggaaatcgagaggatcaaggagatcgcaaaacctaaagtaggtgtcactgtaggtccttctcgggtcactgaagggggaaggtcctttttctcatccctagcactatgggtggttggtttgcccatctagccaccctttatccatatctagcatgggcctaccgtggggatacagagatgcttcagactcagcctgaccttgtgagttcatggtccagtggaagaagaacagggtaaccaatgtggacagccaagtgctatcatagaaggtcacgctgggaacagggcaggtctacactggtgtgtcagttcacctggttgggagactggtgcgtgggtgagttttttggaaatgttccataggatgctatgaagctgggtcctgtggagctcctgattaggactgtaaatgaggtgaatgacttagaggagaatgtatatctttataatattgggtcttctcatccaagggcatgacaggtctctccatatctttttaagttttcttcatataagccttgaacatttcttaagtttattccttggtagtttctttgttactgttaatttactttatttcttcattattatttttaactggttacattattttattagtttactattatatgccaaactattga

SEQ ID NO: 117421 - DNA, 1516 bp, Homo sapiens
caccctaaatcctgcatctccctatagctgcttcttcatattggcttgaaactatcttcatggtcactttccagcactccctctacagcagatgacctttggtcataagacccactgaactgatactcagcaaggtccctgccacttaacagccaaagctggcactgcaaccttggctcttggcctcccttggtgtctctcacaccactcccgctccctctgtttctcctatctttagttcattctcagggttattcattgtctgttctttctgggtaggtgctccctggagctctggccttagtcatcttctccattctttcctcagagttcctgcaagctattttcctcacccatggcttggttgccacctaaatttatgttttttatattcagctaatttttccatcctctagactcatatggcaaactgcccaccagacatcttcttctctgtggtccacaggaccttcccactgtcctcaacaatgcttcctggtgggtttctggggctccccctaaaaaggccccttcccacttgggagatggggaatctgaggctaagaggtggctgtgaaccccagtccagggcagggctgggccatctgtctgtgctcactgtgtcagtggccctttaggatatgcagtctaaatgtccgatggagttctgcttggtgatgccccctatccagtggctcaggctttccttgaagtgggaatctctttccctaatccagaggctctttggagcctgacaatttacttcccctgctgtaggaaccaagtaccaggcaatgctgagtgtggatgactgctttgggatgggccgctcggcctacaatgaaggggactattatcatacggtgttgtggatggagcaggtgctaaagcagcttgatgccggggaggaggccaccacaaccaagtcacaggtgctggactacctcagctatgctgtcttccagttgggtgatctgcaccgtgccctggagctcacccgccgcctgctctcccttggtaaggagattctaggggaaggtaagatgggaatggagagtggcagaggaactgcactgtgctggcatctgcctgacccctctcctgggactgagtcagtttaccctgtcacttggccagtgactaatgccttactgactttaggaccagtccagcttcttactagctccttacccacctcaatcctggccttaggtttgcgcagtcgctgatagatacgctcaggcctgtggcacttgtgggcctttttaataaggactctgttatggtgtatctgtcaccatgcaggactacacagggtggaacctttactacatcaggagcagctcaggagtcaggttgtactttaggattgttacagtgacaaacagtagcggtgctattagaggcctgaggtctaatagtaggacttcatatggcattgatactttgtgtgccttgtgctgttggactgaagaaggccaaaagcactgtgcctttaaaactcatctaccttttt

SEQ ID NO: 117422 - DNA, 1099 bp, Homo sapiens
cctactctgtcttaagcaagctgtgggcatagttatgagatgggttggaggttggcctttcccacattgtggggcacagtccctctcggatgctgcctcctcccaatctgactctaattagaggactttttgtacagagccttttgagttaaggggcccaggcttgggagaaatggggtagggctccagagtacccctgccagagatgtcagtgttgatgtggtagtctgggagctgctgcttggaggtgcccagctctccaggctagcagagttagttatccccttctcccaccagagcaagactttgcaggctcttggtaggtaagtcatctgtaattacctgtgattctttgaggctctgcccaaaccccatctgtgattctttgaggctctgcccaaaccctatctgtgattctttgaggctctgcctccaggctgagattcaagaatgggctcagtctaagccagatcgcacattccagagaaatcacagctggtattcatgtaatgaagaaacctggctttccctgagtgttgtgaggtatgaaccgtagatgataggagcagaatgatttgaaaggaatggacagacttcctccctggaatttatctggcctctaaaaaggtatgcaactgcaactggagacacacctgggtagagatgctgggttccccacttccaaccatgtctggtttggaacctgcctgggccctgttctcccaccaccccagctctgaggagcagtcagctggtccctttctgatcacagatacatcctcccagctctatgttttcactgtcccctccctacatacatacagaaggtgctgagcctgagccagtcaagccttttgaggaacaagaaacagacacccaatcccttaggtataaggggcttgtgtaagcaagagagaagccttctgaaatcctgggatagagaagacagtatagtaaggccttggagcagacctgtggctagaaccaggagggcctggactctgcctcagggcaagcccaggcttactcactttctcttgatgacttgctctcttctgctgctctaactccctaatggaccccttagcacaatacgccc

SEQ ID NO: 117423 - DNA, 1078 bp, Homo sapiens
ttggttcagagggctcctcacacggcaggatgggccgcaggtgtgccagtcgggcccatgaggaggtatctgagctggggcagccccatcccccaagtgggccctccatccctcctcgggctggagcaccgcccctaaaagcgacttcaaagggccggtgtcgacagctgggtttgggtccgcggcctgcagatccaaggcccgagcaggatccaggccgtcggggccgtccgaacgcggggatctctgagagctgagtgggggtgccgggttgccggcagccggggctgagggcgggtcctcagagccccccgaagtgggagggtcgggctggccgcggggccaatccaggcgcacagggagcgggggcgggggctgggccgagtggggacaggggcgggcgggccgggggcgggcgcggcgtccaggcggcggcggcggctgcggcggcggcggctcctcctcagagtccggctcaggctccggctgcggctccagcccgcgatgccccattccgtgaccctgcgcgggccttcgccctggggcttccgcctggtgggcggccgggacttcagcgcgcccctcaccatctcacgggtgagtctggcggctgcgtggcggcagggcggtcccatgtctgagaccgggttctcgcggtccgcccgggacccagatcccctgtgtatccgaggcttgaaggcggagggttggcctgggcgccccgcatgctgtagaggcggcttccaggcagaggcaggcagccccagccgccctcctcccacgctgggcctgtctgcccgatcccgcgaagaatctcccaagagttcacgcacccgcctccccgctggcctcatctgggggagccactgtggacccgggaaggacccgcggagatgggccaggggtctagacagctctacagaggcccagaaactcttcagactcaccccctgcctgaagatctggggcaaaatgatttagagccccccttcccctatcaggggtccctgccggcagagcttggtgacccagggaggtctggggtcctcgctgaatctgagaagacagaggtccatcc

SEQ ID NO: 117424 - DNA, 1039 bp, Homo sapiens
acagagatgccttcggtgccatgcccagaacccatcttaacccttgatccctcaaatctcacccagtcccactctgacccctgacacttgatccttgggtcttagctggttgcattctgactcataagccttaccagaccccaagtccacagggtgaaggctggaactgcatcccttcctcctctatttctttctccctcccagcgctgacccagccagaggcctcccgcggagccgggactgcagagtcgacctgggctccgaggtgtacaggatgctgcgggagccagccgagcccgtggccgcggagcccaagcagtcaggctccttccgctacttgcagggcatgctagaggccggcgagggcggtaagacgcctgccacctgtccccatctgccttcccactccctgcagtgcccaggttgccccctagcgaccccacgtcccgcctcgcagtcacctgccctcttcggtctctgcggcccggtcccacgcccttgctacaaccttgctacgccctggcttcccgattccctctccaccccctgtcgctgcccctcaccccacgcccgccaaacccgttccccagtctcgggtgccgatggcccgtctggcgcccaaccaaacaccccgcagaaatggagttctgacctcctcaccccgttcatgccacctacgctccgggtttcaggggattggcccgggcctggcggcccccggaacctcaagcccacggccagcaagctgggcgctccgctgagcggcctgcaggggctgcccgagtgcacgcgctgcggccacggcatcgtgtgagtaaccgcccccgctgcccctcccggaccctagccttccagggccctggatgcgggcgcagtcgtgaacccatcagtcactcgacgctgtcctgtctcgttccccccatcaggggcaccatcgtcaaggcacgggacaagctctaccatcccgagtgcttcatgtgcagtgactgcggcctgaacctcaagcagcgtggttacttctttctggacgagcggctct

SEQ ID NO: 117425 - DNA, 2751 bp, Homo sapiens
ccaccatcgccaacttctcggcgcttgggctggagccggggcgcgacgtggacctggggcagctggagcaggagagctgtctggatggctgggagttcagtcaggacgtctacctgtccaccattgtgaccgaggtgggtgccggcccctgctggggctgagaccagggctcggaggacctgtcgcggtccttgaacccgagctcctctctcccagatgcgcactggacgctgtcactccccctcccccaacggtcaacaccctagcgatggagaccctccagccaggtggcttgggaacgcttcacgaggtgacctccagccacagtgtgctcctccctgcacaggtggtcagtctggcctcccgtcctgatggccactttgaagagggtaccaggaaggtcctggcggtccctgggcgatgctctatggccctgtgtgtccaggacttactctagttggggttgggggtggtaagtagcagagccaggacttgggccaggggctatcccgtttttcctctagtctcttgatttctttttagaagagaagaaatacttctctttcctgaacttttaaaagttaaataaagcatgtgtatacaactgcctcttccctttttcctctagttactccttcccctaccgtccacaacccaaaaacgacaatctggtcatgccctgtaagtaattgtttgccttttcccatggtcagttgtcagtcttttttttttttgagacagagtctccctctgtcaccaggctggagcgcagtcgtgtgttcttggctcactgcaaccttcgcagtcgtgcgttcttggctcactgcaatcttcgccttccgggctcaagtgattctcctgcctcagtctccgagtagctgtgagccacgacgcccagctaatttttgtgtttttagtagagacggggtttcaccgtgttggccaggatggtctcgatctcttgacctcgtgatctgcctgcttctgcctccaaagctgggattacaaccgtgagccaccacgccaggccgtcagttgtcactctttaagatccattcatctgaagatgggttcagggtgacttgttgacctggaatattttctcaggtattatgaggcaaggctgtcggccagatttagttaaagcatacagccttaggtcatagggtgtaggggagcctttctcatttctcatccccttggattttccctctgggtggttttgtctgtcccctccgaacctgttggagcagttgttggagctggatgtaggaacatgatgttaatgatgtatgtgttttgtgtcttttttagacactggcactctagctccctgaagtttcagcagcattgagtaagtagccagtgaatagccctcattgatagataggctcactaaatgtgcagatgaccaattcgcaggttagagaaggcttcccagaagaggaggcctctccgtgagcctagggtgttcagctcagcataatagtgagctgaaggccccagtgcagcagcaagaaaccacccagcaggacggcggagttcacagagaggggagagttcatagagagggagagtgccacaggccctggcacagcttcaagccctgctggatgttggtgctgagcctcccctcctggagcctcagaggggcttacaggggctctggagatcccaactgtgttgcttcttggcgtcatcacccttcaatggagtctgagagctaccctgggagatccaagtgtgtgtgcatgtgtgtgttttttctttttggaaatttgatgtccccagcatttggacctgctttctccacatatatgtagtgggagtgtgaccggagccccactgggatttcttagctagtgacatagcttcagtgtccagaggcatcatggcttgacaaaagaggcactccttggaggtagccaactgtgctttctggcccatgaatccacaggaaattggaaccttcagttgccacaaatcctgggtcctagcctcacaggtgggtgtgttaccttcccggaagccagtgagtactatgaaagcagaggctgtccctgaggttgcaggcagaggccacagaggggaacatgacacaggaatccctacaaattctacttggggctgcctaaagaagagggaagtagtgaagcaagaagaagcacatggcatctcttggagttttacattgacccctgagggttccccggcttactctagtcacttgttcctgctttgctgcctccatcccacattgggctgagtgatggtggcattgatgagctcccaaaggccagctgtgccagggggtctgaccttatcttgctgccaatgtcagccttttgttttttaatatttagactatttatttagctgtcttagcagtttcaaaggagttatgtgccctttcacctacttatatgttgtcagtctttgcagggaggccagattaatgcttagatctttgttttgggctactggaatgcttgacttgaagttcagagctgcttgttcccaggtgaacagctactgctggaagttgctgcatcaacattctaatggctttttctatggcctgttgtctttcaacccaaacctggcctgctgaccactgcatctagtcccatgcctgctaaatgtctctaagcctgccctctgccccaaatcatacataaaggtgtttgtaagtacactggtattgaattactagtcatattttttccactgaagactggaacctcaggtgtc

SEQ ID NO: 117426 - DNA, 1062 bp, Homo sapiens
tgggaggctgaggcaggtggatcacaaggcaggagttcgagaccagcctggccaacatggtgaaacctcgtatccgctaaaaatacaaaaattagccctgcgtggtggtgggtgcctgtaatcccagctactcgggagggaggctgaggcaggagaatttcttgaacctgggaagtgggggttgcagtagccaagatcgcaccattgcatgccagcctgggtgacaagagcaagactccgtctcaaaaaaaaaaaagaaaaagaaaagaaacttccaagctgctctgcatcgccttgctctccacctgtctgcttctaagaagccctcggcccagtcctgggtgggactcccactccctccccattgtcctggactagcttttctatcagccttatcttgtgtagagacagatagtcttagaagatgggagagccctcactgttatccccaaagctgcctggaggaaaagccagagcaacctgggagctgggaccggggctgactctgggcagcagagacccgagagacctggagcttgaacctcactgttacgcctttgttgatttctctcactcaggggacacacagaccctcatccagccttttgcagctatatggcaaggcagagaagccacttgcggggtcccgtggcccactatgcacgtacatagtagacacatctggccatgagtggtcagattgagccactctctagctagctgacacctgtaatcctgggtcaaatttctgacagttgacacaaagcagggggtcagggagccaaaaaaaaaaaaaatggccaggtgtggtggctcttgcctgtaatcccagggctttgggaggccaaggtgggcagataacctgaggtcagagttcaagaccagcctggtcaacatggcaaaaccccgtctctactaaaaatacaaaaattagccaggctggtggtgcatccctgtagtcccagccactcaggaggctgaggcatgagaatcacttgaacccaggaggtggaggttgcagtgagccgagattgtgccactgcactccagcctgggagacag

SEQ ID NO: 117427 - DNA, 1041 bp, Homo sapiens
tgtcagacaggtaaggtgtctgtcttctggagcaccaggggacctcagcactgaggaagaagcgtgtgcctggcccttgatttcagttggtagtattctttcagcgcagggccctgtattttaaagaagaggaagctatgtctgtgatatagactccatgcctagtaagaagagccaacaaatctgactccgtaattcttgctaagtaaagaaacctgagctgtctaagctgaatgtatctgtgacccggttgactaggtaatatgccatgattcacttctgcagtagcctggcttgcctcccctgggtcactgtgactctgtcatgcccctgagcatgggagaggttgacatcatgcacacatgcacatgtgctagattgtagatctgtagtagtgccacggtgtctgcctctgtagtcccaagaagaccagcattctctctgcaaagtgaaaggagctctcaccagccactagtggtatgaaaagcagaactcttttgtccacaaggctgatgccccttagctaagtggcctgtggttttggcatttactttatgacaggagggagaatagtgttttgatccatttcttataagcaggttatttgtataattctaaagcttttaactcaaggaaacattaacggcttagagaatcccaaacccctcgaaattatatgcacaatgttagagactacatgtgagcatttttttggagagaggtccgtagctttcatgaagttcttagaggggtccattatgttgtgtcttctttccctggagcttcagggtctgtcagagaagactgtgaagagagtagcagccttcagcaagtccttggccacatgacacatgtgagaacaccccacaaatcggtgggttagccggtggaaaggagtcccagcatcttccctggtttttaattcctggcctcaagcaatcctccctccataacctcccaaagtgctgggattacaggcgtgagacaccatgcgcagccagatattttttattgttgttgtttttttttggaaaaggagtt

SEQ ID NO: 117428 - DNA, 1705 bp, Homo sapiens
ggattacaggcgcgagccactgcacctgcccagccagatttttttttaaaaagcaggttaacctgtttattattcctactttacagatggagaaagtgagacagagggattaaataacttgcccagggtttcacagctggcaagtggcagagttaggatttggacccaggtagtcttgctcctctattgtgtatggactactgttctaggtccctgctgtcctaaaacttgctttctagcaaggtggaatgtattaaacaaccaagtgaggaagtcgttgttgtccttggccatggtaagagatacagagaagtgcagggtgccacaggagtgtctaacagaggaggtcaggggcagcatccctgagaaggtgaagcatgagcgagagtgggaagatgagtcgaaagtagccagctgaggggtagagaggagaaagaacatccaggcagggagaatagcaagtgctaaagccggggctcatgaaaaggcatgggagcaggacaaagtccgtgtggtagaggtgcggagagtggtgttaagatgaaggggagaggcaggcagagccctgggcagatgagcaaccagggcttagtggatcacagttaggactttgggcttcagccacagagcagcggtgggctactgagattttttaaagcaatagtgtgacaatcagatttgtccttttttttttttaaagatgctttgacaaccttgtgaagaaagaattgaagggaagcaaaaggtgttgtagagagaccaattaaaaggttgtcacagtagttcatgccagagatgatggtggcatggcctagcatgacggtggtagaaatggagggaagtggtaagaggtaaaatcaacaagacttgccgatgggctggatgtcggaattgggggaagaaagctttctggcctgagtaactgggtgaatgaaggtacacttctctaagacagagaatgctggaaaagaaccacgttcatggatattgagttcaatttgtgtgtactaaatttggggtgactatgagacccctaagtggagaagtagagtgtgaagctggctgtatggatatggtactgcatgagaggttttggctagagaaacacatgtaggatttgtcagcatatagaaccctcagcagagccccagatagggatgaggttgcctggggagaggggagtggggaggggaggggggaactgggggaggattgtgctatgcttagaggccacctgagtggacatgggagattccttctcacggagctaagtgacagctgcggctcagaagaatgcccttgatgtgaaaaggagataccccaagttcagagtagaaatgcagtgtatttttctgggtcagctgtgtcatgggtcagcttaagaaccttcttgccatgtgacacaatgattacctgaggaaagcatttaagttccaaaaggtctattcccagggaaactggaaacaaaatttgtgagtgtgtttaggaccactttagtctacagaagggctaatatagtgtttttcaaacctttctaaacattttggccacagaactttcattaaagtaggataatttaagtctagtaaatgaaatacaccctaagtggctaaaagtatggctgttctgcctgcagcccctgccttcaattcccaatgccctgcctcaagcctgtctgtgcccccttggaaggcccagggccctg

SEQ ID NO: 117429 - DNA, 1114 bp, Homo sapiens
gcactctctttaaaacaaaccaaaataaacccaattttaaaaactttttaaaatgagcacggatacagaaaaccacacagaacaaatgtgtagcttaatgaatttttttcagagaaataaccttatgaccaccaccaagtcgagcagtagaactttgctgtccactaagaagccctgtccatgtgccccatcccaattacagcatcctctctctctccccattaagtaaccgctagcctgactcctgtaataatcacttccttgtgagtttttttagttttattatcgaaatatgcatccttgacacaaatttagtgttgcccacttaatatatttgatgtcttttagtctacttaatctatggattctccttctatcgccttctatgccttactgattatctatgaagaacctgagctattccacctatagaatttcccagtctggatttgttgattgcacactgatgatgcagttcagcacattcctctatgctctgcatttcctcaaaattggcagttggatccagagacttgagattcaggttctgattcaggttcagtccttttggccagaccataggaagcatgcaattcctgactgtctctttatgatgttaacagtaattagtatataatgcatagatctattaatccattgggggctataaatggtattattctaattttattaccttttcatttaaaagttagaatacttttgtacatgatactacctcttatctattattggttgctgttcacatagtttacaaaggaaaatcaggacaaatgtttctttctctttatttgccagttttcatttataatgaattgtttctctgttattctccaaatttggcagattcttttttaaaaaaaatatcattatgaatgtatggattaaataattgatgtatttcagtctcttgcaatcattatcataattgtagcattgctttttaggcaaccctggtacccaggctgtacatttgtcatggggagtggggagggggagaaatagcatgggcactgtgagaccgagactgtccctggcagccagtattctggcaacactgttcacacccacttactggatggatcttgagaaagcc

SEQ ID NO: 117430 - DNA, 1048 bp, Homo sapiens
ccaggcattatgctaacctcatcacagtctctattttgattaatcttctgtttgcccctgcagatccactctccgtcctctctacctgctctgggttgggaggctgacctgaatgggccacatcactcatctatcttgcctctggattctagttagatttggtccatggggagcattagcaagagatggaaggactcaggaagatgaggtcaggagttccccgaggagggcaagtggttaagttattcccccgggtccctatcaggtcgctttaggccaactgcatcctccactggagcccacagctcctgccagacacccttccaatagctgcctcctttgggtccccttacccatttattcccttccttcataccttcaggttacaagtggtaacagctccccattgttgctagcccccatatgcttcactgtctcatcttgatttccctgagccctccccacacctttgtaaacagtcccagtccaagttcaccatctgtttcctacccaacttgatgatacaacgaggtaagcactgtattagcccatcttaagacaagtaacctgagccccagagaagtttaataacttgtcccagaacacacagctggtaaaccacagagctaggtctcaaatccaggtgtttctgattccaaagcatgggcacgtttcgtcattatatcatattgcttcccatgccctaaagatcgtctcccccagacttcatgaaacatcagtttactctggtatttttcccaatcagcaaccatttaaaaagagcaaacactagaagtaaatgctttcaaataaatcgtgagaggtaactgatgctggtctggattgagaaaggcacaataactattcaaaataggcctatgaacttcagaagcctgtggaatccacacttgccgtgtcctctgcactttccttctctgtgccttctgaagggtggtggcattgacatcaccatctgtgggagctcacataaagtcctgaatctgccaaaagacataacttgaggttgcctaacatcacccccatgtag

SEQ ID NO: 117431 - DNA, 1033 bp, Homo sapiens
gggaggctgaggcaggagaatggcatgaaccccggaggcagagcttgcagtgagccgagattgcaccactgcactacagcctgggcgacagagcgagactccgtctcaaaaaaaaaaaaaaaaattagccgggcctggtggcgggcgcctgtaatcccagctactgtggaggctgaagcacaagaatcacttgaacccgggagatggaggttgcagtgagctgagactgtgccactgcactccagcctgggtgacaagagtgagactttgtctcaaaaaaaaaaaaatccttttgtttatgttcacatagacaatggcagaaggaggggacattcctgtcataggaacatgcttatataaacatagtcacctgtccttgactatcaccagggctgtcagttgattctgggctcctggggcccaaggagtgttaagttttgaggcatgtgccataggtgatgtgtcctgctaacacacagatgctgctccaaaaagtcagttgatatgacacagtcacagacagaacagtcagcagcccaagaaaggtcctcacggctgctgtgctgggtagcacttgccatccagtttctagagtgatgaaatgctctgtctgtaccgttcaatacagtaggcactggcactagccacatgtgccagctaagcacttgaaatgtggccagtgcaataaggaattgaacttttaattgcatttaataaactgtatgtaaatagtcacatgtggtcagtggttaccatattgaacagtgcaggtagatactggactgggggcagatctgagggagaggggtttgagtagtgggaggacactggggataggggcttggggctatttacctgccattttgagtagtttgctattttagcagccaacaataactattggtgctgaataccagccctgcagtgtagcatgagacaggtccatgcacacatgcattaggaaaacaccttcatgaagcaggattctgcctgggctgatgcacacaacctctatggagggtaaacagtgttt

SEQ ID NO: 117432 - DNA, 1077 bp, Homo sapiens
gtagcagggcccctgggcccctcttattcctctaggcaagcaggacctggcatcatggtggatatggtgcagagaagctggacttctgtgggcccctcaacagccaagtgtgaccccactgccaagtggggatggggcctccctccttgggtcattgacctctcagggcctggcaggccagtgtctgggtttttcttgtggtgtaaagctggccctgcctcctgggaagatgaggttctgagaccagtgtatcaggtcagggacttggacaggagtcagtgtctggctttttcctctgagcccagctgcctggagagggtctcgctgtcactggctggctcctaggggaacagaccagtgaccccagaaaagcataacaccaatcccagggctggctctgcactaagagaaaattgcactaaatgaatctcgttcccaaagaactacccccttttcagctgagccctggggactgttccaaagccagtgaaatgtgaaggaaagtggggtccttcggggcgatgctccctcagcctcagaggagctctaccctgctccctgctttggctgaggggcttgggaaaaaaacttggcactttttcgtgtggatcttgccacatttctgatcagaggtgtacactaacatttcccccgagctcttggcctttgcatttatttatacagtgccttgctcggcgcccaccaccccctcaagccccagcagccctcaacaggcccagggagggaagtgtgagcgccttggtatgacttaaaattggaaatgtcatctaaccattaagtcatgtgtgaacacataaggacgtgtgtaaatatgtacatttgtctttttataaaaagtaaattgtttataaggggtgtggcctttttagagagaaatttaacttgtagatgattttactttttatggaaacactgatggacttattattggcatcccgcctgaacttgactttggggtgaacagggacatgcatctattataaaatcctttcggccaggcgcggtggctcacacctgtaatcccagcactttgggaggccgagatgggtggatcac

SEQ ID NO: 117433 - DNA, 2592 bp, Homo sapiens
aataacagtaagaccttagacttcatatttgtcactgtgtccctacacatcctctggtttttaatcctcaaaattttgttggatatgttttctcatttccgagaagagaaaactgaggggcaaagagatacagtgacaatgccagggttacacagtgttcaccatccaagtctagcccagagctccctcagtggtatgaccaggaccccctgtgtaagagcccatgctcccaggtgtcctgaggagtcctttctaatggaagaagttcttacttccatgtgggtgcttacaagccagagagaaacatcccagagcttcaaaaccagggctttgggggagggtgccctgtgtgggtcctagcacatgtgtaacaggcagagggaggtctttgtgagctaataatgctgcagctcatccaaactaggtgtccctcctgagagatccagagtggtctgtttaagccagcctcaagatgggtgtccaagccagatgtcaggggaaaaaaggggaagtcagccttttctcagacctgtctggctgggcaggcctgggtctcagactcagccccaaagtctgtggtctctgacctgacacagccttatgtgtatgtgtgtattgttcaggaggagatgatcttccagatcccatggaagcatgctgccaagcatggctgggacatcaacaaggatgcctgtttgttccggagctgggccattcacacaggtgtgtgcctgggactcaggcctaggaagcccagggtagagacaagaggaggcactcacgttaacacagaggctcttcactggggtccctgagctccctgagacaacatgcagaattactgggaagaggggctggtggcagacttgtgtttctggagaagagagtcgatcatctcagcaaattctcaaagggaaaagccaagatcttagaaagtgtgtggcttcagggggtttgtggctagatgaaagttctccctggcaaaagcatctgtgaaaagcagctgtaagccagggcactgaaagagacccaggtctgcctttttcttcgtgttgaccaaggcccttggtccaagcctcatgtggttggtggcctcctttatccttgagagatggagctctaggcccatctcagaacagtcagcccacccatttagtaactgttctctgctgcccagtctgtgcccactctaccctctggctgctgatagcccaaggaggaagactgggcatagtctgagacacagatagtacactttggggatatggggactctagtgcttctggctgggcccttcactgaggcccgctagatgtgtttaagccaagcctgggcatttgagaaggcccagggcctaggacctgcagagtgtcaccgggagtacctgctggtttgaccactgtggctctctggtagcataagaggtcaggggtaccttgccttcctccttcaggccaggggcagctgaggatccctacccatggccctgacgatcctcttttttctcctgccctctaggccgatacaaagcaggggaaaaggagccagatcccaagacgtggaaggccaactttcgctgtgccatgaactccctgccagatatcgaggaggtgaaagaccagagcaggaacaagggcagctcagctgtgcgagtgtaccggatgcttccacctctcaccaagaaccagagaaaaggtatccaaggactctgggtccttgggaagccctcagggagggagggtagaaggaggtcagctggggctggagagcctgcaccaaggctgacagcccgtctgccccacagaaagaaagtcgaagtccagccgagatgctaagagcaaggccaagaggaaggtgagtgtggtcctaagcagccaggcctttggtcacctgtgggccagggtgagcagtggaagaaatgctaaggtgggcctgggcctaagctgctttctccctcgacagtcatgtggggattccagccctgataccttctctgatggactcagcagctccactctgcctgatgaccacagcagctacacagttccaggctacatgcaggacttggaggtggagcaggccctgactccaggtgagctggtccaggtctggcaggagaccccacaggtcagtgggatgactctttctcttggaggcatggtgctggcacatggtggcccattagtgcaggctgcagggttggtcggagggcgctcgatgtcttgcaaactaagaaagcacacaaccttgacctgtggcttctgctgttccccagcactgtcgccatgtgctgtcagcagcactctccccgactggcacatcccagtggaagttgtgccggacagcaccagtgatctgtacaacttccaggtgtcacccatgccctccacctctgaaggttggtgctcctggggcctggcctgcctgcttgactgtctgggtcctgtgaagggcttcctgagagagaaaagatgatcagaactccacctggcactgaattgattgagttgggcattgcccagtcttagccaccatagggggaggcaagcgacggggacactaggaaggcagttcagagtgggctgcagtaca

SEQ ID NO: 117434 - DNA, 1029 bp, Homo sapiens
gaagtccgctgcccctggcaacagcacccagcacctagccctctgcttcgccgtaccgcacccggaagtcggagctgcgcacgcaccgcgggactctgatttcccggcgtgccccaggagagcggcgtggacgcgtgcgggcctagaggcccacgtgatccgcagggcggccgaggcaggaagctgtgagtgcgcggttgcggggtcgcattgtggctacggctttgcgtccccggcgggcagccccaggctggtccccgcctccgctctccccaccggcggggaaagcagctggtgtgggaggaaaggctccatcccccgccccctctctcccgctgttggctggcaggatcttttggcagtcctgtggcctcgctccccgcccggatcctcctgaccctgagattcgcgggtctcacgtcccgtgcacgccttgcttcggcctcagttaagcctttgtgggctccaggtccctggtgagattagaaacgtttgcaaacatgtcccggatcgaaaagatgagcattctgggcgtgcggagttttggaatagaggacaaagataagcaaattatcactttcttcagcccccttacaattttggttggacccaatggggcgggaaagacggtaagtcttcagtagccgccttcagtttacaggtcgctacatctttcggagaataaaatgggaagttgagaactctccttaggagcagaagcgtccctagggctccacaggtgtaggcccttaaagtgccttagggtgtggcctgcaggctacagcgaccttaggagtttgcctgaagcagtctcggaaggatgtccggacctggcctggggacaaggtttacttaagaatcccacgataccgggagctgtcgccgctcactcagagttcagttcccactggatgccctttggtctgtattgatgtttttaacgctgtctccttgctttcaaagcatagcattcacttcccagtagttgtcccatacaagaattcctttaaaagttataaaatgatacat

SEQ ID NO: 117435 - DNA, 1020 bp, Homo sapiens
aaaccatcaggtctcgtgagacttactcactgtcacaagaacagcatgggaaagacctgtccccatgattcaattaccttcaactgggtacctcctgcaacatgtggaaattcaagatgagatttgggtggagacaaagacaaaccaaatcattctacctttctataaacttgcaatttttaaggataaaaaacatttttgatgcttacagagataaaattcatttatttgaaaaatctgcatacctgatctcctaatgatgctgaataaaggaggtagatagtatatcatttttgtaaattaattaaacagtattcttctatattttggatagcatgtaaaaatatcactcattttggatgtttttctttttgttccctcattttgggtaagattgcttatgcctttttctcagaaccaacactggtgcttattaaagtaacataagttttttctgtgttttccttcaaaggttgctcaagaaacagatgtgagagcccagattcgtctgcaatttcgtgatgtcaatggagaacttatagctgtgcaaagatctatggtgtgtactcagaaaagcaaaaagacagaatttaaaactctggaaggagtcattactagaacaaagtaggtgtttatatgatatttgaatttctgttcattttcagtcttttaggtctgtaagttgatggttgttttctactataagtttaggggagcatattaaatttttttcaatagactttagactttatttttttagagcagttttgggtttatagcaaaattgggcagaaagtactgagcttccattttctccctacccccacgcacacacagcctcctccactatgaacatttgattttttgtggatactatttgtcagttaaatagaatgatcccatgaaagacttagggttatgttccattctcttgagtaatttctgaacagttgctgaattgaaagcacataatcactcaaatacaggttgaatgagtaaaaaattctagtgtcatgttta

SEQ ID NO: 117436 - DNA, 1079 bp, Homo sapiens
ctgtcatcaagaagattctaattggcctttaagtgaaggaaaggctttgaagcaaaagtttgatgagattttttcagcaacaaggtttgtaacccttaaatagactttgtagtccattaagttattgaactgtgtttgcaatttggatgcttctttttaacagaaaaaatttaaaaagcagaaaggtcatcagttactacctctcatccagcagcaaccattgggcatattttctttcacttgtctttctgtgcgtatatttatttacctgattgacagtataaatgtaatttttttcacttaccattatgtcataggcattttacaagttattaaaaactcattgtaactgtaatcttagtgacagcataatatcccactgtatgaatatataccataatttactttgccagaaatttgatttttgtttcatatcttcaaagatacattaaagccttagaaacacttcggcaggtacgtcagacacaaggtcagaaagtaaaagaatatcaaatggaactaaaatatctgaagcaatataaggaaaaagcttgtgagattcgtgatcagattacaagtaaggaagcccagttaacatcttcaaaggaaattgtcaaatcctatgagaatgaacttgatccattgaaggtaacttgattttatttttaattgacaaaaattgtatatctttatggtatacagcatgatgttttgatataagtatacatcgtggactggctaaatcaagctatttaacgttcattacttcaatttttttatggtgagaacacttaaaatctactctcttagcaattatatattgttattaactaaagtcacagtgatgtacagtagttaatttcttgtatactaaataggtagtcctttttttgctatagtagcattctccccttatttgtatatgaaactgaatggcttgtatatttcttgaattatcagggagctaatgttttaggtctatgttagtctttaaattgctgaaagagcttggatttgaaagaaaacaaatttgtagcatcacactaaattagtagtatagatcactaggtgttaaatag

SEQ ID NO: 117437 - DNA, 1444 bp, Homo sapiens
gtcctctgtggttgagcaagctttggattaaagtatactcttcatgtaaatttgcctataggctcagaatgcattggtaactcaccatgaatttctagccttctcagtagtcctgacttaaaaaaatacattaaatagttacctttttaaggattaagtaactctaaatgcccaatgaatgaataatgacttttgtggcaggtgttgaggacaggacatggtgtttggagttagaagtggaatttaattcctgcttctctctactagctgtgaggacttgggccaagttacttaatgtctctgaacttcagtttctctaggcctgctctacagtgttattgttagccttaaatgagatcacttttactaaatgcctggacctggagtatcttacttgtcttcatctatcagccatgtaagctatagtgagttttatttatgtaatgtttctttattttcagaatcgtctaaaagaaattgaacataatctctctaaaataatgaaacttgacaatgaaattaaagccttggatagccgaaagaagcaaatggagaaagataatagtgaactggaagagaaaatggaaaaggtttgtggtggtagaattttgttctgcttcaaaattttgggattattgtaatgaactttatttgaatccattttgccatccacattggaaaaaaacaaatacagatcttgttacttctatgtatatgttaaaatgaaggatattgaataaggtttggtttatatttgatacctcaaagtgatcatattttcttatgtttgtacattaaagctttttattttggtgttacacaggtttttcaagggactgatgagcaactaaatgacttatatcacaatcaccagagaacagtaagggagaaagaaaggaaattggtagactgtcatcgtgaactggaaaaactaaataaagaatctaggcttctcaatcaggaaaaatcagaactgcttgttgaacagggtaggacaaaatgtttatttggtcgtttttcctactatgatgttatacattttctgtatgaatgaagaatctccaaggacttatgctgagtgaaaagccaatcttaaaaggctatacacagtatgtttccatttatataacatttttataatgtcaaaattttagaaatagtggagaaattagtggttgccagggatactgggtaagagaaaggacaggagggagctaggtatggttatgattagaacaaaaagagagtccttgtagtattggaactgttcagtatcttgactgccatagtggatatatgaaccgacacaggtgataaaattatatagaacttaatatacacacatccacatgctcaggggtacaaataaaattggggaaatttgaataagattgatgaattatatcaatatcagtattctggttgtgatattttactgcagttt

SEQ ID NO: 117438 - DNA, 2419 bp, Homo sapiens
caccacagtaataattattgcaagcaagatctgtcagtggatactaaaatcagtaggcagaaagttgagaagcaagatatttacatagtctcaacatttctctcctaagatacttgttaattacaaagactaaaacagtaactttacagtggagaaacctggccaacaccatctaagccaagtgaataaggattaacatcatcagtaataagacatattgatatcatgattccatatccactgatatgataccctgaaaagaacacaatgtcacttctgtggtattcttcctaaaaatacataacctcagtctaactgtgagaaacatcagatactttatttttaattgtgttttctatttaggcaaagcataattgatttgaaggagaaggaaataccagaattaagaaacaaactgcagaatgtcaatagagacatacagcgcctaaagaacgacatagaagaacaagaaacactcttgggtacaataatgcctgaagaagaaagtgccaaagtatgcctgacagatgttacaattatggagaggttccaggtaagtttattgtagtttaaggcagaataaaacttgttccatggtggcttgaatttgaagtgtgagagttaaaaatagtagctagtattcaggtacaggttgtgtttagaattccccatcctgaatttcagataccctcagggagaaactgcttagtttacatccctgggtttaaactttttaattcataaatttaaaaattaagacagttctgtttgtttttcatctttagtcagcttccttttgtttacatcatttgaattgctgataattaatttcacttttatcctattaaactttgctaaaattgtatctagaaatggtttataagtttagatttaaaaaataaatgataagagcaattaatttttaaagattttgaataatgcagtaagtttattaaaggaaatcattttgttatattcttaagatggaacttaaagatgttgaaagaaaaattgcacaacaagcagctaagctacaaggaatagacttagatcgaactgtccaacaagtcaaccaggagaaacaagagaaacagcacaagttagacacaggtaatacagtctgtgtccttctgtactcatagagactttgacattgcgagcacatgccttttacagtcaattttatatctgttacatggacaacgaagttccttcctgtccacatatatttgctctttttttctgaaaagcatcacttctctttgttctcttactttgcacaacagattttgaacagtaggagagtatgaaataagctgtattctcttttccttttttttttttttaagatagagtttcacttttgtcgcccaggctggagtgcaatggtgcaatcttggctcactgcaacctccgcctcccgggttcaagtgattctcctgcctcaccctcctgagtagctggggttacaggcacacatcactatgcccagctaatttttgtattttttcgtagagatggggtttcactgtgtttgtcaggctgatctcgaactcctgacctcaggtgatccacctgcctcagtctcccaaagtgctgggattacaagtgtgagccagtgcgcctggccatgagctgtattctttctcattcatacctgccctgtaagctttccctgtgagtggccagcagggaacatcaagctgatttgagaactagcagggttctcattgtatttttgttgcagtgggtggggcccacagaaatagcatttgtggattccatagaccgataaaaatgggaagaatgatacaaatagtattttctatgcccttacattaattactgtgataatatgtttttgtgtagtttctagtaagattgaattgaatcgtaagcttatacaggaccagcaggaacagattcaacatctaaaaagtacaacaaatgagctaaaatctgagaaacttcagatatccactaatttgcaacgtcgtcagcaactggaggagcagactgtggaattatccactgaagttcagtctttgtacagagagataaaggtaagaatatccatacatgttttttgtaaaattattttaattatttatttttatttttattttttgagacagtctcgttctgtcacccaggctggagtgcagtagcacgatctcggctcactgcaacctccatctcctgggttcaagtgattctcttgcctcagcctctggagtagctgggattacaggcgtgcaccaccatgcctggctaatttttgttcttttagtagagacgggttttcgccattggacaagctggtttcaaactcctgaactaaggtgatccgcctaccttggcctcccaaagtgctgggattacaggcgtgagccagcatgccccgccccattcttctctt

SEQ ID NO: 117439 - DNA, 2061 bp, Homo sapiens
atcctgataccaaaacctagcagagacacaacaaaaaaagaaaatttcaggccaatatccctgatgaacatcgatgcaaaaatcctcaataaaatactggcaaaccgaatccagcagcacgtcaaaaagcttatccaccacgatcaagtcggctttattcctgggatgcaaggctggttcaacatatgcaaatcaataaatgtaatccatcacatgaacagaaccaaagacaaaaaccacatgattatcccaatagatggagaaaaggccttcgataaaattcaacaccgcttcatgctaaaagctctcaataaactaggtatcgatggaatgtatttcaaaataatacgagctatttatgacagacccacagccaatatcatactgaatgggcaaaaactggaagcattccctttgaaaaccagctattatgaggatcaaatgaaaatggtataataattatttgtgtggttcctaagtgatagaacttgtactagtaagtaaagatttctggaagaaggagtttgccataataaggaagaactggctgcctggttaagtagtaaatgttattggaggtggtcaggtggtggttggttaattctgtataaggattcctgcttgtacaggaggtttgtcttatctgcagatcctttatctatggcggtcactctcagtcatagcactctttccatttgattccggatgtggtttcagaacccttaccaatacagtgagcaggcactcagttgccactggaatgcatttgacatcccttatatagattaatcacatctaagactcaaccagttataaacagttataaacaatcttacctaggtttatataattatgcgtactcattcaataagcactaagtatattactgaataattactataaatttttattaaattttagattacaaaatatcagaggttcagaatataatataaaatagtacttgcatctgtataattttttactatttataaagcactttgacattgaaccattcagtgcctcagcaaccctatttagatgatgaaatctctttatagaaaaattgagatttacaaatgtctcatgagtgcctaagtttatgcagctaataggaagcagagttgattttctgatagatcttttgacactgagggcatttgacttcctaacacaccataccacttcccagtatgataaaatagacctatattgaagtaattactaaataattgtatctacctctatagattcactcagtacttcagaatcttaaagtgcttgaggacctctgttttgaactgtggttatcatataactacgttgtagatttagtgttacaaggctaaataatggggacttctatttagtaaaatagtttattacttgaaagccccgttccttccaaaatagttgtggagacaccaacattagtttaacagtatgcttttattaccatgaaatatctgcgtagccttagcaggctaagcttaaggacagaagtgtttttaccatcatgttttcatctgaaaaagaaaagtctggactgaatgagctttcctattctttgatcatgcagcagtgacgggcacctataaaatcatgaaaactcatgcttgaagccacacgctaatataattgggagcacatggcctagattaagaatcaaattagtggttgatgcagtatagcatgcgtagtggttaagagcgtgaactctggagctggactgggttaaaatcttggctgcttcatttactggctgttgtgaccctggacaaatcattctctgtgtctgtttgctcgtttgaaatataggactgaaaatgatggtactgtcctcatagggtcattgaaaggagcaaatgagttgacttttagagcctggcacatagaaagtgcttttattaagactgtgaagtctgacccctaaagtaagataatggaatattatataatactttatcttttttatatttttaggatgctaaagagcaggtaagccctttggaaacaacattggaaaagttccagcaagaaaaagaagaattaatcaacaaa

SEQ ID NO: 117440 - DNA, 2001 bp, Homo sapiens
ttatttcacatgaaattaaatagcataagataaatagtattttcagattcatggtataattttgacattagaaattcttgttagaacaaggatttgatgtaaattattttgctgcttgatctacaatagaagttaagaaatgagactaattaatcaattcctataggtgagaaagggacttgtctgcgatcataaaattcagtagtggtggaaactggaacccaatgttcataacttcccagccagtgttttactgtgctctcctgttatgtgcccttaagtacaaccagtgtaaatttaatgaatatttttctacagctgaatgatattaaagagaaggttaaaaatattcatggctatatgaaagacattgagaattatattcaagatgggaaagacgactataagaaggtaatttaaaacttaaaattatttatttgattgtatttttattcatgtgcttaaagaattttcttttttgtagcaaaaagaaactgaacttaataaagtaatagctcaactaagtgaatgcgagaaacacaaagaaaagataaatgaagatatgagactcatgagacaagatattgatacacagaaggtaggtctgttttgcttatgatatcacttacacctatgacattcttttctatagttttattttcaatagaagatccattgaatagaaatgcaaaaaggaaagaggccaagcgtggtggctcacacctgtaatccctgcactttggaaggccgaggcgggtggatcacttgaggccaggagatcaagaccagcctggccaacacagtgaaaccctgtctgtactgaaaatacaaaaattagctggccgtggcggcgcgcacctgtagtcccagctactcgggaagctgaggcatgagaatcacctgaacctgggaggcagaggttgcagtgagctgtgattgtaccactgcactctagcctgggcgacacagcgagactctgtctctaaaaagaaatgcaaaaagtaaagaaaaataattccaataacattcttacttcatttattttttatttttattttcagtaaaagactcatggtaaaagttcgaacataaaggcataaaagtgttcctccccttctcctaattctcaatcttacttctacatgtcattaactgttacacttatttgttcttaaagaagttttttattcatataccagcagataggtagataaatttaggtgtgtgtgtatatatatatatatatatttaaatttacttttatggatggggtcgtatcatgttattctgtaccttttttcacttaacataatttgattttacctatcaactcacagatgtatcacattctttttaatgattataaaatagtccattttgtgtatataccagcacttactcagattgatttcatttccttatcacaaactgtgtgacaatgaacatctttaacatgtatctgtatcttttcttattctaacatatctttatgtagcataaattcacaaaagacggattaaggtttaataatcttgaaagtaatctgtaaggaaaatatttatatattaagtcattttccagttgattcctatatcatttattttctctattaaagaaattaatttctatagtataatcaaaatcatattaagaagccatcatcacatgctttatgcaagcatggtagttaatgcctttaaaaactataccatttctctgttcttactgttttaaacaaaatttactatttgaatgccttaaccacttggttataagtggttgcttaaaatcatttggaagattagttacattagttttctgctgggtctctttctgtaccaccaagaatttcaaatatatgaaatatcagtcaaagggagatcaaatctctgcctggcctaatacatattgaataactgtataaatttatgatgcatatataacaaaataattatcactagcttttatgtagttgcctatataaaaatcacaatctgtaaa

SEQ ID NO: 117441 - DNA, 1029 bp, Homo sapiens
atcagaagattgtgaatttgtaatattaatcaccagagtgctttacttagcgtctaaaggccaggaactttatcagtgatcacatgctatgagggttctgtaatacacaaaattagctatttagcaacctatgtgcggcagagatatggaaggaagagaggggttttctttagtaccaaagccctaaataataagcaaggagagactctgttataatatactgattgctaaggagaatgatacttaacctatctaaagaaatctatgacttttccacttcaggttgttaaaagctaaaaaatggtcctcatttgtcatttttcttttttacagtgaacatcagaagttggaagagaacatagacaatataaaaagaaatcataatttggcattagggcgacagaaaggttatgaagaagaaattattcattttaagaaagaacttcgagaaccacaatttcgggatgctgaggaaaagtatagagaaatgatgattgttatgaggacaacagaacttgtgaacaaggatctggatatttattataagactcttgaccagtaagtattagactggggattttcttattgcagttaatattaactaacatactttagtcatcttttctctcatttttttctttttttcttttttattttttgagacagagtttcactcttgtttcccaggctggagtgcaatggcacgatctcagctcactgcaacctctgcctcccgggttcaaatgattctcctgcctcatcctcccaagtagctggtattacaggtgcatgccaccacgctgggctaatcttgtatttttagtagagacggggtttctccatgtaggtcaggctggtctcgaactcctgacctgaggtgatccacccgcctcggcctcccaaagtgctgggattacaggcatgagccactgcgcccagcccctcattttttctctttaaatatggtattttatgtataccatggattggaaaatatatgtatgtatgtatgtaaacacacactagctt

SEQ ID NO: 117442 - DNA, 1216 bp, Homo sapiens
ttttcttccagagaaaagtagtaacaggtcaggaaaatcccaggcgaaggagtaagccttctatagttgaacagtttggatattaaggaaaactcaataaaatatttatacctgctttagtgagaacttctgatctggaagaaactagttcttgtattcctgtgagtccctaagccagacctaagtgaggagtcaggccatgtgtccctactgtctggagaggagaagagactcctgcctggctggcctgaaggcctggggccacccctccacttcctgcagggtagctggggccctgacacacagcacaagttcatgtgtctgacaaggtttgcggtgacttttcaaatcaaagaaggggttatgctctttactaataatatgttctgaatatattgttgcaggataataaaaagtcgctcacagcagcgtaacttccagcttctggtaatcactcatgatgaagattttgtggagcttttaggacgttctgaatatgtggagaaattctacaggattaaaaagaacatcgatcagtgctcagagattgtgaaatgcagtgttagctccctgggattcaatgttcattaaaaatatccaagatttaaatgccatagaaatgtaggtcctcagaaagtgtataataagaaacttatttctcatatcaacttagtcaataagaaaatatattctttcaaaggaacattgtgtctaggattttggatgttgagaggttctaaaatcatgaaacttgtttcactgaaaattggacagattgcctgtttctgatttgctgctcttcatcccattccaggcagcctctgtcaggccttcagggttcagcagtacagccgagactcgactctgtgcctccctccccagtgcaaatgcatgcttcttctcaaagcactgttgagaaggagataattactgccttgaaaatttatggttttggtatttttttaaatcatagttaaatgttacctctgaatttacttccttgcatgtggtttgaaaaactgagtattaatatctgaggatgaccagaaatggtgagatgtatgtttggctctgcttttaactttataaatccagtgacctctctctctgggacttggtttccccaactaaaatttgaagtagttgaatggggtctcaaagtttgacaggaaccttaagtaatcatctaagtcagtacccaccaccttcttctcct

SEQ ID NO: 117443 - DNA, 1107 bp, Homo sapiens
gcaactgtgaaatgcttggttaattactgtgtatgtaactgttacataattacatagtatagaattttttcctttaaaagtatgctgtgaaataaaatactttaatgttattaaacaaaaattttagaaaaactctgaaaaatatattaaaactacttgatgtaaattctgcctgatattttcatctgtgcattttatacctatatatgacttttattcacttgttttatgtgaacttggggaagatattttaaggagtcgcttgattttatacttggttatcaggaaaaagtaactgaagaatcatgttgctttttttttaacctatatttgttatctggggacatatatattttttaatttggctttcctgttaatctttcttttcctattatttagctcatctattttgcttctctttcgcttttgttcttagttatcattgtacaattggacaacagtttgaatttagcaatgagttataaagttctaggagcataataaatggaaatgcatgatattattggtttgatttccttaaaatattgataattggttttgtattattgaggagtgtaggcatttctatattgaaggaggtaatttatataagtctgaaacattgattcattttagtgattgttgcaattaaatgattcaaataggaaaaaagaaagtctccccagacaagatgattgaaatgcaagcaaaaattgatgaggagagaaaagcacttgaaacaaagctcgacatggaagaagaagaaagaaacaaggctagagctgaattagagaaacgggaaaaagatcttcttaaagcccagtgagtattattgaattgagatgaattcatgatttaaatttctgttttttcctaggatatataaaataggaaaattgaatagtaattaaaagcttggatttttgtctccagtgtagctattttggatagaagggtccattgtatatagtgtatttctaaaaactagatctattttggttattttatttccgtgtgataggaaaacatatcaatgaattagaatgagttataaattaagttagaaatcgatactacacagtggtgtaatttggcagagatgttaca

SEQ ID NO: 117444 - DNA, 1047 bp, Homo sapiens
caagaagttttaattcctatttgcgtacctagcacataatttttttcttgtaatgtgggcgtgttggtgaagtggagagatggttgtcctagcatgtggttgctgtgtgtaccttcccttttaaatatctcaatggcctttttaaaaggtgtttcttgcttgagtccttaattggcagtgactcctgtagaatcattgtttataattacccttaaaaatctactaatagaaggaatgtaagtttgttactgtacaggtatacttcattttatgtaataattttattttctggaaaaaaaaaaaagcccttaatccggttgggaaatcggatgtattgggagaacttgtgtctttaaaaattcttcattagacctttctgttaatcaaataatcagtggaaattactgtaatctaatttatctgttggattggttcaggtttttgtgttagattttcttaaagtgaagcatgcctataatagatccatatactaaaagaaatattgaattgggacatttttgatatggacagtgtgaattttgtcactttaaatgtactagttgttaaaattgccttaattttctgttttgcccttttagattacttcccagatcttagcaggttcctaattccatgtcttctgttagcataaccacatggtgttgaactgtgacctttgcaggacttggggaatcagtgtgagatcttgagattgacttgagttataatctaagactaagttaactttaatattcttgcttaaatgacatctctcgttgtgttgaatatgctttctttttacatgggctctatttcagttttgataacggtttgatttttatttctacacttaaatgaatgctattatatatttttctttgtttcacaagagaaataatgttttcctttttttcctcctcatctctgtgcgtattgcttcctgtctgcgatttgcttactacttcttattgcaagatcaagcaggttggtgtgattgatttgcactccacatggtacaattatttatcctataaagaactatgttat

SEQ ID NO: 117445 - DNA, 1131 bp, Homo sapiens
tctgagtgacagggcaagacctcatctcttaaaaaaaaagcatgtaaagtacatgacctagcacatagcaaatgatcagtaagtgacagctgatgtccttataaagcttattttttatttaataatttaatgtgtctattctgaaatgcagtctatgagctcatgatattttctgcttcaagtgcagtgttatattcctaatagcagagtttgaaatacttagtcagtttgaaaaaattaagacttttttattcccatgtgtaaaaaatggcttctggtatgattcatttattttcacggaaaagtctgaaaagtgtgttatgattattttcacaaaaaaaagtctgagaaaagttgaggttaactgaatagagtagtattagttgaggaaccgttttcatatatgccatcacatccaaggctatcttttcttactacactgtgtcctgaccaactactccagccctctgtttccccacatcgacccttggttttctccaattcttcatccacaatatagccatagtgatcatgatgtcactcctctgattgaaaaatcattctatggcttcatgttgcttttaggataaggtctaaaaagtttaataccgtccttattatactgtgtgattatggcattgtcagtttctctagctctgcctgcatccatcttccctttccatctctgtttcttccattctggtctcatttcagtcctcaaaatttccattctttttcttggctcttgctgtccacactgttcctatctgattcttacttgtatttcagatctaaaccttacctcttctggaaagtcctccctgaccccctctcctttttcccattacaattcctgtgcctagttgatgtccctgactcccatctagaactccctgtttctcattctgaatactcatcatcatgataaacccaagattatacacatcataagattagggattgtgtttgtcttgtcactgtgtctctagtgcctagcacaatgccaaactcaggtgtgtggtaaatgtttgttgaatgaatgaatttgggtatttagaaagttgagattttatctttagttacctgtaataattgtattgtcatctttttgttaactctgtttcttacagc

SEQ ID NO: 117446 - DNA, 2622 bp, Homo sapiens
cacccctctctatgcaaacacgtaaaagccatgaatgctggaatccaaaactgacgaggtttatttttttcagagccagtggctggtcttccatttacagtgtcactattccctgacggagctgttatgtgccgctctagcgaaggccccagccgggatgctaggcctaattgttcagcgtggagatggcaactcacgtggtgccctaggtgcagctgcgtggtctggtatacatgctgcaaaattcacccagttcccctcattttaatttttctaacctacagcttaattttaataactttaaaacacttctaaatatttattttggcaccagcgtcaagacaaataatatcctctcccattattttcataagtaacacagattccctgatttttaaaaactaaaaatacagctaaacctttcttatgtataaagtatgcctatcatatacagggagaggtgggtaataaacttcctgtaatgacagtgtttggcatttctttatggatggaattggaacatgaacaagaccatgtccagcgtttttactgtgaatgtaaatggaacagcagcccaaagctgttgtctgtgccccagaggtgctacctgtagacagggaccaactccatgtgtgtgtgttaagtgtttgactccaattaagactcccaagcaaatcctgcatattccaaatgtaaagagtactcagtgggaaaaaggttgttacctcaaagtcattgcttctttcctggctgggtcacagggtgaagagatgaaggtgtctgatgtatatagacaattagggaaaaatgagcggcaaaggagctttccccttcagctgcactctaaaggggaacattttaaggaagtactagcagctttgactcttctatgctcctgttggtttacaagccaccaagaatgtcagtgttgagaatacggcctggtaaaatgggagatgtaaaatgactaaatgaaaggaagggtagttttaatgttgaagcaccgtgctgggcactggagctacccagaggaatgcacaacgctcccctcaaggagctcacagtctagcctactccctggctggaagcctcaggaagacgtgctaatttattgtggaattggtagtttgcttttcatgcccctgtcttccttctcatgaccatttccccctttctgtctggcttgcattattgatttccaggaccaagtcctggcttcctcctgccttcctgagatgatgttctgctcagggagaagtggaggggtgagctgtgtgtgtccaccgaggcacggccaggaagaggcagcctttacctgtgaggggctccatgctccagcagcagagcaggttctagtgacaattcaactttttatgctatgaccaggggtggatctaaattttatggggctgaaagcttgaattatttagaaagacttctttaagaaaaacaatgttaatataaaattaggtacagggtcttggaaggggccctgaagattaagcttccttagcgtcacaataagtccgtatctggttgcaattgaaaactgatgcttcagtgagggtatctaaaaaggtaaactggcatatccagggcaaatgtgggctgccaatggctcatctctagggtaattttatgtctgaaagtgtatgcagttgggtcagagcatgacctttaagatagcctctctcagctaacatatttatgaagatgaggcctggtgacccagcaggttcattggatacataagaaatgagaattcctggttcatgggccaacctaggactctggagtatgcagacttggccattcgtccattgtggcctgcgggtcgcaccccaggcatactgaaaggccatactcgtggctggctgcctgcgggcctaagccttcccaggatcttcaggacacttgacagacttgtgttttctggtctgagctgcctccacaggtccctccagcaagcctcactgcacctctcccctgctgtttgtgtttggaattttgtcttctttagctgagaccaaattaaaccttggtgcataaagtgagcttaaaacttgccactgtttagtaagttagcccccatagaatgtgaccctgtctgcagagtctcatttacccctctttttctcattgtcatttgttggctttattagggctgtcttacaggatcatgttggcatttactatcatgtctttatcataaaccatgtttgtttgaggtagaagaatcaccatataattcgttgcccaaattgggactattgagagagaaaggggatgctattaattacaccagatcaaaaggcataaaccagacctgtcccaggccgatgtggaaatatgttctttctagttgtgggtaccctgatctaggtggtttgtaattgtgcattactgactgcatatgtttgtgtatgtgtaaatgtgggctccctgttaagtggggctcatggatacgaggcctgaggaagtgtggcttgctagtctgttacgttaacatgcttttctaaaattgcttcacgtgttaattcatttactcctgcattcattgactgtttttgttcttttccattcactttgtacttatttttttcattaaattttgcatttatt

SEQ ID NO: 117447 - DNA, 1036 bp, Homo sapiens
agacccttggcctgcttttccttcctcccccgctcccctctgccccgctccccacgccggaatcctgggtgcgactccaggcaggtcaggcctcagtggtcgggtctgcggcagccattcgccaggagctggagggattccagactcagcccagtgggcgtttatttgggctccagtccaggtcctcagaaggttgatgtccctggtggtccctgcaggggtctcactgggcctgagcctgccgacagccaacttactaaaggctttcataattcactcgcgggagggaggcctttggggggttgtatctggacatcccctgctgtctaaggctggatctgggtgtgtctgggaggctaggctgtgacagtgaaggaagctgtgtcctcttgccagcatgtaaggccctggtcggctggaagggggaggagggggagaaggaggaggaggaggagggaggcccagggctgttggagggaagggggaattctgaatatgtgaacgataacgaattggttctggggctaaataagggagccaggacttatgtaattaatgctataaataccgtcatcccaatttatatatgtaaattttccatttaatctgaaaatacatttcttattctactttggaaatgtgcatgactaaagcaggagctcttggtttcataatttctagactcgggtgttttattcccattggagagggggtcgtatgtcagttaagtaagtttaaatacatgaggaacagattcagaggctgggctactcagagattcacttcgccccgtattataaattggaatttatgtaccggaggagggcagtgcctgaatcctaacagacctgctgattagctggaggccaagagacccgtgagtgcctgggtgtctctgcatgtgtgtctgtgtgcattttctgtgcccagctgaccagaaagttatgtctgggtcttgtctgtggccagaggtttaacagttgatgttgcaggtgggagaggtatgtagagaaaccagaatcagacagcctgatag

SEQ ID NO: 117448 - DNA, 1031 bp, Homo sapiens
agcttctttctgaagcatgacccatctccagagatgggatttgagaaatcagtgagagcttcctataaagaactccaggagacaggcctgaactctagagggaacttgaaatccagggtcaaaggttaaggggcagcagctggtctggcccctgaaagccttcacctgatgcctctgcagctacacaatcccaagacagagctagagcaagggtctctttaaatgttgaaagatgttaggttgtcagctttaagatatgtggtggttttgtaatttgatgcttttattctgtttttaaattgaaatgaggtaatgcaactttcgtaataaccttttggaattatatttttccacttttaggcaaagtgcttagacattttcaattttttttttgctaaatactttggaattctatttaaaaaatagatgatcaagatctaaaggaaattaatcccaaccaacaaacttaaaagtttatctacctcgttttaggcaatcaagattctggagagtcttgaacacagaataacgattgtgaccattatgaatgtaactaatttcagttgtactgtgaatgctaaatatttgcaaacaagtacatcttgaaagtaaaggtgacttagagaaaagagacattttgacagatacttttaatttgtggttgtctccatcatgaaatagaaacgtgtttggcacttgtgggtggctattttgatttggcatgactacttaattttttaaaaaaattgtggtttgtgaattgcacctttgtgccatgtttctgaatctggttttcaaatccagtggagcctttcagtgaaataggtgactattaaaaaagtaatagtattacagaaaaatgagcgattaaatagtaatggatacaattaaggagcaactattttatatgactgttctgtacaaacaaaaagtatgtaatacccattttaaaaaaccatttgaaagtagacaacttattccaaaatagcaaatgcagaatctctgctcagtgagcttggatgagtggctta

SEQ ID NO: 117449 - DNA, 1803 bp, Homo sapiens
cagaaaagccgagggctgaggagaagtgtgagcgcctccgcctgtccactgtcccccaaagtcagttcaatccccgacgtcctccgctaggctccaccccaccggcccgggcagggcctccaaggcacctcccacctacgggtcacccagtcagcccacttctttctgggacaaaggcgtcatcccttagagacagtaggaaaatggtatctcccggaagttacctcacgacctccaagagcggcttccaaccttgccggaaatgacgaacgagtcaaccggatcggtgactgtggagggcgagctgagccctgtgcgtgagtggggtctggttgtgcagtgttcgtggaccctgggaggctaggggcgccccgctgggctgggaaaggataaggagtgcaggggcaggagtctggggttggggatggacccccgcggggactgcggcgcttcgcgaaagcgagccaagcgcctgtccaccctcggtcctgcagggccgccgccacaatgggccgcgagtttgggaatctgacgcggatgcggcatgtgatcagctacagcttgtcaccgttcgagcagcgcgcctatccgcacgtcttcactaaaggaatccccaatgttctgcgccgcattcgggagtctttctttcgcgtggtgccgcgtgagtgccttgggcccgcgggagcgggaggctggaccccagcagcagcagcagtcactgcgcctcccctctgagcgctggcggccgggcaggcgctctgtaacttgccgtacacacctttctcattgaatattcctgaccgcccttaagctggtcatattatcctccccatcttacacggggaaaactgagctacagaactgaaatgactggcccaaggtcactcgggtgattccagcatgttcctctgaggtcacctttatttagttcttaccagtggtgaaatgctttgtgttaaacgtgcagcagatagtgatgatagttgcatggccttggatatgctaagaactactgaagtgtatgctttaaagaagacaagaggactgagacctttttttttcttctatatgtcttatatgtgtgctctctgtttactctcttaatttttaaagagtttgtagtgttttatcttatctacacatgggggactgaagagttcgagagatccaagaggaagaatccagctgcctatgaaaatgacaaatgagcaacgcatccggatgacggttccctgtctctgaaagacctttctctggaagaggagtctgcattgtagtgtctcaaagacacaataaacttcctatggtctgcactgttgtgatattacatttttgtgagtagaatcctgtgtgaccactaatattcaagttcatgaagcgcccctcctcagcatgagtcttgaagttttgcctggtctcgggttttggtgaaagagcagggctccccctttgttccattatctacaagaaagtagctgcaggtactcctgcatctaaccatttgtgggtgacatgggctatggcgagtgctggttcttggccctctgctcccatagcaacaataaagtctactaactatattgtaattagtatgtgtcagggacgcttttattttttattttttgagatggagtcttgctctctcacccaggctggagtgcagtggtgtgatctcggctcactgccatctgtgcctcctgggttcaaacgattctcctgtctcagcctccgagtagctgggattacaggtgcaggacaccacacctggctaattttttgtatttttagtagagacaggtttca

SEQ ID NO: 117450 - DNA, 1229 bp, Homo sapiens
agaactcctccatcccagctttattcttaggttcatgtgtccccttgtcactcctctgcccagcttcccagggctctctggcccaaccctgctcccaggttcagggagtacctgcatagccttgtgatacactcagaatcatcccggcaggaggctccaataggcctgagggaaacccctctccaaaatggggtcattctccgtggccttctctttgccgaactcacttctggtattggggagccatctatctgtaagggcaaagacattcagatatgaaagtgttgacaccctgctgcacaccttggaagagtgatcattccattccgcagatgctgtagactcagaacagaggaaccattcctcaggactgaatctagctttcaagttccaccaccactatcatctccacactccacacacacacataagtatccttccctccttacctggcccaacagcaacaggaagatcatgaggactgcacaaagtttgaggtgccacatcttgacagggggaggatgttggagcctgaaagccagggacagttcctacttccttttatagactgacatcaactcttgcattgttactgggtgagatgggggcaaagtttatatttgtaatcagaatcaatttaataagttaatgtctaccggaggaatgtgctcaagggccacctttcaggcacgttgtatttactgatccctcatctggactttgagtgattgtgttgctggcatggaccctttcgcccattttaccaaaagtcagcactgcccttccttccctttgaaagccacgtgaaaccattgagggaggtcaggcaactagccacatttctattccaaaatagctcagtgagatcactcccatagaattccaataatgaagtcttcagaaataatgttggcccctttcagccttgtctaggaaagaagcactgatctattgtgtacagccaattggataaggcccttatctcctttctgtgggaggatgcttcagcaaggcctacagttccccagatcgtccacttgcttagatggactgtcaccctaatctgcacctctttatctcactagtaaaatgaagacccagctgtggaaagttcaaagtctggcctcctgccctctcaggggaatggctggatgtgagacttatttggaccacaggtgaattgaataattataggtttctttttgtttttaagcacatgtagatgagga

SEQ ID NO: 117451 - DNA, 7221 bp, Homo sapiens
cgtgcctcagcctcctgagtagctgggactacagatgtgtgccaccacacctggctaatttttctactttttgtagagataaggtctcattatgttgcccaggctaggaatcccaacattcaacataaagctgtatttataaaaacataatttgtggccgggtgtggtggctcacaccttgtaatctcagcacttcgggaagccaaggcgagtggatcacccaaggtcaggagttcgagaccagcctggccaacatggtgaaaccccatctctactaaaaaaaaaaaaaaaaaacttttttgtattttatatttggctgaggcagcagaatcgcttgaacccaggagaccagggttgcagtgaaccgagatcgcgccactgcactccagcctgggcgacagggagactgtctaaaaataaatgaaaataaataaaaacatgggatttagttatcagttggttcatggcatatgatggtagccgaaagtttgatataatcttaagtgtctaacctcacagaggctgttacaggaaacaggcaaagaatgtcctcctttttgtgtcacttgcttcttatacaaaagcaatgcacaaaatgttttgagtaatcagtagcacattatggcattaaatcttcattttaataatatctactgcataatagcaatttatcatttccattcatggaatcctgcttatatataacacttaatttctgaccatacattctgtttaaaatgttgcatgacttagggaacaaatgtaacttgagagactatggaatgatttgctctaaaacatggacagtaagcattttagtgtaggaggaggtattttttgagtttatgaatgctgttttataatctctactcatagttttaaagcagtgattcaaaagagtatatatcatttaatgaatgtttttggttttctagaattctttgctgaactggataaagtaatgggccctctcatctttaatgcaagcatcatgacagatctagttcgttatacccggcagggactgcactggcttcgccaggatgccaagttgatatcttgaactgaacacattctcgttgcctctgattttctccacaacactgtgtcacatcacgaaggaaaactgccataacataccacctagtcgacactaagaatgaggaatagttttctcctcgttggttcatgtgttgttgtttttgataatccaaagcgatcatgtcagttggccctttaatatttccaatgtgaaagattatttaaatgcttttaaatctgcagcacattgataagatggtttccgtgagctatgataagattgaaattccagttgcaattcataactaatgaattgaaattttatttattttaatttttttaagttcccagattggggctagtttaagacttagttatttctgcctataaatttactctgttgaatatttagcataaatttaatgtagacatttttatttatataccttgggagctttattacctaatatctttttgtggtagctgttctaagagtaagaattggttcgtctaaaataaggacatattctttctacacctgctacctgacctgatatttgaaatcttaactccaattttattattgtggaatttacagttagtattaaggatattcttctacacatgaaaaaatcacttaaatatgagaaaatggcattctacatgtatgtactatgaaatgtgtctgatttggtatgcattatttcaaaaactgtgaatgtgtgttaataacactacagcaatcacacagtgactatagcttgcatttaatgcattacaaaagagggaggacaaactttctagaagaagcatttcatgttgaagggtttcataaaaggacaatcctgaacgttacggattttattaaaaccatatgttattttttgttgctaatcatttgacacttaatcgaaacagaataagttactgtggaaaaaaggatgatccaactcctgaggattgccgcctgtgtgtctttaattgattatctttgatagttagagttatttttcagatttttccccctcatactggattgtgatgctctgatatgagcatgcaatgactgatacagaaataggctggagcttcggtgtgtgcttttgctatacagcttacagttctaatgcctgatgtagagatgatgaatttctcctttttaaacctatcttctgtttactccttttgcattatgaaggccctcttcaatgatgtatgtttctgatggaatcagaaaatttcacactagaaaagtgtacctaacttgattcagtgtgagctcttgggacagggagtggagccaggggtagagcttaaagaagctggctctgtaagagttgtatatcaaagtaccttttgctacaaggtgcatatagaagtctaagataagaaatgtaccctctatactttatttttcatgcccctatcatgtttggtgtgccttaaatcttacctttaaatgaagactctatggattgtttacaaatgaagttttacactaggaccagatcgtccatacatgattggtcttctacaataataatgttcaattctttcattttaaatctttctttagggtcatataaagattagttctttcagaaaagctattgctttggtacatgacttagtctaaccagttgggtaatgctgctttgaaaaatagtttgtccctctccccattccaaaaatgaatccattcagtcagaaaaaaagattatcctactatttgtagatgattgctaaggcttgaaataggaaaggggaaagaagggatagaaaagtttcaagtccagtagtgcagtgaatcctttgtgtttgagacttttttacacttatttctgaagttagtgaactttcattgtccctgtggcctcatatttatagagcttcttaactgttttgtacctcagattgtttttagatgtcattgaagattgagatgtacaaattatgttgaatttaacctgtttctcttggagaaattgcctctgatatctttctaacttaatcttagtgtgttctaggaacagttttccataagaggacaacttctcaatgatcatgatagttatttagtaagaaataatggttgttaatcaaatacatgttatgtcttgtccttctctgatttttctgacttggattccttaatttgcagtgatgtcttagaaatggaaaaagtatcctctgggctttcagactttcagcaacaacagccagtgggatacctctgagttcttgtgttctagtctcttgtatgtcctgaaaggcagcaggagcatttttggggtcacactgatattttgttaaagcagagtttcctgcatggtttatggtgctgctctaatattttctctttaaaactgtgtcaatttttggagaatgaatttttcaaccttttcattgtggaggatttttcccacaaggtagtaatgggcaatggatcaaaatcctatcataaatgattgaattttcaatgtcatagtgtgtggaaatactactccctttcctccatgtctatcttcttagatgttctgtctttgtcatcatctgctccagcacatactttggactcctttacaggtgaccttcccccctccctcctcaataggtgtcctcagtgttttctaagcatttaaaactgaatttgacaagtggctaaaaacttagtctgagacttgtacttagtatatggttaattatagaaacaacaactattttaaacagttactctgttgactgctctttatgactacacttgtatgccaggaggcagcagcctatacaccattagactctttacaagcaaccaacgaaccaattgcagtggttgcagttgtcacagtagtcttgcctgggccagactgggctgggctgtgggaagcattccccttcaggggagtttccacagctcagcccaggctccagtctggctagagagcatccagcccattccttgcctcagtgccacctttttctgggcaagtagccaagaagtgactttatatgcagtgagtacttcagataaacttacagctacagctgccgaagagtggagaaggttgaccaccatttatttaattctctagtgtaaaaacaattgagagcagtgtgcgtgagcccacagacacctgtgtttctgggagctctggcagtggcggattcataggcacttgggctgcactttgaatgacacacttggctttattagattcactagtttttaaaaaattgttgttcgtttcttttcattaaaggtttaatcagacagatcagacagcataattttgtatttaatgacagaaacgttggtacatttcttcatgaatgagcttgcattctgaagcaagagcctacaaaaggcacttgttataaatgaaagttctggctctagaggccagtactctggagtttcagagcagccagtgattgttccagtcagtgatgcctagttatatagaggaggagtacactgtgcactcttctaggtgtaagggtatgcaactttggatcttaaaattctgtacacatacacactttatatatatgtatgtatgtatgaaaacatgaaattagtttgtcaaatatgtgtgtgtttagtattttagcttagtgcaactatttccacattatttattaaattgatctaagacactttcttgttgacaccttgaatattaatgttcaagggtgcaatgtgtattcctttagattgttaaagcttaattactatgatttgtagtaaattaacttttaaaatgtatttgagcccttctgtagtgtcgtagggctcttacagggtgggaaagattttaattttccagttgctaattgaacagtatggcctcattatatattttgatttataggagtttgtgtctgggtcccaggaacatctactggggatgactgttaggcagcttgtgatgatgttttttaaaaaacctaagtaacttggggagacagagcatttcaaacccatatagacacctatcatacctgtatatcccctaatacatggaacataaatttcatttcagctttatgcattaatgtattgaagaggcaggctttttttccagtaataatactgtacatctaaggttgctattcagtaaaactaatagaagagataattattgaataccttggaatatgtagtgagaagaggccaaatttttcatgtttgtgagcatgtctttcagatactcgctaatggagaaattcactttagacctctagaccccaaaaccaagttagcaagtgacaaaaagtaaattattaatagtctgtaaagtggatgctggtcttacaaagctcctattcacatgaaccctatggttaattagaaagaacttgctgtctccagaaaagggaatggaaataataactatgtatcttcttttcatgtaatttggtcacagaataaggtattcaagttaagtctaatccaagtcttagagatctttaagtatcctaaaatagcagcctaagtagtcatcatgtaaagaagttgactttcaggaatgtcagcattgacctctccttgccactgttactcagctaaacataacttgccattcttaaaaataaaaaagctcccacccagaaactctagtgatactcagttttgacctcttactgcttccatgtgggacttcttttcagcttttaaccattggaattttctacctgctatgttcctctctggaaaatatcaatttggaaatgctgcctttcaaatcaatgccatgatcatccatattgttgagtttgttgttggtgttccagaagtgtccccattttacaactttatgcacacacctggcaaatcattaacatgagcattcaacagtactgggatgggtggggtgggggtagggggctcaccaacagaactggccagttgacattgcctgaaaaggcaccacctttaagggccagttgtggggttggtaagcacagttatgaaaatttctatctagcctccgttttgaatggttttaagaaattttgtatatggaggatggaaatgcttatatatttattgaaaatccttttatttgaaattaaaattatttggtatataattgtttgatatttggggagggttttggaggggagataatgtcactgataaattaaaagcctgttgattttgcagaaaggtactgttagtgactgataaggatgcctttgttttgtacatgaaccaaatctttgttttacatttcttttatccaaaatatttaggcatctgacattttcaaccagaatttcaattatatactgtgatttttatttgttgcaatacattacaatttcagaggtactttggggctcaaaagctaggatttctaagtcagtatgtgcatttcacacgataaagctgttaatggtgagcaaagtattatatactaactagatttttccacatctgtatagtatattatatgtattttgtggtattgagagtatagaaagtttagagtgtcaaacatgcgtttaatgtgtatttttaaacaaatttatggcaattaaaatatttggagacaagggtatcacatttcaatttgtaaagatctttttaactctactgtgtcattaagatgctttgtacaatgccaaaccatagttggagaaactaagtttaataaatatcaaatagattttctgtattaaagttactgaacactgtactctttatatttcttcaactctgagcccttttcatgcaattcctgttttgtgtcttaaggtccgttactactctttaaaagtctgttcccaccagctgaggtctcattttctgattacagaaattctgaacttgctggccatgggtccttgtgcatatgtcaaaattcaccttgtcccaacagaaatcttaaatctcttttggtgcttttggtggcttgggctttcattgctttattaaactagatttttctctctgttctgccttatcttcagacagccatagacaaacctgggtgcttcattagatggcaagtgcttgaccatcttttttttttttttttttttttgagacagagtctctctatgtcacccaggctggggtgcagtggcatgatcttggctcactgcaacctccacctcccaggttcaagtgattctcctgcctcagcctcccaagcttgaccacctttgacacct

SEQ ID NO: 117452 - DNA, 1064 bp, Homo sapiens
atgtaattatatgcccgaacagatggaaagtgttgagcagagagtgaggggatctggcttttaagtctttgaactgtaacaaggtacatgacttcttcagttattgtccatctcttgttttgttgttattcattaaaacaaaggctacagattctaagataacaagattatgaattacaagattatagtacttatttagaagaaattgtagctctctgaaaacccatctagtttaagagaatctttacattttaaatgctttcatgtagaaagagctagtagtacttgattttataatgcttaccatgtccatatgaacaagcttcctatttctgttgtgtagcaaagctgtggggatgccttcccctgtttctccaaagctgtcaccaggcaattcaggaaattattcatctggggccagtagtgcttctgcaagtggttcttcagtgaccattccacagaagatccaccagatggcagccagctatgttcaggtcacatccaacttcctctatgccaccgaaatttgggaccaagctgaacagctttccaaagagcaaaaaggtaggtaggtttctggataaacttcaagggatggaattgttagaaggaacttttataatttagttaagtaagcgtttagtctgtatttagttttattatttagagttaatgataatctgtttgttaatagtcttcattgcttagcagttaaacaataaatgaaactgaatttggtcaaaagatacctctcatgattctggtgacaaaactaaactgaaaatagttcttggactaagacaaatgtgcttatattctggcacattaaatgcagctcataccataaaagtaataaaatatatgtcctaccctaggatggttaacagtaaatttggcaataggcataagattacatccaaacatctgtacatctgagaaggttaatgtataagaaagcatgctcatactggatttttaggtatattggaagaaacctgtgaaataaaggagactagggaatgaatagaaatttttttttttttttttttgagatggagtttcgc

SEQ ID NO: 117453 - DNA, 1067 bp, Homo sapiens
tggaaaggaatgggaaactttcaaggaactaaaagaagaccagcgagaagtgggtgtgactggagagataggcagggatgatcctgcacggtctttataagctatgttgtggtttgtaatatttgcagttcagtttcctagtttttgttttttaattttagattgtttacactttggtttggaaattctaccccttcgtaatttttaaaacttcatgacatgttggtgtcctatggataaggtttggattttggaatgtcagcaaataatgagagcctagtcctaggcttcttagccatcttcccctccctaggatgtgtaccacaataagaacacatctgttggttttgcctaacggttaatgttgtggcctatgccatggtcacatgagccagtctcctgcacaatgcaaaggctgtctgtgcaaatctggccagagtttgctgtcctggtaaataagccgcccttttccattggctagcctgcgatgcgagtctttgctgtacctgaggctgttcaaactgaagaaggaaaatgctctgaagtactcaaagacactgacagagcacctgaaggtaagtatgcaaaagcacaaggtccgtttcctaggagacagaatttgtagtctcccatccccatctgagaactgccctcatgtttatgcaaaacacaccaggggaggagctactgtttgggacttttcaaataagtttgaggtttctttgagttttttaatctacgtgtatctgattgtagaactcttatagccatgtgcagcggctgtatttactttttaaatgatcttttgttttcggccgggttcggtggctcacgcctgtaatctcagcactttgggaggctgaggcaggcagatcacgaggtcaagagattgagaccatcttggccaacatggtgaaaccccatctctactaaatatacaaaaattagccaggcatggtgccacacgcctgtagtcccagctacttgggaggctgaggcaggagaatcgcttgaaccctggaggcggaggctgcagtgagccgaggtcatgccactgcactccagcc

SEQ ID NO: 117454 - DNA, 1096 bp, Homo sapiens
actcacattttatttatgcttaatcttacaatcaacttgagtaacttagtatttgatactagggagcttgatttctgttttcctaattaggtttgccatgagttggtcaaaacaacttatgcttttaacctgatataaacatttgtcagaaaatactgaaacaaattcttagtaacagctcattttctttgcttgaggacataaaaactgagggatactagatactgaaatgaactagtattatgaaaatatttactattctatttataatgaaaatttgtcttgcagaaattattcagcagaccattatttacaagaagcaaaaaagctaaagcacaatgcagatgcattggtatgtagatattctccttacacttacgtatttaatcaaattaacttaagtaatcttctgatgtttgtagccatagtagatcattactcattacttgcattctcctttcttcagtctgataggtttgagaaagctgtatactatcttgatgctgtggtatctttcattgaatgtgggaatgcattagagaagaatgctcaggaatccaaatccccattccctatgtattcagagacggtggatctcatcaagtaagtggaaaaacttggcagatcattggcaataacattatttctctggtccatcaaggaagaggctgatatatagtaaactgaagagggtgtataatcctttaatgtccttggataaaggagaagtagatacttcaatgagtatttttgcttttatttaggtttgaaattctaatgttttgaggacaagtgaaatcataagatcaaggtgaagtattctgtttgtcatttgtttgttattgtaactcaacagatacactatgaagctaaagaattacttggcaccagatgctacagctgcagataaacgactcacagtactttggtgagttttctgtgttctagcctctgctagatacaggaagttctataataaatagtgctgtgtgtgctcttctgaatgttttccttgaatcagacttctgtaatcctgtcttaaatctgttcctgatgggtcaagcaggaagtaactcaaaattcctactgaaaggtt

SEQ ID NO: 117455 - DNA, 1029 bp, Homo sapiens
ttatcttaatagcagtacttatttcataggtttgttaaaggattaacaataatgctaagtacttagttaacttagtgcctggtaagtagtaagcacataataaatattagatgctattaatattattgctgttttcattgaccagtaactaccaataaatgttgccgtaagtagtgctgccattttcatactaggcttttgtcttccttatgttttaacaactgcctaggccagtgcctggcatatagtagacccttatataaatattagaatgaatatttcagttatataaaatggaccctttttttttttaaagtttacattatgaagtttataaaagttttgtaacaaggaaattcattatgaaaggcaatgaaattttgtttcctttttaccagtggctgaagaaatgctattagtttcatttttaatctccttacggttttcattgtagttatatatttttttggtcaggaaaaggctccaagtagctcctctaactgtcctccatctgcaccaactcttgattcttctaagcctcggagaacaaagcttgtctttgatgacaggtgagataatatgattttttgtatctgtatttaagaaatgattccagtcagcatataagaaactcattttcatttctatcattggccgggcgcggtggctcacgcttgtaatcccagctcttttggaggcccaggcaggcagatcacgaggtcaggagtttgagaccagcctgaccaacatggagaaaccctgtctgtactaaaaatacaaaaattagctgggcgtggtggtacacacctgtaatcgcagctattcaggaggctgaggcaggagaactgcttgaacctgggaggcagaggttgcagtgagccgagattgtgccactgtactcccgcctgggcaacagagcgagactccgtctcaaaaaaaaaaaaaatctatcattgatcagaaggatatatacttacgtatgatctgcagaatattcaggtttcaatttgaaaagtacccactagtcca

SEQ ID NO: 117456 - DNA, 1086 bp, Homo sapiens
gcttgaacctgggaggtagaggttgcagtgagctgagatcgtgccactgcactccagcctgggcgacagaacaagactccgtctgaaaaataaataaataactaaataaataaaattaaaatttcattgtggtaatggttgtacaactctgaatataccaaatgttatggaattgtgcacttctaaagagtgaattttatgttatgtaaattatatcttaattataatttcacagatactacctcccaaatcattacattgaaaagatgccatcttagagactgtaggaaatgcgtttcagtctctgggttttgtgtatctaaaataggcgacctcagccttaaaacctcatcttcttgaatattatttaaatgaattatagtacttctcttttatcttctttctgatgcctaatcatggataaactctttgtgggtagctagtgctggaagctgaagttagttgaataaaaatcagaccacggtttctatttttcatctagaatgaagatgataaccgagccagtgagagcaagaaacccaaaacggaggacaagaattcagcaggccataagccatccagcaacagagagtacgttcccaaaacatgttgcatgccagtgttgttaatatatgtatatcatttgatagtgggtactttctgacatgctctgagtgttccttttagtaagcaagtgttatataaatgcatacacataacatatgccaaatagtgggagctttcacttttagctaatagggatggaaaacatttaacatttaattagttcttcctttattcattttttattggggtaggggtgagtatggggggagaattaaagtaaagctatgccactttctggttagatggcaaacttatctgtaatttccaagagactggttgccaacttaaaagtggtaatctcttcattcaccattcatcaatttgttcaatcattcagccaatatttattgagtactactgagtggtaggtcagtttttggccctggatttacaaccacgggaataaaaacagagaagatgcctaccttcatggaatttacagtcttattttgttttata

SEQ ID NO: 117457 - DNA, 1851 bp, Homo sapiens
cagtggctcagttttggctcactgcaacctccgcctcccgggttcaagtgattctcctgcctcagcctcctgagtagctgggattacaggcgtgcgccaccgcatctgactaatttttgtatttttaatagagacaggatttcaccatgttggtcagactggtctcaaactcctgatctcatgatccgcccacctcagcctcccaaagtgctgggattacaggtgtgagccaccgtgcctggccacttatcttcttattcagatgataagagctaatagtcaatactcagccctttgctttggttcatagagaaccatttgcttttgttgcattaggcattgtggtttttcctcttctttgaggttgtaaaggagggagaacgaaaaaagcattcagtatcgaaaaaagcatacatatttctctgtttttcagcctgaacccccgccaacaaacaaatggcaacttgataattggctgaataaagtgaacccacataaagtgtcacccgcctcttcagtggacagtaacatcccatcatctcaaggctacaaaaaggaaggccgagagcagggcactgggaatagctacactgatacaagtggacctaaagaaacgagttccgctactccgggacgagactccaaaaccatccaaaagggatcagaaagtgggcgtgggaggcagaaatctcctgcacagagtgacagcacaacacagagaagaactgtaggcaaaaaacaacccaaaaaggctgagaaggcagctgctgaagagcctcgtggaggcctgaagatagaaagtgaaacccctgtagacttggctagcagcatgccctccagcagacacaaagcagccaccaaaggctcaaggaaacccaatataaagaaggagtctaagtcttcccctcgacctacagcagagaaaaagaaatataagtcaacaagtaaatcttcccagaaatcaagggaaatcatagaaacagatacctcatcctcagattcagatgaaagtgagagccttcctccttcctcacaaactcctaagtaccccgagagcaataggactcctgttaaaccctcctcagtggaggaagaagatagcttttttcggcaacgaatgttctctcctatggaagagaaggaacttctttcacccctcagtgagcctgatgacaggtacccacttattgtgaagattgacctgaatcttttgactagaataccaggaaagccttacaaagaaacagagccgcccaagggggaaaagaaaaatgtgccagaaaagcacacgagagaggctcagaaacaagcctcagaaaaagtttccaacaaaggcaagaggaagcataaggtttgtgaagggtttttgttgtttgttttgaaacatcagaatctgaaatgcggtggaaatctcagtaagccacaaagtaacaaggtgggtcataagctgtgaaggaaaatagtgggtaaacccaaggcccaggcgaggctacatgtggaacagtctcttgaggatttctgtgcttctgcctgtgtccttcagtaaagcagaatagttgctaatgaaataagaaatgagtcagtgcttttcagcatgtgctggccagtgtagaggttagagagcagcagcttgcaaattggcatttgcaacattctcaacattttggttttaggtgtttttagtttggatatgtactccccgtattgttataatccctaccattctcttctgatgtacacccagaccaagtcacacttaaataactaatctgctatgcacctctatgccccagcttattttccttaacaaaggtcagaactaaaaatattgctggcttatagccagctgtc

SEQ ID NO: 117458 - DNA, 1074 bp, Homo sapiens
taaaagctttgacatattcacatgtgtaaacaagttcattgagctgccattgttaaatcataaaggccgagagaattcagactaagtacatttccttagaggaaaatcagtcgtagagatagatgcactaagcccctgtctgaaagaaaactcttttttccctgttctgtttaattgggccagtcttaaaaatcatctggttactttatttcaaggtggtgtttaatatgtaatattttgaacttagggtcagatatagaaatgttggttaaactttgaggaggaaaagtacaagtagttaatagagtgaaagaagatttccttctcactgattggagattgtaatgaaattttaagaaaggtaatggaattactgataatgagaaattagacattttcctagttgtagttctccctaagctttgtattaatttttcctcccatgtaaaaagacaaggaatgttttgtggactgttacatagaaaattttaagtttaatggttttgattttatggccttaaaagaaaatttacatctttaattttgctttcaaaaacaaattccagaaactgtcagcttatagtatttgtgtgtatgtgttttaattgatttgaagtttgatcaacggagattttggaacttgggagttttttttgttttgttttgtttttttgagacagagtctcgctctgtcgcctaggctggagtgcagtgatgggatgtcggctcactgcaacctccagctcccgggttcaagcaattctcctcctacctcatcctcctgggtagctaggattacaggtgcccaccaccacgccaggctaatttttgtatttttagtagagacagggtttcaccctgttggcctggctggtctcgaactcatgacttcaggtgatccgccaacctcagcctcccaaagtagtgggattacaggcatgagccaccgcacccagccagaacttcaaagttttaaaaatatatacatagccatttctgctatatagccaggacttttacccaaaatatttatttctacagagggcactttgtttcatagcaaggcatttatga

SEQ ID NO: 117459 - DNA, 1092 bp, Homo sapiens
gaaaatagctaactataggccagagaatttacattttctctcttctttttgtttccttttttttctcagcttgttttccctagtcgtcatcttttaagaatgcttcatccttctactcttctctcattctcttttctgaaagctgttcacaaatgggatcataagctgcctctactcattatttgtgtttttcactttgttttagagctatttctatatcagcataaagctctagctcattgtttaaccttaaaattatgttataatatgaaaatatcttaatttatttcactagtcccctatcgatggacatttttttccagtttttgccattacaaaccaggctataataaacattcccaagtgtgtgcttgtgtgttcgtgtattcctcaagattatacctgtaatgtaaattcctttcattggaattattaagtcacttagcaatataattacagtactgagaaggtattaccagattgcccttcaagaagatcgtatgagtttatagtcctaccagcaacatatgcacatgcttatttcccctgtagtcaccagtatctcatattattgggcttgaaggtgttaccagtttggtggttgaagaattatatttcattgtttgatttacatttatttgagggtattttacatagacattttacagtctaaatagccatcctttagttgctcacttcattctttttgttccagaaagatataatccttctaaaacttcaaatgggcaccagtctaaatcgtaagtttattgcttaatgagtttaatatttatcatttttgctaaaagttacctgtaatatctaggtattttgaacagtatttagaaatattgaggctgggcagggtggctgacacctgtaatcctagcactttgggaggccaaggcaggcagatcacgtgaggtcaggagttcgagaccagcctggccaacgtggtgaaaccccttctctactaaaaataaaaaaattagccaggcgtggtggcgagcgcctgtaatcccagctacttggaaggctgaggcaggagaattacttgaacctgggaggtggaggttgtagggagccgagatc

SEQ ID NO: 117460 - DNA, 1718 bp, Homo sapiens
gtggtatacttttttttttttttttttgagatggagtctcgccctgttgccaggctggagtgcagtggcgcgatctcggctcactgcaacctccgcctcccagggttcaagtgattctcctgcctcagcctcccgagtagctgggactacaggtgcacgccaccacgcccaactaatttttgtatttttcgtagagacggggtttcaccatgttggccaggatggtcttgatctcctgacctcatgatccgccagcctcggcctcccaaaaaagtggtatacttctaatggataaaggttatacagctatcttcacctggtacactgtcttcggtattacctttagttttaaatgaagtgttttcttaagaccaagaattttaaattgaaattagttattttataaagggctctaaataaggatatgactacaatggatgctgctgaaagaattgaatgataaagattattaggtggcttaatgctttttgtattaatctctgggaaagtccattattgatcccaaaattgccaaggctgatcagacaggatcattacattctttctgtgctttttcaagtacttgaagtgtttttatgtaatttaagcatttttcactaatctttcttttttagtgtaactttgtataattttatgttcctttttcttaggagtctcagcagtccaattttggcactggagaacaaagtgagtatttctttccctctttgttttcaaattaagctatttattgaacattcagttttcatggtcacaccatatataactttagtaatacctttacatgtcatatcctttttcatttttgttttctttttttttttttctggagtgtagtggtgtggtcgtagctcactgcagcctcgatctccagggctcaagtgatcctcctgcctcagcctactgagtagctgggactgtgggcacatgccactatgcctggctgattttttaaatttttagtagagatagggtctcactatgttgcacaggctggtctcgaactcctgagctcaagtgatccacctgcctcgcctcccaaagtgttgggattactggtgtgagccaccatgccctcgtatcctaatttttatgatctaatgggtagtagtgggttgagctgaaaaattgttatgctttaaaaaattcaagaactgtaagtcattggagatcaaaatacactacttttattaagcatttgaactaatagttcatgaatacaatttgatgggcacctcgtaaactcaagagttattcttctttcttttaacttacttcatgaagatacttggctctatgatgataaaactccgcacaagaagggtcattttatttagctgaccatggcccttttcttcttatatttgtacagtccctgttttttcttccttggttttctgatctgggtagaaaatctgctgcctgctataccctcacctttacccttactctcttggcctgtcagaagaattctagggaagatagtcttatggtcccaagagattgtggttgtgtagattgagagtggtaagatcaggaaccaatgcaaatgtctgggctttaccgtatacctctgtaacaaaacaggtattctttttgccaagagcagtaacttcttaattaaggtagatttgtactagtcataaggtattttggaaatgaaaatgtggaactttttgatccttagtttatcttca

SEQ ID NO: 117461 - DNA, 1028 bp, Homo sapiens
gtaaaacacttagcacagtgtctggcccattcaaggtacacagtaaatgttagctgttttccttatcattgtcccttcctcccactctcctagcaagctcttcctgattagcgttttattatgtgccttgtatttgattacaggctgatttctgtaactattcacaggtttcataatttgaattgtaaactcctcaaagccagggagcatttattaatcttcttattacctacaccatagtgcctagcacacaattgtgcttaatatttattgactaagtatgtagaattttggaggagctgtcatgaaaccagtatttataaatacaaatctggtttttagctgtataatttttatccttgacctggttgaaaacaaactgtaataattacatttcaggagatgacgcattcatggcctccccctctaacggctattcatacaccatgcaaaacagaaccttccaaatttccttttccaactaaggtaagtaaataaaatgtatctttcataatgtaagaaaactctaaatggcttgactaaaatcatatggattaaaaattgtcttgccattcctattctagtgggagacagacagtaaataagtgaataaatagataaattcagatagtgacaactgttatgaagataattagcagggtaatggaactgagagcatcttggatcaagaggtattaagaaagctttgaaggcaatatgcgagagagatttaaaagacattaatacagccggacacggtggctcactcctgtaatcccagcactttggaaggctgagccaagagactctcttgaggccaggagtttgcgaccagcctggtcaacatagcaagaccctgtctctaccaaaaattggaaggaaaaaaaaaaaaaaaaaaaaaaaaaagcttggcatagtggcacaggcccgtggtcccagttactcgggaggctgagatgggaggatcacttgagcctgggaggtcaaggctgcagtgagctgtgattgcaccacagcacgccagcctg

SEQ ID NO: 117462 - DNA, 1300 bp, Homo sapiens
accaaaaagtacattactctattggaaaaagagaaagtccagtgaattagtgaatgacaatgactactttttgcttagtagagaaaactgtcagtcacatattacttgtattttcttttttatttttttttgtgagctcctgaatttgtgtctatacttaaattcactgtgaacacctttgaaagactacctgcattggttgcttccactcttttctttcccattccttcctttagcccactataatctcccttttacctctgccattttgctgaacctgtttctctatggtcattatctttctccctccatccagaggcatcatttgagttcttttttattctttctgctatgtattttttccttctgcaaacattcttctttccttgactgtttttatgcttcattgtttttatttgccttccacctttcttgcctctctttctttgccctttttggaacccttgtgccttctcttgtttcttaagtgcaggtgcattcttctagcctctgctctttgacttgccttttccaccattcttggctttatctcttagacagctatttagtctttctgtcctacactggcctttgggttttggtttgtctcttaattgcttcttagctgagtttccatttggatttatttctctttgcctcttcagactcaacatgtctaaagccatacttatcagacttccttggattagtagtacaccgttttcccatgcttgtaactgtagaatcctaaatatctctaatttcttcctcatgttctatgtagttgcaaaactagatgtagactttaaaatttttgctttttaaatatccattcctttcttcccgtttctgccgccttgagcttcagtaattataacagaggcctcattcagcctttctgcctccagaatctccctactcatatgtcttttgcattgctacctgattctttacttcaggccctgtggtcttcataaattaatttttccctaaaaattttcagtggctctctaagattatagaaagaatagtatccaaatttaatatccgcaggccaatcctaacctctctcattactgactgaccgcttttgctaaactggtttccctaagccacatacattctttctcttttacctccttaaataaagtaagcttggaatgtatttctcctccctcttcagttatatatagattttttttccctgtaatcccaatgaaatacttcttcccccgtatcagattgtgagaccacagtgatagctctttcatttgaatctcattcatttcttagttgccat

SEQ ID NO: 117463 - DNA, 1972 bp, Homo sapiens
caggtgatctgtccgtcttggcctcccaaagtgctgggattacaggtgtgagccactgcacctggcctttcaaaatactttgtgtatttaaaagacagtcttgctatgttacccatgctggagtgcagttgctcttcacaggtgaaatcatagtgcactggagcctcaaaatcttggaattgagcaaacctgcctcagctgcccagagtagctgggagtacaggcacgtgccactgtgctcggattatattttactatggttatttttaggcacttttcaatgattttttttttcactacagaaatgatatatttggagtttgcttcaaggtattaacgttaagatatgaggtaaagcctccctttgaaaagcccctttccattcgaagtttggaaaattagttcagaattatattttatttctgattatgctcattttataattttattttattttatttttttgtagactagcaaagaagataagttatcaagtcgtattcagagtatgcttggaaactacgatgaaatgaaggatttcataggagacagatctataccaaagcttgttgcaattcccaagcctacagtaccaccatcagcagatgaaaaatctaacccaaatttctttgaacagagacatggaggctctcatcagagtagcaaatggactccagtaggacccgcacccagcacttctcagtctcagaaacggtcctcaggcttacagagtggacatagtagccagcggaccagcgcaggtagcagtagtggcactaacagtagtggtcagaggcacgaccgtgagtcatataacaatagtgggagcagtagccggaaaaaaggccagcatggatcagaacactccaaatcacgttcttccagccctggaaaaccccaggctgtttcttcattaaactctagtcattccaggtctcatgggaatgatcaccatagcaaggaacatcaacgctccaaatcacctcgggaccctgatgcaaactgggattctccttcccgtgtacctttttcaagtgggcagcactcaactcaatctttcccaccctcattgatgtcaaagtccaattcaatgttacagaaacccactgcctatgtgcggcccatggacggacaggagtccatggaaccaaagctgtcctctgagcactacagcagccaatcccatggcaacagcatgactgagctgaagcccagcagcaaagcacatctcaccaagctgaaaataccttcccaaccactggatgtaagtcacacatttagagcttttaacattgtgactacgtgaagcaattgactgatcatgaaattacgattgaacttgaacactgcttccttgccttaatagtaaggaatgtaaaagttgaaagatgaaaaaaatgtaaagacagacttgtgagttactcccaagtggatgcgtagatctgttaactcgtcctcttgggaaatggagaaaatgtcattcacagttttcaaatacttagatgacaagtcagttatagaataaaagaatgactaattgatatcttagatttctgcattttgattttatagaacaatatacctttgttgttgtttaaaaacaaaattaacttttctatgcttagattgatactaatgaatgagatgcaggtgatggtttatggttatgataaatgggacttttgggtctgtggaaatagtaatattgtatactttgaatgctatgatccttttctctggttatacttaaaggattaagacagctgctccaggttcatagtgatggtttgaaatttaaattgaattgcttaccaaagcattttggaacatttcattgtgaaatagctgaaattatatctttttttttcaagatgggtgtctcataatgttgcccaggctggtctggaactcctggcctcaagcgatcctctcatcttggccttcaaagtgctaaggttacagacatgaccat

SEQ ID NO: 117464 - DNA, 1352 bp, Homo sapiens
tgatttatgaattataggccagaaatgctccacacatataacctgattgtttctttctgggctccagtgagcctttttttttaaaaaaaaaaacaaaaccaggtctgattatttaatctgtctccagggaagagtgttgcagattccctggtaatccctagtgccagagtttgccagcctttactaccattgtctgtttaatcaaaatccttgctgctataaattggctgtatttctcttggtttgttctagtgaaaataagacaaactgtcctgattatagagatgggacttccattttcccctcactccaaagacttcctttttcaatacaagtttagttgctgttactaatccaagttaatttttgattctatcactgaaaacctgggttttgccatttattgaggtgttaattgaaatattaatatatttagagcagaaatgtcgttttttagggaatctagagcaacagcaaagctgaggtcaaactaccgtaaggatggacaccaaggaagctgtgtttgggacaaaaagaaatcaagataaggtagatgcaaagtagagaaaagaactggaccctggggggaagggtggtagttgggagtgggttatatgcttctaagggcaaagaataggcagatttctgaagaggagggcccaaaaggaaatactgaggatttgtgttcaaatactacgttccctctgaatgtacaagtttttgcttttagctaacagagtacttcaaacattgataaggttaagtgttttgttggggtgggttctaatattctgggctagtgtttccttggaatagttgtggaagacactattggtatttgttgataaaaccattaccaaaacccagcttcagcactaatgcctgttattacttggaggtcaaaagggaatctgtgattgaagtgttaagctgacaaaatctgtacagaatatttaatttttccttttatttctgtgatacaaagattgtgtttcttttcatagcaacatgaaccgtgaagaccggaatgtgctgcgtatgaaagaacgggaaaggcggaatcaggaaattcagcagggcgaagacgccttcccacctagctctcctctctttgcagagccatacaaagttgtaagttgcccttctgtgaatgtttttttcccattagcatgacatttttgcttttaaaatgtttcacacttgaatgtttatattagaaaagaattactatgaataccacttaacatttttttcctgtcctttacatagaagatattttttggggataaacttttctttggagtatattatgcttacagaaaaatacacaacataggtattatggcttgaag

SEQ ID NO: 117465 - DNA, 1576 bp, Homo sapiens
atgtggtatgaacatttaaggcagctgatgccccaaacaggcaaagtcgaagaaggtggcctgcatttggaggtgattttgcatccaaaaaggaattcgctttcttgatttcaatgactgaacactgtaaaacatgtcttcttcctcaaggccaatgatgcttcagataccaggtggtttcatctttcagtcatggtctatagagagggttgcattgggccaaaattgcaatcagccaaaagagagtggcaaactgaacaggtcaccatcatggtgatgataactccccagttaggccgcttagtgacgaactagggcacaaagaagccaacaaagccccagaacatgctcgtcactgtgaggccatgataacgctgtgtttgctgctggagctgcctctctctgatttttagtattgttttttaatctttgtccattaagacaaggttatttgtgaatgaaaattaggattgtggggagtcacagaacttcgtgaaatacttgtgaggaatgggaaagaacattcatcagagaaaaacagtacaatttcactttgggaggctgaggtgggcggatcatgaggtcaggagatcgagaccatcttggccaacatggtgaaaccctgtctctactaaaatacaaaagattagccagacatgttggcgggtgcctgtagtcccagctgtttgggaggctgaggcacgagaattgcttgaacccaggaggcggaggttgcagtgagccgagatcgtgccactgcattccagcctggcgacagagcaagactccatctcaaaaaaaaaagcacaatttctgggaaactttgagggacgagttgagaatgatttatgaaatacagtaagaaattcacataatacataaggatgtgatgaagaaagcaaaaatgtgtggaattgttatctttgttttcacgtttttcactacattattttaaacctgaaggctatagaagtctcatgactaactttggggcaaaggtccttctgtgctaaatattgtcttgggacctgatgttttgttattggctttgatctgtaggtgtacaacctttgtttccctgacttgtaggaagtgacctcttcagactgtctcatgggtagagaaattctaccaaatgaggccaagagggatttatgtactgttgaggctttgtgctttagcatagtgcattgtggtaaagttacagtttaatagcagttgtaatatactgggtttgaaaataattgaaatattagctcaaatctcattttgactttcagagtttaaatcactcaataatcttatagttgaatgactctgtttttcagtaggatagttattttaagacactaagtgaaaaaaacaaaaaacaaaaaacattgtaacaaattctgacctccacttgaatgggggatgttagaatacacattttacactaaatagttttaattttttgttttcgaggcagagtcttactctgttgtgcagcctagagtggagtggcacaatctcggctcactgcaatttttgcctccgagattcaaatgattctcttgcctcagcctcccgagtagct

SEQ ID NO: 117466 - DNA, 1018 bp, Homo sapiens
ttgatgggtagcacaactgttcactgtattggtccttatcttttagggtaacattttataaaatgagtggttgctgaggaggtggagaatcaccaaaagtccttttgagaagcttggctggagagagatgtggggccaatgaagacttttttttttttttgagacggagtcttgctttgttgcccaggctagagtgcagtgtggcgatctctgctcgctgcaacctctgcctcctggttcaagcgattctcctgcttcagcttcctgagtagctaggactacaggtttgcaccaccacgcctggctaatttttgtaattttagtagagacagggttttgccatgttggccaggctggtcttgaactcctggcttcaagtgatctgcccgtcttagcctcccagagtgctgggattacagcagacatgagccaccatgcctggcctttgttaaaatttttttaaagaagaatatgtttgaatgctgatggaaaggattcgtaggattcactagagatggagaagttgaagttgttggagaaaaaatcgcaactgctaaaggtctagaagatagcaaaatgaggataattgttctttgttaggaagattcgagtttttttcctttgtcactgggagggaagagaatagatgtagacgctgatagtttgaaagttgatggttgattgataaaaatatttttcttccattgttttttatttttattttattttatttttgacatggagtctcgcaccgtcgcctgggctggagtgcagtggcgcaatcttggctcactgcaacctctgcctcctgggttcaagcgattgtcctacctcagcctcccgagtagctaggattacaggcgcccaccaccatgcctagcttgcttgcttgtttatttatttatttattgagatggagtttcgctcttattgcccaggctagagtgcaatggcacgatctcagctcactacaacctctgtctcccgttcaagcgattctcctgcctcagcctcccag

SEQ ID NO: 117467 - DNA, 1813 bp, Homo sapiens
tgataaagagcctttgtggtctgtgagtctgcctagaatcatctttggtcatacgtgcataaagaagtgttggcaagtggccacttggttttcaacaaagctggcttctttaaatttctcagattcgttttccttattatcactgcatctttcagctcctaaatataagaaaaattcccagtaagttattttaagttatctttcagagttaacttactaaaaacctggaagcagtcaaatttttctttttttattaccagcagtttcattcaatttgcggtggtttgcaggctggtactttgatttttgttaactctctagaaacagtaggcaaattttactttaaataaaattttgcttcaagtggggacaagatggggtgtctgaaaaaagagcccagctgtgttaattggaacatgatctacagtttgggagtgtaaggtgaagctgtgtaattaagaattcttaaagattgaatatttttgttctgagtcactttctacttgtcagattctcacattcaggttgatacattctcttctgtgtactcttgagttattgtaccctttttgtagcaatatattctgcagccgggcctggtggttcacgcctgtaatcctagcactttagcactttgagaggccgaggtgggcggatcacctgaggtcaggagttctagaccatcctggccaacataatgaaaccccgtctctactaaaaatacaagaattagccaggtgtggtggtgcacacctgtagttctagctacttgagaggctgaggcatgagaaccaaattagccagacatggtggtacatgcctgtagtcccagctactccagaggctgaggcacgagaatcgcttgagaatcgcttgaactgggaggcgaaggttgcagtaagccgagatcacaccactggaatgcagtggctccatctctgctcactgcaacctctgcctcctgggttcaagcgattctcctgcctcagcctcctgagtagttgggattgcaggtacacactaccattcccagttaatgttttttgtatttttagtagagacggggtttcagcaggttggtcagactggtctcgaactcctgacctcgtgatccacacgcctcggcctccccaaagtgttgggattacaggcatgagcactgcgcccggccaacctaggcgatgtctcaaacaagcagaagcctactatatgttttgcactgtaattttctttttttccctgtctcttgcagatattgagggatgcataataattttcttacagatctgttacagggtctttgaggaagtactatatttattcctctttttatcttcctcagtattttacacaattactagattgaatttgaatgtgataatattttgaacttgaaattgttgttctatcaacttatctaagatttcacaaaaaggtaatgtaaagaaagctgtatgagcaaaggatcagtatttgaaagggaaaaacctgtcagtttcagaagatgagacagaagatgaagctttctaaaagttatatattttgccttttttgagaaggtaaggtaaatgccgtagttttatgtgtacctgagaggaacaaataaaacaggtatttcttcctttgtggccatccactggtttagaatggagttcaaaatctatgaggacttttctttgtggtatttttaataaaatcaaagaggtattcttaagtattgagagcacacctggacaatgacccagaagtacagcatgtactataaaaaattgatgacttagatttttttttactttagctttattctacagat

SEQ ID NO: 117468 - DNA, 1108 bp, Homo sapiens
ctggaggtaagaagggccgacagactgacccagggccgggccgggccgcgggggttgtggccggggccgggtgggggtgggggcccgcaagttctgcggggagcctcggggagaccctccgggctggggctgctcaatcaggcgtcacccctcctctcatctgcgcgtcccaccccaccaccttcccgcaaagataagaaaataaaaaaagctaacccaatcctaacaaaaattcccagaaatccatccgtttagtgtttctcctttcctctttctttcctcagacgttccatcggctgatttgttactttttcatatcctcctcaatttcaaattatgtctaattaaagagaaaataggcccagattctggctaacattacccagctagttctcgctttccttctcgcgatcctgcgcacctctcccacacccccacccccgcaaaaaaaaaaaaaaaagaaggaaaaatttccgccttcgacttgcgaaggggattgactaaaaatgggaacgtgggggtataatactcgaataccctcccctacaacttctgaatcggtctgttacctagttatcccagtagcttgtgcgtggatattgatgtttaggcctttcctccagctgcctgtgcttggggttaatctcgtaattgacgtcagtgctttgttccttctactttgctgttccttccactctttgaggatggatcatggagtacaggagttttgggagtaaccttattgccttttcgtttacaaacagtattattttcaggaagtggaagtacgaatctgaaatgtttgtatatggagttcaaggcgaagagttcgatttagggttctcgtagttttgtcagttgtaattcagaattatgcggtttcttccctgctggccacatggaaattttatactaaggccagtcacttttccattgaccagtgtttttcttgatggaatctaagctataggtgtctgtgaatagactgtaaatgtaacataaaatgtgtgctgtttttcgggctcagatatgaaaagcgcaaagcttcgtttctgtattgattctgcacttcataaagtgctttttaaaacttaactggtctttaact

SEQ ID NO: 117469 - DNA, 1050 bp, Homo sapiens
ccaccaccacgcttggctaatttttttgtatttttagtggagatggggtttcaccatgttagccaggatggtctcaatctcctgacctcgtaatccgcctgccttagcctcccaaagtgctgggattataggtgtgagccaccacacccagccggaaactcctatttttaaaaccatcagatcttgtgagatttattcactatcacaagaacagcacaggaaagacttgcccctatgattaagttacctcccaccaggtttctcccacaacatgtgggaattcaagatgagatttagatggggacacagccaaaccatgtcattacacttattatactttgttgtattaaatctcacaagggtaaaatgttgatttttatgaattggaccataagagtaaacataattttatcctttatatttttttatagtttttagggtgaaagtcacaagacagaattttaaggcttgtattctgttttttgttctgtagtgaagcaaataagcaacatgtaagatgtcagaaatgcttggaatttggacattggacttatgaatgcacaggaaaaagaaaatacctacataggccctcaaggacagcagaactaaagaaagctttaaaagaaaaagaaaacagattattattgcaacaaaggtaggtttacatgtggtatccaaaggaatatttttttaatgtgtatatagaatttattaaaggaccaaacgtttcatggtggttctccagattttaattataatgttactaatgtttaatagatgcttactgtgtgccaagtactattctagggtctttataagtattagcttatttaaacctgatatctacactattaaggtaggtagtattattgtcttcattttacatatgaagaaactaaagcaaggagatgttgaataacttactcattgtcatacagctagtaagaagaaaaagtaagtgttaaatcatgcagcctgtcccccagattcatggtcttaatcattttgcttttttgcctcaactgtcaatgaaatgacaattgaattaac

SEQ ID NO: 117470 - DNA, 1897 bp, Homo sapiens
acatctctatgcagctgtgcagcgccgcaggttccatgcgcaggctcggttggctaaatgcgctttccagccatctttcagccacccagtcctttcccaggttctcgagccaggacgtgacgtattcagacgtactgggggcggggcctcaaggggaaaagcgcctgagccgggatatcgcgagaacatcccgttctttcgtagctctggtgctgcggctccgctctcgtcgcaacgagatctttcgagatcttctccgcccccgctaccggcgcctcctctgcggccactgagccggagccggcctgagcagcgctctcggttgcagtacccactggaaggacttaggcgctcgcgtggacaccgcaagcccctcagtagcctcggcccaagaggcctgctttccactcgctagccccgccgggggtccgtgtcctgtctcggtggccggacccgggcccgagcccgagcagtagccggcgccatgtcggtggtgggcatagacctgggcttccagagctgctacgtcgctgtggcccgcgccggcggcatcgagactatcgctaatgagtatagcgaccgctgcacgccgtaagtgtgggccgggcctgccgcgtgcactggggttaggagataatgcttgttccagtctgggaccctcgctgcttggggaacgcgggccgaggagtcgcctccgttccgagccgaggtcccggtaggtcagggacccccagtaggtattaggacactaggggccgcggcccactatgagcgtgggtgtgtgctaagcgcgagggccttttccccggtggcccgtcggccgaagaaaggcttctggccggtactcggaccagcggagggcacgggtaggaactggaaggactgcaggcctaggatgtaaacggatcgcggtccttttcttgagggcagagaccaggcccaggtcgtactgagtcttttgagtccaacagaaagctcagaactttgcacacagcaggcgcttaataatagttgaatcgaacgggttctggggcttgccagccgcgagaccgtggagcggtcagcgtcccacgtgagtgggggcggggcagcgcccggaagagagcgagctggagcagcctcaggcacgggttccggatggactcggggtcttgagattgggttggcacggataggaatttaataaaatcggtgctcttatgataactttgcaatcgcttttgttttccacattatttcgggatattgtgctatattgggtcactctctgttttgtgcgcgttaacccctcaatagggttgcactttaacgataatgcattctaaccagtgtgttggccacaattgttagtggctcaagggcccgccttgacttctagaacccatagtaagttttgggaccagcatagacacagttctaaaaaatggtgggtcactcaggtctttcactggttacagtgtctgccttttgaatacttgtagatacattttaatccgttgtcgtgttcttagacaaaatcttgtaagaagttctgtattatttgccattcagggtctctcttctttttttttttttttttttcttttttgagacagacagggtctcactctggctgcccaggctggagtgcagtggtgcgatcttggttcactgcagcctcgacctccctggctcctggctcaggtgattctcccacctcagcctcctgagtagctggcgttgcaggcgtgcgccaccatgcttggctaattttatttatttttagtagaaatcgggtttcactatgtcactcaggatggtctcgaacttctggactcaagcagtcctccagcctcggccttctggagtactgggcttacaggcatgaaccaccgtgccctgcccaggggctcacttg

SEQ ID NO: 117471 - DNA, 1054 bp, Homo sapiens
gtgatatatatgaccccatacaccacggaattgtgataagaaaattccatttaaataattttccttacatgttttctttatattttccttcatagttttcattaacttacaggcatgccatacatttcaagtgatttctgaactgtatgattttgattcactttgattactctgttttggagtcttgggctaaatagaaaatggtagcaggaaggttgatttttttttttttttttttttttttttttttggtagcggttatggaggaatggatttggagctcatatgtaaaaaagactgcatgttgtgggtttgttttaacatgagagtggaaatgagatgcaagtcttagagggtttatgatggtggaagtacctcgtttcagatatgggtgtaacaatctggattaggtttttgaggagccagtggagtctcatccagaagagacccttgattttccacccaatttaggcttccttcattttatcagatgttgagtgcctctgatgtggtagccatttttctaagcactggaggtactgtggtgaacaaataaggtcatgccattatggacatggctggtggattaaaccaaatactaaacaaaaatatgtagtaattactaactgtggtaaagggcaaggtggaaaagtacagaatacagtgagagtatagaataagcgggtctaatttaaattggatggaaggacctggcacgatagctcatgcctgtaatcccagcactctgggaggctgaggtaggaggatcgcttgaggtcaggagttcgcaaccagcctggccaacatgctggaaccctgtctctactaaaaatacaaaaattagctgggtgtggtggcgggcgcctgtggtcccagctactctggaggctgaggcagaagaatcgcttgaacctggtaggtggaggttgcagtgaaccgagatcatgcactgcactccaacctaggtgacagagcgagactctgtctcaaaaataagttgggtagaaggtgctttgaaagaagtaccatctgagacctgaggatgagtaggatt

SEQ ID NO: 117472 - DNA, 1205 bp, Homo sapiens
gttttttgttttgtatttttagtagagacagagtttcgccatgttggccaggctgatcttgaactcctgacctcaggtgatctgcctgccttggcctccctaagtgctgggattacagacgtgagccaccgtgcccggtaaacgattactttttatttgggggctggggtgggttgagaaggctttacagacaaaataggtggaatttctagagaatacgtgaaggtactaagcatttcagacgtcaaaagtgacataagcaaagcaggaagattgggatactttattcaacttgtgttgattgtgtggatgaaatacagctggaaaatgggattgggttgggagaggccttaggttccatattaaggaatataggttttatttgttggtagttggttttgtttggaaggtaattagaagcaagacagtttcagagttactgacatagaataggaaattaacccttcagcaggatttgcaggaaagttggggattgtaattattttgaggagataaaggtttgaaaaagggctgcaggaaacaatggaagatgagtaacattgccttttagttatgttgtgattggggtcatggtgggatataccttagaaatttagatctggtggtatttagaaagatggaggtgtgccaattattaggcttatgctaggcagcctttttgaggtggaggaagtgggtaagattgccttgggcaatttcctaaagggtaatatgggctttgagaggagagacatttacgtggtagtgaggatttttttttatttatttgcatctagtgtctaaaacagagattttatttgttttagtgattggtggcatagttgcagaaaggctgagcttgacacctttgcttttgaggggctactcccagcactttctaggcccaaaagcttaggatttggaggaattctgatgaggtcctagggtgtaccatgtttgttcttcctgtcatttaatagaagtcatggcttcctgtggctgccctgggagattggcttacaggggttcttagccattggttgtgaaggaccactgaagcccagggaggcccagcattctgccagtttccacagggctcttaagtttatgtttctaccaaatcagtagttcatctaatttagtcagatttggaccaaggcagtatggttccagagctcttatttactctgttgacttggaagaat

SEQ ID NO: 117473 - DNA, 1004 bp, Homo sapiens
ttctgcatctgtagattcaaacaactgtggatcaaaaatatttttgggaaaaaatacaacactggaacaataaaaaatacaaatgaaaacaatccagtgtaacaactacttacatagcatttacattgtattaggtgttataagtaatctagagacaacttcaggtatacaggaggatgtgcataggttataggccaatactatgtcattttgtctaagggacttgagcatctgtggattttggtctaattcaaggagtgccctggaatcagtcccctgcagatacccaggaaccactgcttcagtgagaagcacctggccttaaaatagcattagcagtataatctgtttaatgcaaactgccagggtgtattttgtccagatcttgttaagcaaggcttgcttgttccttgatattttacatgctccttaagtctgtcttgttgggcctttcatcttactcatatataaggtaagtgttgatcttgttaaacaagtttctcaaggaaggaaagcatacctctagaaatacattaaaggacttgcttttagtttactctgtaaaccaggaacctgacgtagttgctggtttctgaataaccagagcagcagaaccccaagagttctgttattctaagtgtctgagatatctgtaaaattaaggagttgcatgtttgaccttcttatggttcagcctggagcaaccctatagggtgaatctgtttttgaatggggcagggcctaaaatttattagcctaaaaaagtggtgcttggccaattggtttttaattaagttggatgttttatagttcattttcacagtgttcgagatcttttaggagacagcaggtagaaaatattgggccattttgaaatctcttccttctaaaatttgagcaaatcgctcctgttttttaaacctgcttttcatgattgagagacagttactatactaaactggctgcccagttctaggttgatacagttattgtgttacagagtt

SEQ ID NO: 117474 - DNA, 1446 bp, Homo sapiens
catgcctcagcctcctgagtagctggggttacaggtgcgcaccaccatgcctggctaattttttgtatttttagtagagacagcgtttcaccatgttggtcaggctggtctcgagctcctgacctcaaatgaggccctggcttctttcaaagtgctgggattacaggcgtgagccatgacacccggccttaactagaatttctaaatcaatttatgtattgctgagttggttcctggaaactttcaaccataaactatgggcaatttttaaaggctaaaagttattttatgtaaatgtttattagaagtttaagaacagaaaatacttatgcaagtataatgacctgacttcatgggatataggaagagcagggctctatttttagccctgccactctgagacccatgcaaatccctcctccctcacttcgcatgctagtgggcaccatttagaaaagtttagggtctgaagaaaccaaaaccaagaaggagactctatataaagttaaaatgttgctaatttaatctgaggctgttgaaataaaaaaaaaattagtagtagtctttccactctttgatattctttctcttaggtaatttctaatgcaaagaacacagtccaaggatttaaaagattccatggccgagcattctctgatccatttgtggaggcagaaaaatctaaccttgcatatgatattgtgcagttgcctacaggattaacaggtataaaggtaaggttgtcaggttaatgccttttaattaaaatgcattattatattttatcagttcaatatctatctgtacttttctgatgtcagattgcaatgaaaatgcttacagttgcttagggaaagcttttttctagtaaagactatttgacaatttttgaatgatctggatgttggttgggagccatgagtggtgctcttaatatgggttggagacctgggtagtgatggtttgaagttaatactgccattgctgcttgttttgctcactgatgcagtgggctttttagcatgattttagggaatgacttctggaagagcaggcaaagcaatcacagttttttttttttttttttgagatggactctcgccttgtcacccaggctggtgggcaatggtgtgatcttggctcactgccacctctgcctcctgggttccagcgattctcctgcctcagcctaccaagtagctgggattacaggcacgtgccaccatgcctgggtagttttttgcatctttagtagagacggggtttcactgtgttggccaggttggtctcgaactcctgaccttgtgattcccctgcctcagcctcccaaagtgctgggattacaggcgtgagccaccgcacctggtaggaatcacagttttaagtcactagcagatagatggacatactcttggagataggatttaatttagaaagagatgttct

SEQ ID NO: 117475 - DNA, 2056 bp, Homo sapiens
gagttagggcagcagctaaaagaagagagcaacatgttctattctggattgtaatttgggaatatgggcatgtaggatgggttgggattgttttaggcagtccttcaatatttaaaattcgtaactgttatcacatttgcagacttttatctggaatagggctttatcttgaagctttgttcattattgttacttatttaaaatttttttttttttttgagacaatatcactgtgtcacctaggctggagtgcagtggcacgatgtaggtttactgcaacctctgcctcctgggttcaagcaattctcatgcttcagtctccctagtagctgggattacaggcatggaccatcatgcccagctaattttttgtgtttttagtagagatggggtttcaccattttggtcacgctggtcttgaactcctaacctcaagtgatttgcccgcctcagcctcccaaaatgctgggactacaggtgtgagccactgcacctagcccatcttttattatttaattcaaccagtatatattgtgccaggtcctgttctaggtgctggagctatggcagtgaacaatcagacaaatgcatgtcctcatattagattgaatcctaattgtggagatggataataaacagtaaacacattaaaatacacatagtatgtcagatagtaaaatagtttctaccagcagcctctttatggagggacagtgtgggtcatggtgagctacactgatttgtctttgcaaaggaagttgtcttaagatttgttgttttacactgtggtccttcatctccaagtatcgtgtttggttgaaagctaaaataggctatgcgtggtggctcatgcctgtaatcccagcactttgggaggccgaggcaggaggattccttgaagccaggagttttgagaccagcatcggcaacaaagcaagaaccctgtctctgcaagaaaaaaataaattagctaggtatggtgacatgtgcttttgctccccgctacttgggaggctgaggcaggaggattgcttaaacccaggaggttaagtctccagtgagctgtgatcatgccacggcgctccagagagagagaatgacagagagagagaccctgcctccaaaataataataataataaaaaaagaagctaaaagtgaccttcaaggtattacttcgaaaactagctttttttttttttcaatcccctcttgagataatgttgcattgataatgggaagcattgttcattttagcttttaggactaggacatgaagaaagaaatataataagtctaggcccctttgttgttttcttgcaggtgacatatatggaggaagagcgaaattttaccactgagcaagtgactgccatgcttttgtccaaactgaaggagacagccgaaagtgttcttaagaagcctgtagttgactgtgttgtttcggtgagtttgatccctatacattattgggaatttgcatgaagaagcagagagaagaaagctgctaatttcaagtaaacttgtttttttgtctcaggttgtaatggttatttaaaatgtttgtcaggccgggtgcagtggctcacgcctgtaatcccagcactttgggaggccaaggtgggtggatcacctgaggtcaggagttcgagaccagcctggccaacatggtaaaaccccgtctctactaaaaatacaaaaattagttgggcgtggtgatgggcacctgtaatcccagctattcgggaggctgaggcaggagaatcacttcaacccgggaggctgaggttgcggtgagccgagatcatgccattgcacttcggcctgggtgacaagagcaaaactctgtttcaaagaaaaaaaaaatttatgaaactagtcttcattttcttactctcttctgctgcttagcttttgctcaggcctcctttgttattctgcctatttaaatctcttctgtttttcaaggtgcattcatctcagcctgcccacttcttcctgtatttttttcatcgcctagcatagcacagggtagccactcatttgttgaattagtt

SEQ ID NO: 117476 - DNA, 1063 bp, Homo sapiens
gtctcaaaaaacttatccaaaaaacaaagacatggcagcagttgactttatcttttgcatatccctgttaagatggaagcctggctactgtagttttgtgctttagtttggtggaatccttagggactgttgaaatatgtgtggttacattggctttgccaccgaatctcctcattctgtaattgttacctgatactttagtttcatggcctcttttgtcttaatgttggtgcattgattggcaaagcaaggactgttaggtggctttttcaccccagagtctgttgcctggcggatttcttggtccttggttattgtaaagtagaattgacatttgtcagaaagaattggattatagttgtgtacaccattctgggggtgggctttattctttatagaagaatgaaaattctgtgttcctttaaaaagctcagattcagtgaccttgattccccagtggctgatacaccagatcctgtatttcttagatgtttcctacctttcctcagctcttccattggtctcccagatttgtttccattcctccatctagtgcccctagctttgatcctgcataacactctgtgtgggagtaaaatttatgtaaaatattggaatgcgtaagtgtcttccagttttgggtatcaagttaaaaggtgatagtgttgagtcatgtttgggtggggcctcaagatcacactggagttttggtaatttgcttaggagggttcacgggccctagcgtatagctattctcatgctaagatttattgtagtgaagggatacaaagcaaaatcaacaaagggaaaaggcacatgaggcagagtctggaggaaaccaggcacaagcttcccagagtcagcctgtgcttaactccagcaacaggttgtaacaatacgggtgaaatgtcctctaccacaggagttctgcctagcctggtccagggttgtttttttttttttttttttttttggagactgagtttcgctcttgtttcccagctgggagtgcagtggcatgatcttggctcactgcagcttccacctcccaggttcaagcctc

SEQ ID NO: 117477 - DNA, 1050 bp, Homo sapiens
tggggaaggagaacacttagcgtgtggagcagtgctttgggttaaagactggtcttctcttagacttgtggactggtagagtcagaggaatgggacattaagcagcatctcatggacagaacatgcggggatgttaacatagcataggggtagaaaagatccaggaaaatatatttggaaaatgggggaaatggcttggagaaaattatgccaaagtccattggcaactgtaaggaagtctaagtgaatatcagtatttaactcttggaagataatctttttcttgaataaattatacagtgcttataaagaatttgatttctaaaacataacacatgtagttgcattcgttatatataaaacctcttttttcctgcttaaatgaattttatttacttagacgttatttttaatttttgtgttttttcttctgtagttgctcttgcatatggaatctataagcaggatcttcctgccttagaagagaaaccaagaaatgtagtttttgtagacatgggccactctgcttatcaagtttctgtatgtgcatttaatagaggaaaactgaaagtaagtatatattttttttccagaagactgttagtagtatggtaattatgaaattttgagagacaatgattttttctcatctacaatatgggagaaacaatgcataccttacagggttattcagaggattttttttcttttctttcttttttttctcttttttttttttgagatagagtttcgctcttgttgcccaggctggagtgcaatggcgcgatcttggctcaccgcaacctccacctcccaggttcaagcgattctcctgcctcagcctccctagtagctgggattacgggcatgtgccaccacgcccggctaattttgtatttttagtagagacggggtttatccatgttggtcaggctggtctcgaactcccgacctgaggtgatccacctgcctcggcctcccaaagtgctggcattacaggcgtgagccacggcgcccagcaggaggattttttaacatgtagttccttgg

SEQ ID NO: 117478 - DNA, 2343 bp, Homo sapiens
tctttttttaagttaacatactaagaaaatttcccccatgacgtgtagcattctttgaagagattgtttttactggttttattccttcataaggatgtcatcacttatttagcctaacttctattactgaatctaattagatctagtttgcttctaatctgttagagatttgaaaacgggtaacccaggctaattagacttccaggttaaatagaaacacattgcggtgagctaaggctttaaggaatcctttggtagtaaactgcagagagttgagcctttggtattactcagttttgtgatactgagtagactagaagtatgtacatgacatgttagtatattttaccttggacatgtaactgctattggttgtcagactggtgtagtggggagggcatggactttggaattaaggagatttggctttgaattccacttctaccacttagtagctttgtgaactgcagtttatctcatctgtctaggtctgtagcattatctgtaaattggggattatagtgcctatttttacagtgtggggtaataaggattaaatgatgtatacattgctttgttttaaccttaatgtaaccctccctctttttttttagataaacaacttaccaggtaaatatatatcatctgtttcaaaatcgattggttaattgttagattaattctcattttttccttaaggttctggccactgcatttgacacgacattgggaggtagaaaatttgatgaagtgttagtaaatcacttctgtgaagaatttgggaagaaatacaagctagacattaagtccaaaatccgtgcattattacgactctctcaggagtgtgagaaactcaagaaattgatgagtgcaaatgcttcagatctccctttgagcattgaatgttttatgaatgatgttgatgtatctggaactatgaataggtaagtatattactatttcgatgttaaagtgaagagtgagttttctccacatatattaacctttaattggctaattgttaaaataatcacggaggttatatgataattttggttctattttaaaaattagaagccattcaggaccctgctttttatgtaaagttgggtctggttaataatgtagactaatgtttttgttctgataaattgaatattccaacatgttgatagttctttacatatgcatttgttatacacgagatttcagtttccaaaaaatcagggcaaagggctgtaatgcagaattaaattgaatttaatttacccagtgactaagaaattgtaattttttttttgagatggaggtttttgctgttttgcccaggctggagtaaagtggcacaatctcaactcactgcaacctccacccccaggttcaagcgattctcctgcctcagcctcctgagtagctggggttataggtgcctgccaccacgcccagctaatttttgtatttttagtagggacggtgtttcgccatgttggccaggctggtctcaaactcctgacctcaggtgatccacccacctcagcctcccaaagtatgaggattacaggtgtgagccaccgtgcctagcccgaaatttttctttttgaaatattcgggttcacttgagggtgacagctctttttgtatagtgctgcaagaattctgggtaattgacatttcggggttatcctcagaaactacccagagtgttattgttgcctggttcagttgcttggatgatgggagtaagatgttcttttggctgtgaactctactggtagaattcaggcaagactgatggtgtatttggagacatgggcctgagctatccgtaaaaaaattgaaatggtgtttattgttgctttgtatccaaatttttagtcacctctccccctacttggaagagatggctttcgtttttgttaagcagcagtcttgtgtgtgtgtatgtgtgttccatgaagtctggaggtaagccagtatgtttaagaaattgttagtgaaatgttacgtgtttgtaagagctaagtagatacttattaagtagtttaaattttttaaaaactgaatttgcctgtgtgctgttgtttgaaaatagttgtggcctggtacggtggctcacgcctgtaatcccagcagtttgggaggcagaggcaggcggatcacgaggtcaggagattgagaccatcctggctaacatggtgaaaccccgtctctactaaaaatacaagaaattagccgggtatggtggcgggtgcctgtagtcccagctgctggggaggctgaggcaggggaatggtgtgaacctgggaggtgtagcttgcagtgagctgagatcgcaccactgca

SEQ ID NO: 117479 - DNA, 1050 bp, Homo sapiens
tgtacaattccagggttgtgcaactgtgaccactatttaattctagaatgtttttatcaccccaaaaagaaaacttgtacccattagcatttactctccatttccctccataccctaggcaattaccaatatgttttctgtctctatagatttgcctgttcttttttttttgagacagagtctcagtaggtcacccaggctggagtgcagtggtatgatcttggcttgcttcaacctccacctcccgggtttaaatgattctcatgcctcagcctcctcagtagctggaattacaggtgggggccaccacgcccagctaattttcgtatttttagtagagatggggtttcgccatgttggccatgctggtcttgaactgctgacctcgagtcatccacccgcctctgcctctcaaagtgcggggattataagtgtgagtccctcttttgtttttgtgaaatattttaaaaatgtggcttaactttctgagatgttttccctccctcttttgtgtttactgtgttgttctgcttagtttggattttttaatcagtagtttttcttcagtgagttcttttttctttgaagataactttaggtagggcccagtttgctgtggttcctgaataccttatttgaggaccttttatacttgttttggaggatgccaaacccctgctgatttcagctgctgttttcaatttggctctctgagttaggttattctggagttttcaggtcaattatatacccttttgtttccttctgtttattttgtacagagctgatactaagcaggaattgtagttgtgggtggtttgtctctgcctatatgtattttgaggtttgtgggcatatttcattacctagttttgttgcaggattgtttaagcccaggagatggaggcttctgtgaaccatgattgtgccactgcgctccagcctgggtgacagagggaaagcctctcaaaaacaaaaccaaaaaaatctgcatcaaattatcacatcattcagcagttgtatttctagatacatattcaagagaaatgg

SEQ ID NO: 117480 - DNA, 4104 bp, Homo sapiens
tttgtcattggtagccgctcgtctcctttctctggatatacctattctgaatatttcacataaatttttgttcttgtttgactttaacccagcataatgttttcatgtgttgtgatatgtattagttcctcttattgtattcattcatttgtatcgctttatacagttgataggcatctgggttgtttcagctgcttgtgaacgttgatataccagttttgtgtgtgaacatgtgttttctgttcttttggctatatacctagaatggaattgctgaatcatatgctaactctctaacgtcttgaggaactgccaaacacttttcccaagtggctgcaccattttcattttctattacctgggaatgtatgaaggatccactgtctccacattttgccagcacttgttgttacctgttttttattatagccatccattccacataaaagtggcatgtgatttaatgtactgtgttttttgttttgttttgttttttatagaggcaaatttctggagatgtgcaatgatctcttagctagagtggagccaccacttcgtagtgttttggaacaaaccagtaagtatttttgtgattgaatttgtttgcgtatctcagactgtttggaaattgttatttattatcttacttttgcaagcagtgatagaaatttttattgtatgaactaattcagtggtatatattaaactttttttcaacctgtatcttccccctgcccaaagtaatcttttgaaatgtctagggaaatctaataaaagtttctccaagaaactgaattcagactgaaagttggatataagcctcacaattatttaatggtggtaaaaattgtcttttgcgatgctgatatggtagtcttataagcttttctgtcagtgaattcttccctagctggatgagagctacagcaaagtgggaaggtaggataaccacatacttatttaacaagatgctttaattttgtctcaggctaaaaggtgactgtttgatttaggaatatatactaattttcctaaaatctttctttgacaaaccatttacctggacttcactgttgtgttgattgctatttcagagtgttgggatatactgtcagcttggcacaggctttcctctttagtgatgatggcaaatgggcttatttccacactgggaaagcccatttctttaaatagcccttctcaagaagttatcaatggttgttagataaaatgtgaccaggaaatcaggtgatattaagaagtattttatgagcaatagcagatcctttgatacacaccttctttctgatacgaagaaactgtacctgtagtttattttttattttatttttattttttgagatgggagtcttgctctgtcacccaggctggagtgcagtggttcaatctcagctcactgcaacctccacctcctgggttaaagcaattctcctgcctcagcctcctgagtagctgggattacaggcatgcgccactacttctggctaatttttgtatttttagtggagacggggttttaccatgttggtcaggctggttttgaactcctgacctcaggtgatccgcccacttcggcctcctaaagtactgggattacaagcatgagccaccatgcctggcctctacctgtgttttaacgtggactatgtttatgccttggattagaacactggagtagctggatgtgattcttcttttttttcctttaatgtcaggtcagaataactcagtggtttgaggccctcttattttcctgatggctagcgtgtttgaatgtttggtctgttgatgttttaacacttgtttgtgtgagattgtgtgagaaattcaggacctgtacactgcagtacatttgaggattcctggccctcacctcctaaatcccactagctacccttcccccattattttgagaattaaaacacctacttgtttccagatgccacctgcctctgtgagtgtgggcatgagtatgtgtgtgttgcggaggtgggtgagggagttggaggagttttgttacacatctgagttatttcatcatggtaagatgttattgttctttcatttcattaaaaaaatctgtctaattctttaaaaatagagttaaagaaagaagatatttatgcagtggagatagttggtggtgctacacgaatccctgcggtaaaagagaagatcagcaaatttttcggtaaagaacttagtacaacattaaatgctgatgaagctgtcactcgaggctgtgcattgcaggtgaatattctttcttttataggtaaccatttataaatcattgtaacaagatggcagtggtttatgtatctaataacctgggattagctcagggtgacttcagggtgttgagattccaaaacctttgttttaaaatagaggtgatgttcctaaaaataattgtactctatagcacataagatgaattaattgactagaaacataggtaactctgagcctgaagtatgactggaagtttggcctgttatgtatgtctgtatgaaatagtgtacattaattaaataagggttggggttaatagaaaaataaggaatagctagattatataggtaattgacatgatagaagtttgtaaaactgttcagacaccattaaattactaatataaatattttaaaaagaccattgattttctgaagtaatttgtatgtttaagtgatattatcagtttatattgtctatacttgttaaacggaatttttgaaaattattattctagtgtgccatcttatcgcctgctttcaaagtcagagaattttctatcactgatgtagtaccatatccaatatctctgagatggaattctccagctgaagaagggtcaaggtatcatgtttattaatcatttacatatctaaagttaattgactattaggtctgagtaatatgttgcttttcatttcagtttacataaatctgtaacattttatcatagtgcatgaaggaagtggtcatttattttagtcagaataaatttgtgtccttaattagtttctcacacttgattctgctgaaatcatcagtgccttttatgtgcagattgacgtatattccttttttactgactttatatataaagattcttgggaactcttataatctggaaataataccaattgaaaagagagagaaactaacactgtacaataattacaaacctagaacacatgggtaaaagtgttaggaatatcctgaatttgtgtttttgtctttttcctccattcagtgactgtgaagtcttttccaaaaatcatgctgctcctttctctaaagttcttacattttatagaaaggaacctttcactcttgaggcctactacagctctcctcaggatttgccctatccagatcctgctataggtaagtaaagagttggaaattaaaaaagaaaaaaaaaaaaaagcacagtggctcacaactgtaatcccaacactttgaaaggctaaggtgggaggatcacttgagctgaggagttcgagatcagcctgggcaacatagtgggaccctgtctccatttaaacaacaacaaaaaaaagcttatctacttggagagttcgcatagtagaaagaacaagtatggtattctgaaatttaggggctttagattgcaaaagaaaacctcttccagtctcgttagcaggtttagaaccagccaaatggctgttatttaattggatctcccattgtatcggcagtttttcttggttagcgcacattgtaattataacttatgtataaggtggtgctatatactataaggagttaacgaaattcagtttggaccctaacatacagttataagatgtatatagaaaatagccaggtgcggtggctcacgcctgtaatcccagcactttgggaggccaaggcgggcaggtcaggagatcgagaccatcctggctaacatggtgaaaccccgtctctactaaaaaaatacaaaaaaaaattagccaggtgtggtggcgggcgcctgtaatcccagctacttgggaggctgaggcaggagactggcgtgaactcggtaggcagagcttgcagtgagctgagatc

SEQ ID NO: 117481 - DNA, 1100 bp, Homo sapiens
tagttatagactctgggaaactcttatctggaaataatactagttgagaagagatagaaactagttatagtataaagacctagaatatatgggtaaagaaattaggagtatcctgaatggcatttagaagctgtggaaagttaacctattcttttttccccatctgtaaatctgtaaaaccaggaataacaatgataattcatactttgcagagttctgggaatgaagaaaatgtaaataaaaaccttgtacagtcactggacctagaaatggcaatttactgataaacgacaagcagagtggaatcattttttttttctgttttgttttttgagtagagaatgtgacaaatctgttttaggaattaatctgaaagtagcatataaagataaatggaaataagaaattggaagaaaggaaagaatcgggagatatttgagttcttaattggggcaggataagataataagagactgtgaaagaagaaagagaaatctgatgatttaataagattctaaaaggaccgattttgcttattttaagcatcatgttactgagctatcattgaaagtagacataatctagcaatgtaggcatatattcatgcttgaattcatcctcttaggttatgtgttcttttgtctctcgtatgtccctagctcagttttcagttcagaaagtcactcctcagtctgatggctccagttcaaaagtgaaagtcaaagttcgagtaaatgtccatggcattttcagtgtgtccagtgcatctttagtggaggttcacaagtctgaggaaaatgaggagccaatggaaacagatcagaatgcaaaggaggaagaggtaatctagacattgtataccacttgtgatggcccagaggtgacttgtctagaaattgtagcaagcagacttggtggcaaggccggagcattgtgacagagctgctgagtgagagtgggtttgtatgtttgcccttcccccaatataagtgaaccagcagtagatttttatgcagaatttgtatagaagtggaacacaagttgatttcttctttcagatcatacacttctcaacttgagttattcctgattctggttgt

SEQ ID NO: 117482 - DNA, 1179 bp, Homo sapiens
tgcttgggtttcatccccacagattttactgaagttggtctgagctgaggtagcagtagttttaaaagcctctcaggtcattctaatatgttgcaggcattgagaagccactggttcaggctctccacaaaccttctttcattgttatttttaggctttgtaattttaacgtgttcgcctccccgagcacatgcagtggtcatacttttgaggatgaagagaggctgacttaggaactatttgaaaaagttggaacttttgagagaaaatacctttgaggaagcctggagaagcttatgctctcttcaggttgtattttgtagattgtattaaatgatgccacattgtgaactgtgagtacttaatggtgtacaaagcagttccacagttattcttgtgtatgtaagggtagggcagggcgagtgttatcctcattgtacagatgtattaactaagatccagagcggaaaacttctgtgtcctaggtaatgtggcctacctggaattttagcataggccttctgattgctggtaattcagcaggaattacataactatgtgactttgtcaatgtgtaatgaaggttgtttagtcttcctaattgcaggatttaatttgacctgtttttcagaagatgcaagtggaccaggaggaaccacatgttgaagagcaacagcagcagacaccagcagaaaataaggcagagtctgaagaaatggaggtatgcattgggtggtgttttttttttttttttttttttttttttttttgagacagagtttcagtctgttgcccaggctggagtgcagtgacatgatctcggctcgctgcatcctccacctcctgggttcaagtgattctcctacctcagcctgctgagtagctgggattacagacgcccaccaccacggcagctattttttttttttttttgtattttttagtagagttagggtttcactgtgttggctaggcaggtctcgaacttctgacctcaggtgatccacctgtcttgtcctcccaaagtgctagtattacaggcgtgagccaccacacccggctgagttgtgttttagagtatgcactgcagtctttttaaagtacatggttttggctgaggggcagtgtcttgaaagatagttatactagaaactcttaatttatttgaacaattttttt

SEQ ID NO: 117483 - DNA, 2183 bp, Homo sapiens
tcataccctcctcctcactaacttcatttgaatgtctatatgtttaaataaaggtagaaaaatttttaatagtaattatatattgatacgggattgtaggagatatgtattttataaaatttaccatcttaactgcttttaagtgtaccattcagtagtgttaagtagatagacattgtggtgtaaccaatcttcagaacttcatcttgaaaaactgaaactctatacccattaaataactttccattattcccctcccccatcccctgacagccactattctgcttccatttttatgaatttgactgctctagatacctcattgtatttacttattttttattttctagatgttatggtagtcctaagttacttagatcatcatcaaaagagaacgaagtaaaaaaagcaaaaacagttttccaacatgactcattttgaagtttaaggtagtctgtatatgtgtttgttcttaatgatttctattgttttagacctctcaagctggatccaaggataaaaagatggaccaaccaccccaagccaagaaggcaaaagtgaagaccagtactgtggacctgccaatcgagaatcagctattatggcagatagacagagagatgctcaacttgtacattgaaaatgaggttgttatttaaagtctattggaacaatgagctaacaaattaatgttaccatagtattcagactctgtgtctagtgactttttgcatttttgattgtttggacttagagaaaataaattagacttttgtgtggtattgtaagggcaagttgaagcaatagatcccatgttatgtcaattcttttatggtggtactaagatgtctgtattgctagaagctctgttatgaaaattttgacatataatgtctttggtgtaggggaggtattgttcatttttgaatacgtgggtatatttgttcactagagattgggatatttgaggttggtggtcatggaagttattcagtaggagaaatcgtatggcattaatggtggcagtattttgcttattcctttccgttgccagtcagtatgtaaatatagtaactcttactgagtgatgcaaggtttgggatttgtgagcacatttattgaattaatttttgtctatgaggtttcttaccaggtttccactggatcttagaatagttttgtcttatggaaacttcagcatttatactgcgtgaatgaatttgatttttcttatctcatattaatacagcagaggatatcacttagtgacattgaaccaatagttttttaaatttctcttgtcttaaattctttaattttgcttttgagtgtctacaccttgatatttctattgttcttttttttaatcccacctacaaaactctttttgatattcaaagtctgtcaaggattagtcttcccacttacctttgttatgtgacttgcagaactaaaaggatttggggaagaaagagtctctacttttataattatattggtatttaagaggaaattagttgtcctaatgtctgatttatacataatatttattctcagggtaagatgatcatgcaggataaactggagaaggagcggaatgatgctaagaacgcagtggaggaatatgtgtatgaaatgagagacaagcttagtggtgaatatgagaagtttgtgagtgaagatgtaagtctgccacaatatgcctaactactgtgtgtcttctgtgaacatctttaagtgggttagaagggaagtgtgcagctatatgtgtatagtagaattattaaaaatggagtttttctggggggggcaaaattttatatttttttatatatttctctattagtacagtgtttagtaaggtttggtctttgtgcatcacgttcacaaatcacttttgacacattcgaatattgttatttatcttgtatctttcttttcttttcttttttttttttttttgagacagagttttgctcttgttgctcaggctggagtgcagtggcgtgatctcggctcactgcagcctccgcctcccaggttcaagcagttctcctcccccagcctcccgaatagctgggattacaggcatgtgccaccaagcctggctaatttttgtatttttagtagagatgggatttctccatgttgatcaggctggtctctaactcctgacctcaggt

SEQ ID NO: 117484 - DNA, 1327 bp, Homo sapiens
ataataaaactccccatacctatcaagtagaccaacatttgccatccttgttttctgtatctcccatctccttactccccctgtatcttatcttattttttttgaaatggagccttgctctgttgcccaggctggagtgcagtggccccatcttgggtcactgcaacctccgcctcctgagttcaggcagttcccctgcttcagcctttgtagtagctgggattacaggtgtctaccatcacgcccgggtaattttttttgtatttttagtggagacggggtttcaccatgttggccaggctgttcttgaactcctgacctcaggtgatccacctgcctcagcctcccaaagtgctgggattacaagtgtgagccactgcacctggctgccctctgtattttaaagcaaatctcagatacatcattatattctatgcctctgactgtattggggatgtaatttttgattgacctaattataatattttctttatcattaggatcgtaacagttttactttgaaactggaagatactgaaaattggttgtatgaggatggagaagaccagccaaagcaagtttatgttgataagttggctgaattaaaagtaagtgactcttgagagcagaggtatccagaacccttgttgaagcttcctctgaggagctcaaatttgggaggaattctcaagtaaagacagactgaaaatgatgtttgatgaactaaaataaaccctttatgacttaggctcattatcattctcacttttagaaccttgtaataacaaaatgatttttctgaaaattgactttaggtttgtaatgtttcactgaactggatgtttagtgcattcttggtgtcaagagataaaatgactgcaagacttagtacctgccctaaaggcacagggaatgcagctggagcagggctgtttctgtttatgtagtttggattcttgataaaagcaaagcatctggtggtttattttttattattttatttatttattatttatttattcatttatttatttttaaatacacagtcttgctctgttgcccaggctggagtgcagtggcgcagtctcggctcactgcaacctctgcctcctgggttcaggggattctcatgcttcagcctccagagtagctgggattacaggcgcgtgccaccatgcctagctaatttttgtatttttagtagagacagggtttcttttcaccatgttggccaggctggtcttgaactcctgacttcaagtgatctgcatgccttggcctcccgaagtgctggaattataggtgtgagccaccatgcctagccaaa

SEQ ID NO: 117485 - DNA, 1050 bp, Homo sapiens
gtttatgaggaaattggatcattggtcctgtaggattttcctctagttggattttgctgattttcacctccctggtggtatttaacattatttgttaaattgatggttacatttagaggctccatcagattcagatgtttaagattttaaattaaaacattttttatttttggcaagtatactttatatttagtactgtgtatctccattaggaggcacctaatttttggtggtctccctgctgtgttttgagggctcaggtgacaaattgaagcgattccagatggatcagtgttgaggtatagtttcattcccctcctgaagtagcttcatatttccaaaggcctggagaaatatatttaacttcttatatatagcacacggagattaaatgtactttatcactagttttagtggaatcagtactctggatcgttgaactgccgtatgaagactgtgtattcttctgttaagaatctaggtcaacctattaagatacgtttccaggaatctgaagaacgaccaaaattatttgaagaactagggaaacagatccaacagtatatgaaaataatcagctctttcaaaaacaaggtaacttttttctttgtcctactcttattttagtaaagttaactttttttttttttttttttttttgagacggagtcttgctctgttgcccaggctggagtacagtggtacaatctcggctcagtgcaacctccacctcctgggtttaagcaattctcctgcctcagcttcccgagtagctgggattacaggcgtgcaccaccacgcccagcttatttttgtatttttagtagagatggagttttgccatgttggccaggctggtctcgaactcctgacctcaagtgatccacctgccttggcctcccaaagtgctggctggtattacaggcgtgagccactgctcccggccgtaaagttaacttctgaggcatttacatagcatttttttctcttgttctcattaacttgtttaatagcactttttattttggatattaatgtaatgtgtaatgt

SEQ ID NO: 117486 - DNA, 1561 bp, Homo sapiens
ccttcttcttcttttttttttttgagatgtagtctcgctctgttgcccaggctggagtgcagtggtgtgatctcggctcactgcaagctccgcctcctgggttcacgtcaaaggccttcttttaaaaatagtattcattatagttttggttccgaactagcatgctgaaacttcagctctcatatctaatgtaatttttttgcattgtgaaattatcttcctaagattttgtataaatcgggtgctgctgtttatcttgttgaagccttttaattgataccttatgaattttcttgacctttaaaatttaaatctatcctgagtgtattcaaaaattgtggttaggtttcttttgaataattctgttcagattgtgaggctaaatatgctttattttttgaaagattataagtttttgaaaaatggcagaaactagacagtagttgcggggagggagggtatcacacttttagcacttgtttgactgtctcctggttgcaggaggaccagtatgatcatttggatgctgctgacatgacaaaggtagaaaaaagcacaaatgaagcaatggagtggatgaataacaagctaaatctgcagaacaagcagagtttgaccatggatccagttgtcaagtcaaaagagattgaagctaaaattaaggtaatttaagacttttttttaatagtcttttcttgacagccttattattaatagtcctcaagtgacacttaggagggaactttattatagtgttttagcttctaggttgaggattgggtggtgggagagggcggatttgggtttagcatggcttgtaaaatttgttaattttataagaaaccagttttctgtcttacccattccaggagctgacaagtacttgtagccctataatttcaaagcccaaacccaaagtggaacctccaaaagaggaacaaaaaaatgcagagcagaatggaccagtggatggacaaggagacaacccaggcccccaggctgctgagcagggtacagacacagctgtgccttcggattcagacaagaagcttcctgaaatggacattgattgattccaacacttgtttctattaaaacagactattataaagctttaagttgtcaactttgttctaaatatcaactagcgcaagtgaatactgaagatttcttagtcagtttttaggggattttcggggaggggaaataggtaatgtatggagcattttcacttctaaatagttagatacagaaattaagtgcattgtatctttttcataatggtactatttagaagcccagttagtcttactgagcttatgcttcactcctttatgtttaaccatgtgtctacaagaataagtttgttttggaaagttgagctatagctacagctctagctatccagcagacttttcattatgacttacatggcaggagctctaattatgctttaaaaatctgttgtggagattgctttaaatgctccctgcctggtgtggggatggggtccccctctttgtgagggctggagcatggcacggcatggattaacacggca

SEQ ID NO: 117487 - DNA, 1248 bp, Homo sapiens
ctgctttttggggcagtgttgacaggagtgaggcattttggaaactccaagggaagcctgtgtttgaggccagagttggtacctgctttaagaaactgttacagggcttgttggtaatgttttgaatctttgtaaaaattgatattctgtataacagagtgcctctctgttacttttggcctatgttgttagaaataagatgctatcttgcatagttagaattaagcgtttgtccatctctagataacattgaaaagtttgagtgttacaggctctaaagtgcaatggagaacaattgcttaggaggaggaaggggaaagtatacttatgttggtgtgtaagcatgcatggaggcctcgaggcaccacaacaaggccaggttcttagcacatcctctgttctctacctgtcatgcttcaagagttccagctggcctgctgtgaagccagtagctattttaaaagtgctggctgcaggattaagccaaccctttacaactggcccagaccgtaatggccatttcttcttaaaaaaaaaaaaattttttttttttttttttttttttttttttttttttttggtgtgtgtgtgtgtgtgtgtggggaagggtgtgggtgctgggatgggggtgaatttcaagttgaaacacgatgatgtggtctgcttgctctctgcttagacaggctttaagaccaattggattttcatggaggccaggacagagagtggtaattgatggcttgtgtacagacaagcatttatccaggttgcgttatccaaactgatttgttaaagctccaggtcacgttcttacactaagaaaatcattcagtaaacatgagacaagtttaggaaaaactaataaaataaacctgtcttaaacttgaatggtttccttaattccataatgaaggctgctgggtgtgtgtgtgggggtgtgtgtgtatgtgtgtgtgtctgtgtgtatgtgtgtgtggggtgggggcggggggtgtgttttcaataaaaatgttctctaggagtaggaaccctctgagctaaatttcacttaacatccgttgaagacttccagtctgaagagtgacagctgaagcacactgcctactttgtgagaaaatgttgcctaatttttctgtactcaaactctccagttgagtcttggcccagttcctttggtgttaggaatccttgtcttgctcctgtgactgggccttactttgagggttttgttagcagaaggcgggggtt

SEQ ID NO: 117488 - DNA, 1081 bp, Homo sapiens
gagaactgctcataattgcctcatgtgtgttttcagttctcaaatttaaaaccatttactgctgggaacagatgttaaattcaggacgcttgtcaattgttggcgcgatacacaaaaaaagatgcttaaaattagaagcctgattgaattttaagtacagtgatcacagtggttggaatgaaaataattgaaagggtaaacagcttattgtgagagatggaagtacgcaatggaaggagaagctgaatttgaaattggaaaactcatgatgtggaattgtaatagggattctacgatgatcattaagttaattaacagttaattgtaatagaaactctctaacagcacttaaggaacattaataccagatagactcattcataacttaggtgatcacaagaaaagccatgtggattcaataatgataacaatgattactcttatgtgttgtgcacctactatgtgtcagataatggacttgaacctgtatctatctgattagcgtttagaccactgattgttcttggagaccacgaagaactggcagtcccttgctttggccaattgaaaaaaatcatgctaaaatgacataaaatttaccattttaattattttgaagtgtaagattcagtggcatgaagcaagtttacaacactgtgcaaccatcaccactgtccatttccagatccttttcatcatttcaaacaaactctgtacatattaatattaaacagtaaatttccagtctccctcattcgctggtggcctctactattctttccatctctatgaatttgcctgggccaaatttggtaacactaatgtcacctctacctcaccccaactcccaaactgctcattgatgacaaggtctgctgtcctcattgtgctgatccctcatggcatgcagagctgggcaggctggctggaaacacctctggacccccagaacgttctcagaggcattagaaccagagcaacttcatcttgaataggagctgggtaaaataaggctaagacctactgggctgcattcccagaccgttaggcattctaagtcatggaataatataggaggtcg

SEQ ID NO: 117489 - DNA, 1084 bp, Homo sapiens
ttgtattttttgttgagatggggttttgtcgtgttgcccaggctggtctccaactcttgggcccaagtgatccacccaccttggcgtcccaaagtagtgctaggattacaggcatgagccaccaggccacccacccccaactccgcccgcccccgcactccagtattcttttataaaatgagaatatacagcatgcattttcttatatcctgaagaaatgtgagtgagcttacctagcagtgcatcaggagatgctgattcagattgccctgcaggttccagagagcctgatcagtgggagcacagggcctggctccttttagggttccccaagggtctggtttataagtcacattctctgtcttgtgccccagggatgctgaaagtctccctgttgttgctctacctgggagtgcatcctccccattgcatacagggtgggtcctgggggtcgtcacttcccatcccttcttcctgggccgcccagttccactggtcactgctgaccaatatctcctgcttggtaactggatttcactttggcaggagactctggttcaaggggaggaactctgaacatggggattatggccagtggccttggataagtgagagttaaggaagcataaactaattttctttggatggaagtttacacataaagatgatactcacctagacttgcagataatatgatgtactatttattgcataaatacatttgattttaaaacaatattaattttagctctgggcatatccagccttagctaactgaaaattgtagctctgggaccatctgctggctactctccagactgccacactggtctgggaagctggctctcttgggatggaggttagagcaaagcccctgctataggtagcttttgcttcccggggtctgcagggaagtgaggctggagcagctgcagttcagacattttcatggtggtggatatctcgggcagcaggatcagcagttacagtatgcgttctgaccacagacatagattcgaattctggctctgctgctctgagcctcagcttcctcttctgtaaagtggggataataataacacgt

SEQ ID NO: 117490 - DNA, 1009 bp, Homo sapiens
tctagcttcttcctggagcttggggaaaagtaggacactcgaatgacttggagactgaagaaataagcctgggccagccccaggcagggtgggctgggtcagtgttggtgaggctgggatgatagctttggccgtgggtgcaatgcccatcaaccctcctcatgcaggcaggtcgtgccatcgtcccgaagctgacagtcccccttcctgccatccgtctggggctgcctgggtgggcttttggacccggagcctttatgcaaggttctgcccactggagcagaagaatgagggcctctatttcaaagccttcctgtcaccacaggtgcagattttttgtcattttgggaaaaaaaaaactatcgaatttttgtaaaattaattttatttcaaaatgactgagggggtttatataaatagctttcttgatgattcttttggtaaagtcagtacttctttaatagctaagatatcagttgtgaattgaccttgtgggttcattaggaggattaccggctgggcttgctacaggaggcccccctgtagtgaggcatttcctcccagtggctttccaactgtgtcccatgaacctctgctggggtgaagtatgggagaaagggcaggccagtctggccttcctcctcttcctccttctcctcccacccctgactccccacccaaccaactctattggttttcctgccaaaaggcatttacctccctgcattggtgactttgcctcctggggctggactcctgaaaccctgacctaggcttcaggcctgcttcgattcagttgtgtctggcatgctgtcagtgagacctaagcctgccgtctccaggaaatgcactctgaggacagcaaagggcagctatgcttttttagacacattccaagatggaagggacagtgggggagaagcaggtgctgcagaagttgactctgtcactcctgattattttaaaaggccagtttgggtcaaactggtctttgacttaggaatcctgc

SEQ ID NO: 117491 - DNA, 1023 bp, Homo sapiens
acccaaatcgatatctctagcttaggcctctcctttgactccagacctgtttatctaactgcttacttgacttctctacttacacatctaacagtattttaaacttaaatcaccccccaatctgctccctgccttgcccgaagtctcttctcttctaacagtattttaaacttaaatcaccccccaatctgctccctgccttgcctgaagtctcttctcttgtagtgcattagtttcatattgctgtagtaaccaattattagagatttgatggcttaaaacaacacatttattctcttacagttctggagaccagaaagccaaaatcaattgaaaccagcactccttctagaggttctaggggagagtatggttccatgcctttttccagtctccagagctgcatttcttgtatcccttggcttctggccccttcatcccatcttcaaagacagcaattcagcatcttgtttcagttctcacattgcctttttcatctttgcagtcaaatttttctttgcctccctcttataaggacatttgtgattgcatttagggcccatccaggtaatccaggataatctcatttaaaaatccttaattgaaacacatctgcaaagtcccttttgctatataaggcgacatccacaggttctgtggattaggatgtagacatcttgggggctattatttagcctaccacacattgtaaatggtatcacccttctatagttgcttaagttaaaagacaacttaaatcctttttacctcaagccttatattcaatctgtcagaaagaatctatcagaaagtctttcaggcttcatgtttaaaatatgtcaagaaactgatcctttttcaccactcccactgctgttgtcatctcttgcctggattacatcagaccagatccctgctccatcttcctgttcttttgagacagagtgttgctctgctgcccaggctggagtgcagtggtgtgatctcggctcactgcaacctccacctcccgggttgaagtga

SEQ ID NO: 117492 - DNA, 1032 bp, Homo sapiens
acttctttaagtctaatagaagggaagtattgctaacgtttttcttatagattaattcattgaggatcggcaggttaagaaattactcaaagtcacaaagctgacgtgggtgatgctgggaccccaacggaggctgcctggttcctcagggcacagacgtaccccctgatggccacactaggctgcatgagctcagttgctttcttcttccacacagcaccacttaactcatcacaccctcattcccttacccagcaatgaacgtccccaaggtgggtcccctctggcctgacctggtttccctctaccttctcatctggcacctggcatttgtcttccagccaacccagcccagtggctcacctctgccctccacagggaccaccccttccctgcacacagctgtctacagcctacccagcactagggcccagaacctcctcctaaggtcccccagcccactgttctctcagctgtggagcctgctgctctctctgctggcctgtggtccatctctctgagccctgtgagcaggcccacacagtctgttctcagggtcacctccaggcctttgctaatgcagccccgttcagaggcctcctgtcccacccatcgcatctctcttctcttccttagccggacatagcatggccaccattcatctattttctgctgtggtgggacttggattttctgatactgccaagctgacaacaggctagaaaagcaccaaacacaggatgttaaactaaaactctcccgtcctgccactgtctgtggcatcttacccagtgtactctcccagggaggtgcgcttgagctcagagtgaattccaggtgacttacattgatgtcttccaagtccaggaagttcagggtgagcccgttgcgcttccagatgattggtggcctcaggtctccatggacggcgcaggtcagcactgtgctcagccccacggtcactgtggtcacactgaccctgtcctcgggggcgaggctgagctgaaccacttctgcagagggaaaggagga

SEQ ID NO: 117493 - DNA, 1066 bp, Homo sapiens
aggggataacgatagttcctctctcatagattgctgcaaggattaatgaattcacttagaacagcttagcatcaactatgaatgctgtatgattacctgaaattaattatgtggcttcagaggcaagctctgcaacacatggtgagccctgcaatgctctgctccttaggtgtgtgatacctgtacaccaggtgctgggcaagtgtctgcccatccagccaacactccatcgtgggtgggcttccccactgtgggccctggactagtttcttagtaatcaacttgcagacaggatgacagggccaggcttgtcacatcaccattcttttcccagggctcagtccagaacttgcctggggcagatggtaggcatgaatggatacataagagcaaatattcacctgttgtgttgcttcaatttggggcgtttccttaaactcctgcctactcagagctgaagcccaaaagcttcctaacctgttggctttgtgacttcaaagaccatgtctgtcacatctgagagcaggaaactcagccatggtgctgattcatgtggcacctgcgggggtgtctcagttcgctctggaagcttactgccctctgcagagaactgagggacagccacttgccaggccattctccctggaagtgcccatggcatcagaacatcttcatctgaggatcaggaaccggggctggagaccaggaggccagtccctttggtgagactgaggccccggccagagcctttgtggttgtgccattgtaaggaccgcacttctcccctgggatgagggctactccctgcagcctgggcatcttggtagacatttgaggttacagagcttgtaagggcctgagccttctgagacactgttttcaaaaggaacaggttgggtgcagtcagtctagtctaacacagactttttaaagtcacactgctcactctggggcctgggaatatttcatctgctcagctgcctggccagggctgcttacagaggggctggggcctgtggtctcaagggcagggatcataggcttgggctgagtccggcaagatcaa

SEQ ID NO: 117494 - DNA, 1051 bp, Homo sapiens
ccaagtcctggcacccagcctgacacagcccctcccactgcccaggcacctactttcttattctccacaaaatgctcagcttaggtgggccccattctgacaggtgggcgcctcctacacagtgtgattttagagactctagcaggctcatttggcctcaaacgacaccattaagggcaacacacttgtgccatttgatttactgggtgggttctgtcacctggcatcagcagggcttagttaacccattaggcaccccactccagatagtctcagagctgaggaatccctggtggcagaggacacagggcagctagctatgacacaggtagaagagcacctccctccctccctccccaggtgccagtgaggcgctgctgatttgatccctttgttggggttggtcctatctagcagggctgccctccacccacccaagccaagagcatcctactggattccaatccccctcctccaggaagcttcctggccacccagctcttactgttctagctcctttgaactgtcaccgtgcatgtggtcatagccccacaaccttcatcttcaatcatgccctaatattttctgtctgccctgatgagacccagagttctccagggcagaagaggaacatgatttctgcccagagttctctgcttgtcgctgaggaaatgacaaggtcgcttggaatatggcagctgtggttggcaggctgggctgtgggcagggagacaggctgagactgagatggcccctcacttggtatctgcctgcaggccagcctctctaaaagtgaagcatctggatcctatttaaggagcctctccctgtgggagagtcctaattttttttttaaacattagccatggctgggcaggaagcctgctggaggatacccaaagtaagacaggggtcccaggcctgaagggaaacaggacagtagttctcccaggcaagccagcgtgctcagggtcctgtgtggtctggcttcctaggcagagttgtgtgaggacaggctcggggaagggcagcatgggtcctgaagcatggt

SEQ ID NO: 117495 - DNA, 1020 bp, Homo sapiens
ctggcatgcagtgagcattcttctctacgcagtgtcaacagcactagggatgatgctggtgccgttgtaacatcacggcttattcaaggagcagatgcaacaagctgtaagacccttgcccatttatgtgacaactctgtaatgagctaagaggtcaggggtggtgggtcctcctgtgaatgaggggagagaagaacattggccctccatatttatttaatgaatgactagaatttgacctccagttgatcaaagttaatgatcaccttctctgtcttgctaagagatgtaaggagccacccaagttcatctagcaggttagtagaaaagcaaggggagaatcaggtatctctgatccccagtctggacaaagctcctagaatgtacctccgggctctcaggaaatgccagtggagcctggggtaagaattcatctgcctgaagatgagaacgtttagagaaggtgctggaggagaggggaccttcaaggtggattttgaagagcaagggaaggtttgctaggttgagagtgtggggaaggctttctaggagtacaggcatgaagtacctccagtctccgggaagagcaagtgattatgggatcctgggtgtaggggagagcatagttggggataaaggcagacaagtggatcacagcaagctggggaaaggccttgtgtgccaagcagggaagtctgaactcaagctgaccagtgttgtgtccagaattggtgggttcttggtctctctgacttcgagaatgaagccgcggacccgcgcggtgagtgttacaagttcttaaagatggtgtgtccggagtttgttccttctgatgtttggacgtgttcagagtttcttccttctggtgggttcgtggtctcgctggcttcaggagtgaagctgcggaccttcgcggtgagtgttacagctcttaaggcggcgcgtctggagttgttcattcctcccgctgggttcgttgtctcgcaggcctcagaagtgaagctgcagacctaaggcagt

SEQ ID NO: 117496 - DNA, 1025 bp, Homo sapiens
ttaaaaaattaaactaaactaatatttatattgcctgctttttattttattttatttattttattttttgagacagagtctcactgtcacccaggctgaagggcagtggcgtgatctcggctcactgcaatctctgcctcctgggttcaagcgattctcctgccttagcctcccaagcagctgggattacaggcatgtgccaccatgcccagcgaatttttgtagttttagtagagatggggttttgccatgttggccaggctggtctggaactcctgacctcaggtaatccaccttggcctcccaaagtggtaggattacaggcctgagccaccgcgcctggcctattgcctgctttttaaaggcccagtctaatttatttcaggtgaatctttcagaaatacgtgctgtttgttaattcattcagccagccagtcattcctccaacaaatatttatccaacaaatatttattgaatgacctcacttttgccaggcactgatctgagcactgagagccaagatggatgcttagacaactttgttttcaacctaattctcacttttgtttgtgccctgccttaaccctcaaattcatgaaatactttgtgtcacatctgctctcataacaatgctgggcaaattattcccccgttacagaggtgagcaaatggagcttaagactgtgtagcggttatatgaaccatatgaataagtggaaaaacccagaatttttattcgtcctgcttgtcttgtctacccacttgagcttccaatctttcttctgtttcctccctgctcatcagaccaaatctgtcccctttctcattcctctcgagtggagctgttgacttttcagagtgacaagttgatagaatcaactcatctgtgtgaatggttgggaagctaataatggcttaatattatcctgctgtgcattcgctgctatcctggcacaaggtcctcagcttgtcaaacaaatcccctgcctttggctccaacggatcctgtgttagctagagttag

SEQ ID NO: 117497 - DNA, 1016 bp, Homo sapiens
aggcagttaaatcttccatcattctatcttattttttgatatttgtgccttaatctataaatattcactctaggcagtaaatttacaagcaaggttcaagcttggtaattaatatttgtgcctctctatgtaagttatgtctttaaaatgaggcaattgctttaagcatttaagacattccgcgtatattgcagagtaattactttccaaagatatttccaactgatattttgttacatctaaatatacatttacagtactcagtagaccagaatagctctaatttatatatttggtccactgggttagaaaaagagacattttaaaagtatgtttttaatcagtgtgtttatcccaaagatactgttggctcctccagaatcacacgattttataaaaaataataaatgtggtgtgttctctgagctgatttagactttaatgagagatgacatctcagcggagcatgagcatggctaacttttaatccgggctccgaagtgttctagagcttggaggaacttattaactcccttggtgtcattttcttaatgtacaaaattcagatgataaacagttactgcccttgtgcagtgagaattaatgctttctgagtcgcagtattgttttgataaaatagtcttaattgtttgctttgtacattttctgctttattatttttattatttctcttgcctctgtaattggtcgttattgggttcccattatttctttattagtcattttataaaagctatcttgtgatttatcctccctcccacacttgctgttcccccaagtatcgtaaacagaggcaagacccaggcaaacaaagctggtggtattgttggttgctttgagtggctcgcccgttgtctttaggatggttcattcccaattgcttgactgctatgaaagaacttatatgaatcccaggaggtttattagaaacatgttctaagtaatagtaagaaagttggattaacagggtctgcatggaaactctaacctccctc

SEQ ID NO: 117498 - DNA, 1031 bp, Homo sapiens
atgactcagacacctccattaggcctcacccccaacactgagggtcaaattttggcattaggtttggcgggggacaaacatccaaaccatagcaccagttgtccagtaattcttaggaacagaaacacttttatgaccatgctgactagaacaaaattatctgtgattcgttatccattccagatgagaatggtatatataatttaaatctgaatttattcaaaatgactgttcttgtgttacaagtaaagatgatcatgaactgcactgtacaagaaattcttatctgatatctcaccgtgggattatgagaaagaagaaagaatcatcacaaacagctttaagaatgtggtgagcacaatggtgagcggcgaatgcagcacaaagcatatttagttagcagcacaggccaaaccgtgggtgacgtgagaatttagcacagaaatgcgctgggtggaaggtgggattgggaaggacctcttggaggcagaggtacttggagaggaagaccaggatctgggtgggcagagtattagagtatttaaggaggagtaaccctcagagtctaggtgtagggtggaatagggccatatctgtcaggaggggaaaacggaacagattggttaaggtgggtatctgggtctgtgagccaggggattcatcagggacgctttggtggccaggagcagaatcgcctgctaacatgctcatgtacaaagaagggttgtcatgaggccccagaccttctcccaaagccaatggcaggatgccttcatgggctcaggcttagaggcattggaagtctgtctcccaactcccttctgagccacactgtctcccttctccatttctccctcctctgcctgttctctccagagactggtctttccagagagctctgagtgtagcccttgctgcagctctgggccccagactgtctcatttgagttctgtctgtatcctcaggttctcaaggggcagagccttattggctcagcttggggaaatatcttcccagatccatttgcctg

SEQ ID NO: 117499 - DNA, 1868 bp, Homo sapiens
gaagcactgtttagccttctttacaagatggaaagcaaaatagcttttgtttttttttttttttgagacagggtcttgctttgtcacccaggctgaagtgttgtggtgctgtcatggcttactgtgatctctgcctcctgggctcgagtgatcctccaccttagcctcctgagtagctgggactacaggcaagcgcctccatgcctggctaattttgtattttttgtagagatggtgtttcaccatgttgcttaggctggtctcggactcctgggctcaagtgatctgcctgcctcggcctaaaatagcttttttgttgttgatattttgtgttttatatttagaaacctagaagagagatattttacttgttataaaaatgtttaccatattctctgttttctcttttgcctatttaatgacttctgttttccagatttttcttctggttcaaagcaggaaatggcgtgatggcctttgttccaaaacagtggaataccatcgcctagatcagaatgttaatgaggcaatgccttctttgaagattaccaatgattatattttttaaagcactgtgatttgaatttgcttatgtaattttatttgcttgactttttatatgatattgtgcaaatgtttgccataggcaattggtacttaaatgagaggtgagtctctcttttgccttggtgctttggaaattaaatgtcacaaacgagtatataattttttatctgtacttttagagctgagtttaatcaggtgtccaaaatgtgagttaaacattaccttatatttacactgttagtttttattgttttagatttattatgcttcttctggaagtattagtgatgctacttttaaaagatcccaaacttgtaactaaattctgacatatctgttactgctgactcacattcattctccgccattcaaatactattttttatccacatttttttttgttcccaaactgtaatgtacaaggatatgtgtgataatgctttggatttgagtaatatttttttttcttccaagaaaactgctttggatatttttagataatttaaacataatttaggataatgatattgctcaatctgaccacaattttaggtaaaacattaaatgtgtcaagaaatcttggcaacagagactctgcagcttgcagtggacatagataaaatgttacagagatactatttttttggttggaattactatattaaatttagaagcagaaactggtaaaatgttaaatacatgtacaattgcttttagttagcaattgattgtagcatgggttcctccaaggtttcaagcaatgggcagagtttaaaattatatcagattcgtttacttcgtttattattttacagtaaatttgaataaatcttaggggtcattatcacttaaataatactgtacctaggtctttcaaattaaaattatacctgaatgaagttgtttgtatacataaaggatatttgtgtacaattaccttttttcccccacacttgttttctttgtttttgttttttatggcaactggaaagtatttactatgggattcatttatgtctgtctttctatcataaagaattgatcaatatgtaaatatgtgatttgaaccatggttgacttacaagtgtcactacagctttttagaaaacatagccctaatatatgttaagcaggacccgggtgagccagtgggcttgcgctttatgtagagctggaagaaggccgtccatcctgtctcttgggcggacagtgtactttcctaatagggaagggaagcacaatggaaatacccctgaaccgttttattgcagtaatttttttcatatctgaaactattattt

SEQ ID NO: 117500 - DNA, 2278 bp, Homo sapiens
aaagtatttaggtccaaactccatatcttttttgggacctacttgagtgagaatcagccactttttggtctgttctagggatcaggtaaagtctggacaaggtaactgaaatccacaccctttatgaaatgaaaacagaggggatgggtgagggctgtatgtgaactttgccatcgtgacttaaagtcagccctttttcttttcttttggtggcaggctgtatgatgcagtaggtcttttatgctgcttaaattgttagtatctagcaaagcaattattatctgaagaataactgactaagaagaaatgtaactgaatgctggctattgagacttaataactagttttcgagaaagttataggaatgtagcagagagaaatgcttagtgtaaaatttgggtaaatatgcttttagcttggtggagataaagttggagatttcagtttgatattctttgtttgtttcagttgtatcacggactgattcaccgagcccaaccgtactcaactcacatatttctaccccaaatgtgaatgctttaacacatgaaaaccaaaccaaaccttctatttcccaaatcagcaccaccctccctcccacgacgagtaccaagaaaagtggaggagcatctgtggtccctcatccctcgcctactcctctgtctcaagaggaagctgataacaatgaagatcctagtatagaggaggaggatcttctcatgctgaacagttctccatccacagccaaagacactctagacaatggcgattatggagaaccagactatgactggaccacgggccccagggacgacgacgagtctgatgacaccttggaagaaaacaggggttacatggaaattgaacagtcagtgaaatcttttaagatgccatcctcaaatatagaagaggaagacagccatttcttttttcatcttattatttttgctttttgcattgctgttgtttacattacatatcacaacaaaaggaaggtaggtttgggatttttttagccctttattatttcagtcataatgcttttgatgattcatggttcttttttttttttttttttttttttgcaaaaaaaagtgtagtgggtttcactctgtcaaccaagctggagtacagtggcacaatcacagctcactggagcctcgacctcctaggcttaagtgattctcttgcctcagcctgtcgagttggtgggactacagattcacactaccacacctggctaatttttaaaaattattaaattaaaattttaaaaattattgtttgtagagacgaggtgtcgctattttgcccaggctgttcttgaactcccaggctcaagcagtcctcccgcctcggcctcccaaagtgttgggattacagacatgagccaccatgcccagccctctttcctttttttcagtgaagtttaaattcatagtaaaatattgagatgtctaatcagcatgtaaatctattgtgtattttaacacactgcagacagaatgcttgaatgtatgtacttctaaaaaaagaaatagtcctatttcttaatgagtaataccaaagcccagtgattttttttttaagagtttatgtcttaatttggcatcattacttcagtaggaatacttgtggagaaaatgttaatttaatatttgtcttttaatttattaacattgaacttaatcttttgattttttttctggttataaagtgttacacatttattttagggaattcagaaaacagaagagtttagaaaagaaaatttaaactacttctcagcattaacgttttggtgtatttctggtctataaatgtgcatataatttatacatataggtgtatgtaatgatttttaaggaattttatctcacagagttttttttttttttttttttttttttttgagacagagcttcactttgtctcccaggctggagagcagtggtgcgatctcggctcactgcaacctccacctcccaggttcaagcgattttcatggctcagcctcttgagtaactgggactacaggcgcaggccaccacgcctggctaattttcgtatttttagtagagacggggttttgccatgttggccaggctggtctcaaactcctggcctcaagtgatccacccacttcagcctcccaaaacgctgggattacaggcatgagccactgcacccagctatctcatagagttttatgtcctgaccaatcatgagcattttccatatccttaatattctttaaaaacattatttttttttgaga

SEQ ID NO: 117501 - DNA, 1289 bp, Homo sapiens
tgaatcaggttattccagggaatgtcagtttgttgtgtgcatctgtggatgtacatgcacactacacatgtgtgtacactatgaacatgaacatgtaagaccttaggttggattcaggattgaggtttcatttaaagggatgattgccaaagaagcttactgcatgctaccagtgctatagactaattgtaccaggggaacagtgagaggaaaaaggaaagtggggttccagaagtagatttgggtaggctctctgggcggtgggataattatagttgttttataagcccactgtagtatgcctgttggtcagatagtgctaagtaacaaggattgaagggccatgtagtttggaccctgctgataatacctggaacaggttctgaatttggtgttaatctttcttgtcatttctttcctccattcctcctcctttcctctccctcatttttctccctgcaggtattaaactgacactgtcagctcttctggatggcaagaacgtcaatgctggtggccacaagcttggtctaggactggaatttcaagcataaatgaatactgtacaattgtttaattttaaactattttgcagcatagctaccttcagaatttagtgtatcttttaatgttgtatgtctgggatgcaagtattgctaaatatgttagccctccaggttaaagttgattcagctttaagatgttacccttccagaggtacagaagaaacctatttccaaaaaaggtcctttcagtggtagactcggggagaacttggtggcccctttgagatgccaggtttcttttttatctagaaatggctgcaagtggaagcggataatatgtaggcactttgtaaattcatattgagtaaatgaatgaaattgtgatttcctgagaatcgaaccttggttccctaaccctaattgatgagaggctcgctgcttgatggtgtgtacaaactcacctgaatgggacttttttagacagatcttcatgacctgttcccaccccagttcatcatcatctcttttacaccaaaaggtctgcagggtgtggtaactgtttcttttgtgccattttggggtggagaaggtggatgtgatgaagccaataattcaggacttattccttcttgtgttgtgtttttttttggcccttgcaccagagtatgaaatagcttccaggagctccagctataagcttggaagtgtctgtgtgattgtaatcacatggtgacaacactcagaatctaaattggacttctgttgtattctcaccactcaatt

SEQ ID NO: 117502 - DNA, 1024 bp, Homo sapiens
tcctcctgcttgctacatctcatattctccaaatgttttataatgaccccatactcctttataaacatttaattatactttacatatatccatttatatatacccactgtattatataaacattttataagcaatgacataaatcagcaaaccagcaccacaatttttttaagataaagaaccgatttcacacacaagcaacacatacctggctttagagtctgagtgtatcctaaacctatcaggctggagttgttcactttagcctaatcaaggaaatgacaaaacagagaaaacattaagtataatactttgcacttccatctccaaaattagagctttttagtcaaccaaccttggactttagaatcaaaatttttcatgaccaccttgttcatgagattcattaaattcaatacaaaatacatcaattttaggtgcatacctttctgttcaaagggtgtgctgagatctgacacccctcataagaacaaagcagagagaaggaaggcctcttaggggccagtgtccttttgctcatataaataatgaggctccttttctcttgtttttaagtgcttgctgttaagggagccaaattcggttctagtttaggagacttaaaaagggctgtccataaattacacaaaccagtacagacaccattctgcaacatgagattccctcatttcaccccaaagagatacagccgccagtgccctgtgacaacagaaatgagcccaataggatttactgcaaaaactgtgtagtagttcgagggcctgtgagcaatgccagagactctgcaagatgccaactgactattgatttcttaatatgcaatgcaggagctgaaaaggagaatgaaaagtgaggcggggcggggggaattatcaattagaaccctagatttcagagtgccccttttaacagtccgcatgatagaacaggaactggtattaatggaagaggcttaacagtaagccagtctggttcaaatccagctcccagcactttcctgctg

SEQ ID NO: 117503 - DNA, 1800 bp, Homo sapiens
cctgcctaagatctgtagttggccatttctccaaggagcactggttccatttaggaggaaatggtctaggtgctgaggatgaagcattaatctcaatgtgaataaagctagaagtgaacagtgctgtgtagtccttgaggctctgagtggatctggttcctcctgtggtctctgctgagaatgcagcttcctgtgggagatgtcgatcttgtaactgaatgatagagacaatcagataaaaatgatccatgttgtatttgttggatgtgatcttgttctccagtgtgtacttttggtaaaagacatggtaataataggtctgcaggtgacactattcacctgctcttcctaagggatgctgggtcttgaggaaccggcagtagagacactgaactgcttatagactcacatctggtatcatcaggttggacctgggatactgtctggctaactaacacttcctggcccccatgactgcagagttccaggttctacatcagtacccggttctctgaaatatgtactcattggggtctcatgaatatggaattgaaatccattttactgttgtactcacttagagggaacatagcctttgtttccttacttaaccatgtgagccacagagtaagaagaaaaccgtctctttaaaagctgctatttaggtagctgccttcatggcagataaatcttttccacaggtttggaaaatatcaaagatgcatctgtttcataattacatggtggctttctacctaatgaatgcctgtgtaggctgctacgttaagcatacaaagaggataggagaagaaagttacttcgtatttatttttcaggcttttcctgtctgtgttctcacttcgttattgtggggtttctgcagactgagtccctgtggaagagaggttgtgtcctgctcattgtggtacagcagtggcttaagggagaactggagccctgacttcacccccaccccactccctttatttgacctgggattaaaaaaaaaaaaaagacaacttgcatttcaaggtgagttagcttctgatcttaatataacttattttccttcaggaaaaaaaatgctaaaatcaagacagggtacaagcgggagcacattaacctgggctgcgacatggatttcgacattgctgggccttccatccggggtgctctggtgctaggttacgagggctggctggccggctaccagatgaattttgagactgcaaaatcccgagtgacccagagcaactttgcagttggctacaagactgatgaattccagcttcacactaatgtgtaagtgtacatgggggcagcagggtgggaggggtggggttggagcatgtgtggtaaggggattgcttttcactgtttttttttttttttttttaagaaagcccagtttttaaccactgtaaagtgagtttgttggcattagatgagccacatggcctgctgctatcttttgtttcccacctacccatttcctggagtgtcttagatcctttccactctgtgaacagtatatattgccacaggtacacaaagtggctgattaattacagcagggacatggtgtcagtccagagcgtgtccattccctgcagtttttgttttagttaacaaaacagctctctttctctgtctaatgcctgaggattagcctgctgggcttgatgacatgtagacatggtagacaaatttaggagctgattatctcagttacaaactatcttctctgtacagtgaagcatgtaaaagtaactattggacagtatggtgaagggaaacagt

SEQ ID NO: 117504 - DNA, 1183 bp, Homo sapiens
aattcacctgcattcaaccacataagtgtttttaaagtaatcttagtagtccctttgaaattatgtgtgcagtaattgttggaagaaagaagttttgggtttgaattaccgctgtgtcagctttagctcagtgctttttctctgtactgccctggagccaggatggaagggagatgctttcctgtccagactgaagagttacagggaggaaggaagctgtctgctgacaacaaattccccataagatttctttacatagcaggctcctttactcccatctgtactttaaatatctatttgaattgtagagttagccttggcccccccacattcagggtcttgcctcttgcagaaaggcaagtatagtgtttaggagtgaagtgaagccaagtgagtgctatggtgcaggctgtgactcttctctctcctttgaaggaatttacaagctcaggctcagccaacactgagaccaccaaagtgacgggcagtctggaaaccaagtacagatggactgagtacggcctgacgtttacagagaaatggaataccgacaatacactaggcaccgagattactgtggaagatcaggtaatggctgctgtgaaaagatgtggatttattaattcgcatctgccagcctgccttgtgactaaatctagtggcaaatttcttttctgttcagcttgcacgtggactgaagctgaccttcgattcatccttctcacctaacactgggtaagagtttcatctgttttctccacaaggatgttctctgatgttgcaggtggtggaagccctttgtgacaaaatgttttgggggctgacagcacctaaaatatggtctccgagacctggcgatttaagtcctctggttttgatttggtcccaggggtcgtatccacatctatgcactaacagactatgctataatgagcacttcctaattcaggactggtgtttacccaacaaacgatttctaagtgccacctgtgcttggccctgtgcccatctggagatctaagggtgcccaggccatgattgttacccgccaaggagctcactttctaatagaggattcagaccagtgtttagccgtgttttgtaataagattctgcattttgttagtgttctcctagtttctgccatggaggttgcaggatttctgttcagtaatagccattt

SEQ ID NO: 117505 - DNA, 1004 bp, Homo sapiens
gattgacttagtgatatgcagcaatcccaagtagtcctttgatggttggttttaaaaataaagttacactggagctcaataaatatttgtttaatgtatttggaggatgtatttgggttttttccatgtgaagagctgccaaactggtttggttttactgtattctctatgagaaatatgaagtgggttcccataaagtccaaaagttttgtgaaaagttgggcccatcctggcatatagtaggtactccataaatatttgttgaatgaatgaaatcagagccacatggaaaatgatgttcccatgaaaagctctgatttctattcggtacatttaatgtcctagtagctgacattttgtaagatgatatgttttattggcaacagtcctacaattcagtaaagtcactggctcatgggaatgtgtctttgacagtttattcattaagcaaatatttcctgactcctactctgttctgggcctgggctcagtcctggggatgctgaggaggagaggtctaaattgttgatcatctgtcaacaaagactcattgagtgtctcaagctctggccacaaaatgaaggacaagacagcaagggcttcttggcccatctgggaggataagctacctggtagtcttagtgctaggtgatttttattggttgctaattacatctaataattgttattgatggaaagctaatttccctaattatcaatgcatttattctggtgattcttttatcatagcagaagatggctgtgccacccacgtatgccgatcttggcaaatctgccagggatgtcttcaccaagggctatggtgagtgttgcagagagggggtgcctttcagctcacagactgagttggcatgtttgagactttaccgataactgtttaggagacctgggtaggtcagctgttctgaactttcacgtgagggaaaaaagaagctttcatttgtgtggcaattgtagcaactttggttgtgcacccagttgga

SEQ ID NO: 117506 - DNA, 1642 bp, Homo sapiens
aggccctggcctcggtgggacggggacgccaaggaccgcggggagccgggtgcctcccccaccgcagctcaggaggcggcagaacccaggggtggagagtggggggcgggcttcccgggcgccgccgggtcgagtcacttccggtgccctgacctttataggagtaaacagacccccgccatccccgcctcccctcctgcccaggtgactgactaatccgccgccttcaggagacagaattggccaaggtttcttggttggagggcggggggtgggaggtcaagtaggggccacctcggggaggcctgccctccaggtccttcccctaaaacttggcactgccgatactcccagcccgttccttcccaagtcaggaacttgcaggggaccccttggcaattctttttctctcaagagcagacagccttcagtcccagccgctgccagggctggtgtgtctgacccagctgtggtttttccaggcctgaaggccccggagtgcaccagcggcatgtacaaagagaccgtctactccgccttcaatctgctcatgcattacccacccccctcgggagcagggcagcacccccagccgcagcccccgctggtaagtggaccccgcagccagtgccgccctgtgcttgcagcctccttgaccaggtaggtgaggcaccggcaagagacttctgcctggaacaaaatagacgagactcctgtgctggtcttttctcccatacacacccggtgggatctgaaccaaaaggagaactttgctgaaggaaggaggggccgccctggggcacccccctgccctctgcctcttggcttttgtcttcccagcttgctcataagcaggtgcaggctctgtcctggtgctgggtgatgccagggtggggtcttcttagagaacttttgagccgagaccacccttgctcctcgctgctctgatctgagctcagagctttgcaattaactttctaactagcccaggaaaccctgagcctccttggcgcttggaggaatgggcaggaaagctgatctgttcaggtcccctggttgtgcaggagaaacgtgctgtgttcggtcggctgtgtcctgacgggcgtgagtgtaccgttgccaaagaaggaccctgaacaccatgtgtggaaagtgggttcttaggaaactggcttggtctcagacataccaggaagggttggcaaaggtgctacaaatcagtgatgttgagaagggaccagtttaattaattcgtgaattaaatatttttaagtcccagtgctttgaaaagatttcatgatctttacaaaccatgcccattggtacagatgacctaaagtgtgaagagcctattctgagtgttttggagcagtacagctgcgcttttaaagaaattcctattcgtgtttcacactctcctcagttggtccaagttggggtgaaggtacgtggaaggtttggaggactgtggtaagtgagtgttgggtgtgaatgtaagcccagtgcaggtggggctggcaggctggaggctcgcatggctacagtggggtcaccagagggaggagagttaagtgctaggctatttcagaccaggagtgaagagggtggttctgagagctgctgcatgccaagccagtgggaa

SEQ ID NO: 117507 - DNA, 1054 bp, Homo sapiens
ctgtacacatcactctttcgtttccaccttgactattttcctgaagcataatacccaaacagaattatggggtcaagaggcaggaagagtcgaggcgttttgcttccctggtgccccagtgcgctgtaggttctgagctgtgagtgtcccatgcttacagtggctcagcacagctgatatggagttctgcctttgttgctctgcattgaataggtttgtggtgggcagtgcgactgtgagctattttgaattacctttctttccttggaaggctgcgtagtattggctatcacatttggaaaatctgcagcctcttttctgctgcttccaaggtgggactttgagggtggctccctcaaagccttgatgcctttcaaaaccaggagagcaccatgaagggggccgatcctgcagacccctggttagagccaggcttcctgccccaccctgtcctggggtcagggagggatggccgggaatttagggcggtttgcccctcctctggaaagtcggggtgagtactagctcagcagggtaggaaagaccttcccaaggcccagggctggcaaagagccctggattggttgctgagacctgggatccttccccccaggctctaccaggttccaccaagccagtttccacggcagcacacgggaatattcataccagcactgccacctcctcagctactctgagactcaagtgagtggggctgaagcagatgagggtggccccctttctgggtctctggagaccataccccatccccagcccctccaaggagggaggtttagctgagcttaagcagggctctgggggtgctggtttaaagtcgcataactgctgaggtcaggcaggtcaggggtgggcccagagcctcctggaggtgcaaggcaagccgcagcccccctgagcctctgcaggctgttgtggtcccaaagccatacagtcacacccctcacaccttgtgactggtgcttcctgctgctgtgtacaaacaaggctctggtggaggaaacaggtgttttatcaggtcacaggggcccccacc

SEQ ID NO: 117508 - DNA, 1133 bp, Homo sapiens
gtccggtggaaaacccgctaagcaggaggcagggcagcacaggcctctgagctgctagggttgactctttgccctgctgtgtgggttccctctccttatggtctctatgaccaactgcaaaccactcttttccctaaaaataaacatgcttatgggactgggggaagctttgtagctatcaaaagaaataatagggtgttttagaaaattacattgtgttttaaataaccagcatgaaagtcattaagtttgaagtttcattcaaatcagatggctctgtggctggcgtggtggccaggcaggcagaggtgggtgggccctctgagatgctgagaggcagcctgtggagagccttgcggcagtggcagcagtgaggtctctgctggctgggtacagccaaggtccaggcgggctggccaccgagtgcgtgcctggctgcagcagccaccccagagctcgctggcagcctttgaggcagtgggcatccccatgggcgggggtgtggggacagatgaacctgggagagccaaggccacagggtcgatggccatgttgcagggggtggtgttagggatggagttgggaccagaaagggccggagaggatctgtggggcccaggccacatctgttcatttcaccactgggttctcagtgcccaccctagggcctggcacacagtaggtgctcagtaagcagttgttgaaagaataacaacaactacagtagttcatgtgtcaagcacttcccaagtgccaggcctatgccaggggcttttactcatatcaagattgtacaagtcggtagggcacagtgcctcacgcctgtaatcccagcactttgggaggccaaggcaggcggatcacgaggtcaggagtttgagaccagcctgaccaacatggtgaaaccccgtctctactaaaaatacaaaaattagccgggtgcggtggcacacgcctgtaatcccagctgctcaggaggctgaggcaggagaatcgcatgaacctgggaggcggaggtcacagtgagccaagattgcaccactgcactccagcctgggcgacagagctagactctatctcaaaaaaaaaaaaaaagatcgtacaagccaagaaagtaggtattattgtggcct

SEQ ID NO: 117509 - DNA, 1105 bp, Homo sapiens
ttcaggtcaccctgaccagccaggctgggaaagggagagactgtgtttagaactgggacagtgtcctgtgcacaataaccataggccctttgcagtgtcgtgggtgtcatcccagctctgccacttactagctgtgtgaccttgtgcctcagcttccccatctgtcaggtgggcgtagtagttgtacctaatatcataggtctatgttaggagtatctgagttcaactctgcacggtgctcagaactctgcctcacacatgggaaatactccgctcacattagcacatgcttttctctaggcctgaagcatttttttgcctggcacataataggagctcataaatacaccctgaccaaatggtaccaatagcgaccagctgagcatcctgatctcttggggggctgtttctgctggcacagtcccctgccactgggaggcgttcttgggagggcctgaacaggcctcacctatcccctaccccccacaggcttgaggccagaggaaacagcaactttcttcgctgggaaagtgttgtggggctcaagcatttgggggttttcagagtcaaccgtcagaggcgagggagtttctctgctggcggtggcaagggctgtcagcgtgcacacagcctgcgagcagaccgctgcggtctacagggaaaatgccgactgtgtttatttttcacctgagcctgcaggaagttggggggtgcgggttgggggggtggtgaagggggatgccaagccaggcccaagcttgacttcagaacagaggagaactacctcaggagtctccgtttccatctcctcctgcttggccctgcctggctgtcttctgggctcctgtctggtaaacaagaaggcacgcaggagcacccgaatgaggaattcctagccatgggctaaggaaatagtccagaagggcgaggagcccctgtgggacagtggactggagtggtctgaggaagtctttgagcagtaagagcaatgcagtggcaggaaggaccacttttgctgggagtgagccctgtcaccaggcatccagtagaaggctggacaggcactggtgggacagagatgactctcagggtagccctggggtgt

SEQ ID NO: 117510 - DNA, 1324 bp, Homo sapiens
gcctttcctcctctcagtgagaaaatggaaagtggtggttgtgatggctgattcacctcagcctcaggcaaagtcattctgaaatccctcattgtcagctgtgggaaacctgctgactcaaccctggggggcaggtggagccttggctccccaggctgggctcccctagaccaggggcctgcctcctgcccagaaagctaggctggagtcccccgagcagagatgccccaatgcctccatgcctgagtgacttcagctctgcctactggccccctaatgtcttaggcaagtcaccccagccctctgccctgggttcccttgtctgtcaaaggggcactattatcacactgggatcctcctgaataaactagtttatgtctggtcctctagcaaagctggtgggatcttaaggcccctgtaggaggttctaggatgcagtaactgctgatatggcctgccaggtcaggctagcccactcactcagcttctctcctctgcagttcacaggcctctgcagacccctgacctctctggcttctactccctgacctcaggcagcatggggcagctcccccacactgtgagctggtgagtgtgggcccaatgggaaaggggtaccgtgtgctggtcagaccaagacctgcctgcccttccatttcctcctccatccctcttggctggccaccctgctgccagctctgtttagatgccaggggctggccagcaactctgtcctaacctggctctgagctaggggtcctcatgtaccccggcctgcattccccagggagcctgacatactccctttggagaggcaggagagctggtccctggtcccagccctgtctccctcagtgtccaagagatccccttagatgggagaactctgggctgctaagggacctccagggccatatgagtaactgaggaagaaaggtgggcccgagcagggaggggacagcatgagtggctaccagagaggctgctgcttctcagctcactggcctcagtgcctactgcttttggtcctttccttggctgagctgcttgaggggcagtgtccctccctgcccctgtggtgcctgcttaagcccaagcctctgaccagcctgcttggagattcttaaggctggaccaggaaaaggaagcctggccccctaagccagtaggcctgactatgggccaaagggcctgtcctcagctggagttgggccttggcaggctacttggccctttactcatcaacgatagtttgagctgcgcaggtctctagcctatttcagagagctgggctgtggcagtcacccaacagcaggaaaacttg

SEQ ID NO: 117511 - DNA, 1098 bp, Homo sapiens
acctgctcccagcacactacacagacacactgcaaaaatctacatagattgccattcagatggttactacataggtcccaagtagcttttgaatctgtccccttctcacgtccttcccctaccaacccagcctcaggagcctgtggctgccctgtgaggcctcatccctctcctgcttgacccttccaggcctctctccacacaatagccagagtaaccattagagacacctgaatgttcctggcctgcttcggctgaaattcccccagcgtccaaagaatagaacccaggctgctcccaagggcctgcacagccctgcatgagcatcctgctgctgttgctagccccttctcttctcctctgcttcctgtccctctccgttccccggcagccccagttatggctgttcccttgttttcttctcgcaaaagatctattactctttccgcgaagctctccctgacccatcaggcctggtgaggtctccttggggcttccccatcactcagctggcccattaagctgccggtgccatgtctacacttgctatactgggctgtgagctccagtgggcagcaaatgtctgtggaatcccctgccattgcatatttgcactgagtctgtcactgaaggagtgacctaagtgaagggatccatgtacacacacctcccacttcactttcttgctattctgtggagaccattctgccccttactgcttgcacaggtattatccctgagccagcagcccctaagggtcagaggttggggacttaggtaaaaggtgctgtctcagcttgggcaaagctcaggggatgcccaggagagtccttctaagtagggatgaagaacagaggtgagtgcacacacatctgcacacgggctgagccacatatgcctgtactgtcctggcctctgtggtgctctgctgcacggtgtggcccaggctgaggcctcttggcacttgcactagcttcattctcaggcacaggacagcagggggctgcaaaatgacagacggacagatggacaaacgactaacacagggcaagcactggcctgggcatggccttgtgtgggctctgaagcctgggcaac

SEQ ID NO: 117512 - DNA, 2357 bp, Homo sapiens
ggtatagccttcagccttatcccttgaaggaatgtaggtcaagaatgaagaaaaactggataaaatgggtagggagttggggaggaggtgggtggccctagggcataaaaggctggatctccatggtcttccttgggcccctctgcagcctccatgctgcaagggccccacaagccacagagatgagccagattgacaggactccctccctcccattcttcccactgcctctactgcgtacctgggtgcccacctttcctgatatcttggctctgggctcttgggctcccactggggctggctgtgccatggagaggcccactctgcctatgggggctgtagggtgtctataactggctaacactgatgttacctcttctttctgggccctgctctgccccgctgcctgctcgccctctgccctgctctacccctctggcatggctgtgagcagaccctggctcgcctaagaaatgccgtgctcgctttggcctcaaccagcagacggattggtgtggtccgtgcaggtgggtttgtccccaccatcgttctccctttgctttaagctgcttccctgactctgcacatgttccactgggcctgcagcccactcctttggcccctcagcccactagcatactcagcagattgggagcccaggcctcctgagaatagtagtaaatactgaacacagcgcgtggagaagaccacttgggtctaagtgcaggaggattggagagaaagacacagaatgttccagaaaggaaggacagactcaagaaggcagctctgatgccagtgggcctagcaggtcctcagcaaacagacagctcagccaccactaagggggcctggagcccattctaccaggcctcaaagtcattatggcccatgggctccctcacttcctcttcaagatgggatccctgcctgtaccatcctgagcccttaatctgaaaaagcaaggtgacaacaacacagaaccatctggttgccaggtagccttatgacttgctatcttgtacctactgataccaaagggctggagaggctgggggagaggacccagggggtaccctgggctgtctgagggaaagggctcatgtgtttcaccatacaacagagaaatacttgtgggtgtgacaaggtttacccaacaagtggttaaagtttcctcagtcagtttcaggccaggcctggcagggctaagatagagggtactccaggcagtaaggccactggctctaaggaacacttgtccagcctctcagtgtacccaccacactccctgtccaagggcaaggaggagtttggggtgtgtctgtgtatccacatacatatgcacggtgggaaacaaccctgtcttcaggggaagttctattccattcattccatcagagacaaactggcccagagaactcaaggatggtaatggacaagagtcactgtccatgtcttcttcctctagcccagcttgaggactgggatggctgggcaaggaagccataggcattgcggccccttgccttggtgcagatgtgagtcccacaaacacatctggagaagctcaaaggccgggactgggagatgactcccttggaagacaggagagatgactcccttggaagacagatgacagcccataggcctagtgacaaaaggcccctttgccaccttgtggctgttctgggaactgcacctgtcctaggtctgggccagaccaagcagaatggcagtctgaggacactgacttaccacccaagtcccaggaagagaggacaaggaatcagccaggcctgtgcaaaggcagcattttttggttgtggtgtatgactatgaattcaccctctgtttacagataactctcttcactattcctaggaggaaaaagaaatgcattcggtacttacccggagaaggccgctgccccagccccgttccttccgatgacagtgctctaggctgccccgggtccccagctccccaggactcaccctcataccatctgctgccccgcttccccacagaactgcttactagccctgcggagccggcacctacatccccaggtctctccactgctctcagcctcccaaccccagggcccccacaggccccccgcagcaccctgcagagcacacaggtacagcaacaggaatctcagagacaggtggcctagcaggcacaggacacctggccgcctccaggagcctaccccctgaaagtgacagagacccagatctcatggaaactggccaggggtcctgttaacgtcatctcagggtccagaccctgaagatttcagaggctgcaggacttctgcctgaacctggggtcatcgattcaaactgctccaa

SEQ ID NO: 117513 - DNA, 1002 bp, Homo sapiens
ggctaatttttgtatttttagtagatacagggtttcaccatgttggccaggctggtctcaaactactgacgtcaggtgatccacctgcctcggcctgccaaagtgctgggattacaggcgtgagccaccgcgcctggcccggcagccctttttctttggatttaggcaaaaaacaaaaattaaattaaagacttgtttttcaaggctgagggttgaagcttggctcaaaaatgggttaacgtaggctatggtgaaaacctgttgtccactactggaggttttctgggctccttgatctagttgtaatggtcctctgtcccgcagccccatggggaaactggagccggccaggcggactgaatgctgaaagacaggctctggctgtcatgaggttttgggtttgccctctcaagctgcccaggagctggctggactgccatagatgaactggaaatggaattgtgaaaaaggctctgtgaatggggaggggtgcacactggatttgggccatgacttctttgaactgttgactgcagctgctagtgacaagcctggggccagagcttcttaggctggtgggtttctcagggaacacttccaaataatttgaactagagctagatacaccctcccctccccaatttgcctgataaggtagtgtcagattatttctgttgcttaggttgataggcctaaacttaacctattccattccccttcctgcttcttgcaagctcctgagatcatagtaaggggcttcctctggtccaacttatgagtagcagctggttttgtttttgtttttataaacagagcttctccatttccttagaagagctgtcatcttgagctttgtgcttgtgaccatgctcacatgttgtttgacaaaccagctcattcttggtccatgaagtgtctgaatggggagggtgtggcagtgggggatgggggagatgggtagagaaggtagctaggctcagttcagcccatctctgacctata

SEQ ID NO: 117514 - DNA, 2332 bp, Homo sapiens
aactagtaaaagatgaaattaactacaaagtaaacagaagaatgagaatattaaagggcagaaatcaatgaaatagaaaacaggtaaacaataaagtcaatgaaaccaaaacctgttttttaaaatgagatcaatatagtgctataactgcttacgtttgaactctttaagtgtggacaaatatttttgccaagacctgatgtggtatttgtgtgcatgtgtacacacatacacaacagtagtggccgttatttcacatttgagctagtatagtttggttaaggaagcagaaggattcaacattatagaggtataacaaagaaggtcacataaaagtctttcacagaagaacttaggagtgatttattcttctccctttaatttcttaaaattagcattttaagctttattagatacggagtgtcaatcattaactttggatttagtttaaaacatcaagtatactttaaggaaaacaactgtctctttacaggctgcaaactacttagacatcaaaggtttgcttgatgttacatgcaagactgttgccaatatgatcaaggggaaaactcctgaggagattcgcaagaccttcaatatcaaaaatgactttactgaagaggaggaagcccaggtaggtagcacacagttttgtctttgatcacatgctcttaaaaagggagtaacacctataacatgccagcaaaagaggtgactgtatcaagtagtcttgatactttagggataatatgtacttaatgtgtcttaaacatactcttactgttctgtctttatgaatctgaacacttagatgatactgcattttaagcataagaacaattagttttcaatgagaagagctcttgttaatgtattaacagttactagttttggcacctgcaactttctgtatagaccatacatatctgacatcagaaaagcaggccctagagagaagtatatactagggtactttagagcaacttaatgaggggaggaaatgaaagaatagatcagaatgattttgttgacatgactacagactgaaataatgtgaatgaattaactgaatttgctctgtcaactttagtaaattgcccattgcctttgctttgttcataatttcagcagggcagaataaaaaccatgggaggcaaagaaaggaaatccggaaatatagtcttaacctggtgttgttctaattttccatctgttcttctgactcaactcactggctatcgatgaatcagtaggtagtatttataagtcttaggaaagactactcaagttaaggtacttccctatatccatctcttttaggtacgcaaagagaaccagtggtgtgaagagaagtgaaatgttgtgcctgacactgtaacactgtaaggattgttccaaatactagttgcactgctctgtttataattgttaatattagacaaacagtagacaaatgcagcagcaagtcaattgtattagcagaatattgtcctcattgcatgtgtagtttgagcacagatcccaaaccttacggccaagtttcttctagtatgatggaaagtttcttttttctttgctctgaataaaactgaactgtgggttctctataagtggcattttgggctttccctcttttttgtaaagcaatgtctgcctagtttattgtccagttaactttagtgaccttttaaaagttggcattgtaaataaaacaacttgcaaaaaagttttctggaatagaattaacaaaatattatctttattcatgagttggaaactggaaaaaggcttcttgaagtaaatgttctgagtggagctactaggatgtcttccagcctcctgcagtcaaggagtaccactgtattgattagcctgtatgtagcagggctcccttcattgcatctgaggacttgttttctttttctttatttttaatcctcttagttttaaatatattgcctagagactcagttactacccagtttgtggttttttgggagaaatgtaactggacagttagcttttcaattaaaaagacacttaacccatgtgggatgtcatctttttataattagtgttcccatgtggagaaaattattcacactacttgcatgtaaagaataatttaacttttaacattaaaatatgtggtaaaacccagaaagcatccatcatgaatgcaagatactttcaataaaaagtaagttatatagtaggtagttaagtttgcttttgtggacttaaatgtgtctcttcacttaaatgggttgaatgtgtatatatttgttcagcttgaaaagacttagtttatatcctagctcactggaggctg

SEQ ID NO: 117515 - DNA, 1193 bp, Homo sapiens
caatctagagaagtatctgtagtgttagttttgcttctagtaaagttgagcgttccttatgtttggctattcagatttcatttattggctgtacatattaacccatttctctttaatgatttttgaaagattttatattctctcagctaatcattgttgtacatattgcaggtatcttccagtcattgtcctaacttttctttttgcatagaagctttttaatgtagtcaagtacagtactctgtctgcatggcttgcttttatctaataagatcttctcccttctagggttataatgattcttcaagcttcatttttgtttttcaagcttggctgttaatggctcaagtcaacctctagctagttattattccaatatagggataagttgtcccagcagtggaatgagtaccttgtgacaaagtgccacagaggaatgaacttttgttgttgtaggtcattcagtggtgcacccaccacaaggatgaccctcctcctcctgaagatgatgagaacaaagaaaagcgaacagatgatatccctgtttgggaccaagaattcctgaaagttgaccaaggaacactttttgaactcattctggtaagtttttaatgtgtaagatagctctactctagagcctttaaacacttcttatagatttaaatttgctaacttcattgacactgaattttaatactctctaaattcaaatgtaacgccatatttaaatccacatatcagtaacacactaaatgtaaatggtctaaacacagttaaaaggcagaaattaccagatcagaaaagcaagcttagctgtgctgtctgtaagaaacccgctttaaatatatagacagaactaggtttaaagaatggaagaagatacggtacactaacacgaatcaaaagaaagctggagtgactatattaaaataggtttggaggcaaagaatattaccagggttaaagaggattatttcatactgataaggggatcagttttttaaaaagacataacaattataaatttttatctggctagaagcagaacttccaagaagtgaaacaaaacccaatagaactcaaagaagtccacaaagtgacaatcatagagatttcagcacctctctcaattaatataactagacagaaatcaggataacttgatataacactattgaccaaattgtcttaat

SEQ ID NO: 117516 - DNA, 1034 bp, Homo sapiens
gagaccatcctggctaacacggtgaaaccccgtctctcctaaaaaatacaaaaaattagccgggcgtggtggcgggtgcctatagtcccagctactcggggaggctgaggcaggagaatggtgtgaacccgggaggcggagcttgcagtgagccgagatggcgcccctacactctagcctgggcgacagagcaagaatctgtctcaaaaaaaaaaaacccctctctagattacttacaatgccggatacaatgtaaatgctatgcaaatagtttttatactgtattgtttagggagtaatgaccaggaaacaagtctacatgtttagtgcaagacacagccatccattttttttcccaatatgtttaatctgtggttggttgaatccacagatgtagaactcatggatatgggggctgactcttatgttttgagacatagcctggttggtataagtattataatggaattaggaaatagaaactttcttctggttttcttagatttgggaatggatgatgaaggagatgatgacccagttcctctaccaaatgtgaatgcagcaatattaaaaaaggtaaggtctttaaagagtttaagtttattctgcttaatatataacaccaattgattaatacaagtaattcaacaatctatgttagaattttataatttactgcttaaaattacatttaaatttgaatgttcttaaacacttacttgagtgatgtttgtatgttcttaaaatatacagaaaaaagttctgtctgctttcttgccacagttgactattgtcatttattgggcatctgtactgtgtctacctatgcaaacacttccctaggaaggatgatctacatgtagaatatctggatcgcaggttggcttatatacctaaattttgatagatactgttaaatagtcttctgtaaagataccacttctagagcatggtggaattgaatcgtgactgtctttcttagatttataattttgaaacggctaaagtcaaaggaatatgtaacactttgttcc

SEQ ID NO: 117517 - DNA, 1090 bp, Homo sapiens
gtatgttgtgctcactaaaaaaaactgaaagcaatccaagtgtccctaaaaggcaggtgagtaaggttttatccagaagatgtagaaactgatacccgaattgctgcctaaatacttgctttggcattgaaagtgttctttattttatcttggtgcctgacacactaatctgtcctgtgctgcttcaaggaagcatttgccaattttaagaacatagggcatcttgaagacttaccatgccagctttgatcactgaagtaagtggacggataggcagttagcaacaattaagttattcttttactctgttgcctttgggaatcagaagtgaatggttttatcttaagtaccaatggcttacataagattctagcctcttgagggctggagtcttttgaatttggcaactttctgctttttttgttttccacctgcagtatctctggttatgggttttatgtgacttagaaaacaaaaataaaaccttttaatccacaggacaatcagaagtgagactcttggcacatttacatgtggattgaatgattagttcaggtccagggtacagtatcaggatacaagtgtctttcagaagtccctgaaactaaatagcttaaaggaatgactgttgctacttgtgcatttagtctgaaagcaaaaaatatcgtacatccttactttaaatgctagaggatttaaagaggattacttgagcccaagagttcaaaaccagcctggacaacatagcaggaccctgtctttacaaaaaataaaaaattagctttacaatcctttacagtcataaaagcctttattttattttattttatttttttgagatggagtttcactcttgttgcccaggctggagtgcaatggcgcaatctcgggctcactgcaatctctgcctcctgggttcaagcaattcccctgcctcagcctcccaagtagctgggattacaggcatgcgccaccacacccagctaatttttttttttttttttttgagatggagtctcactctgtcacccaggctggagtgcaatggcacaatctcggctcactgcagcctccacctcctgggttcaag

SEQ ID NO: 117518 - DNA, 1103 bp, Homo sapiens
ttgcattgcctcagacataaatgagcatattctgatgtactctttggatctgaactcatcttcacaggtaggactcactgtggggaaaatttctatcttatttagtagcgttgtttgttttggactgaccttcctcaggttcgcatgtagttaattgtggcagttaactgttcagatggagtccagtattcagtgggagacgaaaggcaggcagaaagcaaatacaaatatgtatgttttattaaatttataccaatagtgagttcagtagggcaggccttaaaagcttctgttcctagtagttatactttgaaaaaattttaatagaaatactcggagactaacttgtgaataactgcttacaacagtgctttacagggttatgtattgtaggttcttagaactttgtggtcaataagttagagccttctgatggactgtagttgatgaaatgtcatgtagaactctctctcttaaattttatatttaatgtcctttttttttagatgccttcaattaagttgcagagttctgatggagagatatttgaagttgatgtggaaattgccaaacaatctgtgactattaagaccatgttggaaggtaagttcattggaaaacctgggtgggaggaaatgtgtaatttgagatagtttgtgaatatcaaatttatatgagcagcagcctgtcataaggtgcttgagagtatgaagaggtaaagtttacatttttttctttataacttacatttttctgatacaggtcatcctttctgcattgtctgaattagtgagggtcgttctctcattaaatggataaaatcataaggtaaaataaacattgaagtgattgccaagccttaggcaatggttaatttctgttcaagtaaatttgaattcataagttccagtgatagaaattaaggtctttggaaaagagataccgtcctataatggtggctgaatagaacaccttatttcagtggagggagtgagctctgtggattgctgtgtagattttatttattgattgatttatttgagacagagtctcactcttgtccaggctggagtgcagtgatgcagtcacggctcactgcagcc

SEQ ID NO: 117519 - DNA, 1154 bp, Homo sapiens
tatgatgtgatagaacccgctttatgctggccatggagaattatttacaagtgcaggagcctttaggcctctttctttagaatggaattgttttgaaagcatttcaaataaatatttcatccattattacttaaaaattttgcactttattctactgtaacactaaaacttatctttgagtttagtattaccaagtgcatcgaattacagattaaccgattgaccagctgctatttagtaaggtctcaactcccttaagagtaacccaatccacaaacttgactatgactaagcacttatcttgagttatttgaaagaaatatgaaacggtcgtcttgcttttagagtaattttaatcaactgcattgttagatttgtgattctgcactgttcatttcagtactatctaatataaaaattacatgtttaaatgttttataattaaaaattgggctcaggttaaaatattttcttttggagataccttttgttgtggtcttgtcacaggaagggtcctctactctgcatccttctccattaagcagggacaactgcattattggcaagcgctaagcaacatggagaagcagacatgtttgtgaatcgcaaagtgaaatctgattctctccaactatggatgagtgagagtaggatatttcagtggctggttttaaaacatgctttacttttttgcttcctttgcctaacaacctgtttgctttggggttggcgacaattgtctcagagaagctgaatgaatattttaaccgatgtaatgggtcataagtctttgaacataaaatgggtgtgatgcatgttttaaatgccaaatgatacacttttgggaaaatatatgcgatttgtaatacaacacacctagaaaacttcagaggtgccataagttaatagtgacatcaccggattatgaatacttgagaagcatgggccttttaaaagttgtatgtgagttttaagaggccttgaattaatctgtaccaggtattgctattctttttgttgttgttgttttccttgtttgtatgttttcttttttaaaaaaagaatttgaagatggtaagaaattgttggacttttaattttaaatgcctttttttttttttttgccagaactcaagtcctttgaaattaaatgc

SEQ ID NO: 117520 - DNA, 1066 bp, Homo sapiens
acatacacctcaggaatgaacacacgcgcgtacacacacacgcagccccccccaggagtgaacacacacacacacgccccgttctgttgttcccaggaacacacacagagacgcacacactcgcccggttttgttttttccaggctttttaactggggtctttcactcggcttagggcaccgctgcctgaaagacctttctaggccagtcggggtccggcacccagttgacgagacagcgcggcgctttcagagctggggagaggcgaaaactcttccggccccccgatcccccggccagccgcccccggcagctccttgccgcctcccggcctgggcccgcccagccgttctcggcctgccgtcaggcgatctcggcggccagcccagccgcgatgtgacgccgcgcgccccggggtcctcggcgcctgcgccctctcctataaagcagacgccgcgccgcgctgcgacgctgtagtggcttcgtcttcggtttttctcttccttcgctaacgcctcccggctctcgtcagcctcccgccggccgtctccttaacaccgaacaccgtgagtagccgcccactgaactggaaagggtcgtggctaccggattgcgtgccggctggcctcaccgctgcggtttgggcctgcccgcggcgggcggtgactgggcctggccttctttcgggcccggtggatcgcgttgtcgaccctgttcttcgggagaccctaccaggttccgttcacctgccccgcccccgactcagcgaggcctcctctggccgggcgtcctcacggcgctccataagtgagccgaaccccgggctgggccttctctgcaccggccgagcgtcagccggcgcggagctcggctgcaaggcccaggctgcggccgggggcctctcttggtcttaagcctgctgtcccggggaccagggcgggggtggcggcggggttgtgaatgggggtcccttggctgtcgtgagcgtgggcgtgtgtcggtgtctggcttttgttgtggtcgggagggagagctgcggtggtggtctgaggccgcccggttcttg

SEQ ID NO: 117521 - DNA, 1034 bp, Homo sapiens
tggtatgttaaaagagtatagagtaagtgattcatggcttctgaaatacatcaatttgacgttgcagtcttgaaaaggcaatagctgacatatcctgaaccagcttgggtttccagtgcactcagtgctgaaataattgctgtgaagggttgagttgaattcacaatgacttaggacagtagtagctactgaatgttcaatctttgaaatgacagaattagcttatagtgaatattgtctagcactgagcatttccatgtgccaagcatgttacatgaattattgagttttctcaactctgttgagaagagcagagaaggttctgctattcaggcattctgatcgcagagttcctgattttcaggaagcattaggtttctcttgcctttgctgaaattcttattagtggtgtttgaagggtgggcaatagcctacacagctttagggtttagatgtgtcgcttagccccattcaggaagctaggtgtgtgatgggccctttggggagtgtgtggtgaggaaggcttgcatgctgggccttttgagtgttggcccaagtcaggtagcctggttacagcattctcaagagttcatggactgccgggcacagtggctcacgcctgtaatcccagcactttgggaggctgaggcgggtggatcacaaggtcaggagttcaagaccagcctggccaagatggtgaaaccccacctctactaaaaattaaaaaaaaaaaaaattagccaggtgtggtggcgggcacctgtaatcccagccactcgggaggctgaggcagagaattgcttgaacccgggaggtggaggttgcagtgagctgagatcgcaccactgcactccagcctgggtgacacagtgagactcgtctcaaaaaaaaaaaaaaaaaaaagagttcatggactaacctttgtgtctcaagggcatttatttgagccagagtttgaaggggagttaggtgaggttcagctgaaccaccacagcctaacaattgctcttgaagataaaagaattttcacagtg

SEQ ID NO: 117522 - DNA, 2573 bp, Homo sapiens
gttacattaagacaagccaaaattgaataggaagtgtaaagtttggaagactcatgttcttgatcttgattgtcactacatggaggtcgtggaacataaaccatgaatcggtcttgtttttcagcttgcagtttgacccagcacctcgtagaggcgagccacatgttactcgtcgtaccccagactacttcctgtaatgaaattttaaacttgtacagtattgccatgaaccatatatcgacctaatggaaatgggaagagcaacagtaactccaaagtgtcagaaaatagttaacattcaaaaaacttgttttcacatggaccaaaagatgtgccatataaaaatacaaagcctcttgtcatcaacagccgtgaccactttagaatgaaccagttcattgcatgctgaagcgacattgttggtcaagaaaccagtttctggcatagcgctatttgtagttacttttgctttctctgagagactgcagataataagatgtaaacattaacacctcgtgaatacaatttaacttccatttagctatagctttactcagcatgactgtagataaggatagcagcaaacaatcattggagcttaatgaacatttttaaaaataattaccaaggcctcccttctacttgtgagttttgaaattgttctttttattttcagggataccgtttaatttaattatatgatttgtctgcactcagtttattccctactcaaatctcagccccatgttgttctttgttattgtcagaacctggtgagttgttttgaacagaactgttttttccccttcctgtaagacgatgtgactgcacaagagcactgcagtgtttttcataataaacttgtgaactaagaactgagaaggtcaaattttaattgtatcaatgggcaagactggtgctgtttattaaaaaagttaaatcaattgagtaaattttagaatttgtagacttgtaggtaaaataaaaatcaagggcactacataacctctctggtaactccttgacattcttcagattaacttcaggatttatttgtatttcacatattacaatttgtcacattgttggtgtgcactttgtgggttcttcctgcatattaacttgtttgtaagaaaggaaatctgtgctgcttcagtaagacttaattgtaaaaccatataacttgagatttaagtctttgggttttgttttaataaaacagcatgttttcaggtagagcttaaactaaatgatgtgtttacttagtgcagtttctggttatgaatattatattgctatgtgtatattatatggactctttaaaatgattgacagattggcaaattcttaaatctttgtacattgttgagtcatatgttcttagagttaaatttgtctcagataagaaagtgttaaagcattagcctgtgtcaagttctttgagtgatactagtgaaaccaaatagaaaactattgttggatcatgatttagtcttatgtacattcacccgaagacaaaaatggtacttaaagtggcagtgttcaacatttaatgagtttttccccttttatccttcgaataggattagatgtttaaaaaaaagttcttctgtgggaactaatatttgatattttaacctaccagagtaaacaggaacacttaatcatacttgtgagtgtagtaaataaaagttttcttgctttgtgctgtgttgaatctggaaccaacagggaagttatagcatatcccctttctaaaatgcttgaggaacacatacataccgaatgtcttttctgatctaattgatagtatttttagtggcttgtggagttaattttccaaagcaaaaggccattagggtttctacatttcatttcatttcattcttttctttcacaagaaatacattctctgtgtgtctttttgttgctctgtcactctatgccctttctctccgactgaacaaatagcttatccatgtgcagtggttttaatacccaaacaatctagacaccaagcagctattttttccggtcctgtgatatcagaattgaccaaggaatacgtatattgtaattgacacgtggtggtatcttccaggtacaaattctctaaattttgtggttagcagaatgggacttgtgataagaatagcttggttttagcataactagggtttaaaataattgtttaattatagagactgaccgggctttggccatctaaactggaaagtgttagtaccctaccttcttttgaaaatggctatggtaaggaaaatgtgttagtaaattatgtattttcttgaaaaatacataattatggttggatgggaatcactaagttgggtgttaactgatgtctcaattagtaacattaggattttcattaataaacctaaaaagctttccctaagaacaggcctggcacagtggctcatgcctgtaatcccagcactttgggagaccagggtgggtggatcccttgaggtcaggagttgaagagcagcctggccaacatggcaaaaccccatctctacaaaaaatatgaaaatcagccgggcttggtggca

SEQ ID NO: 117523 - DNA, 1170 bp, Homo sapiens
aagtaacaaaagtagctcatgcattcaggtggatggactttgaggaaatgaggctggagatcctagaggcatattgcatttgttcctgggcagtgaccaacttaacaggcctttacctgtgactgacaaaattggtaaggttctggtctccaggattaagtatctacttctctagggaatggccacttaaatacttattcttaaatcatgttttaaggccactgcaagagaagaggctaatgagacattgtcatttacagcaaggcagatacatgagaagtatttcattctttggtggttgctgctgtttgttaaagcctttttttttttaaagtactaaaaaaaaaacaagttttgtaattagggggaaaataaatacatgtgtaccttacaggttgtataaagtacaggagattattaagtcatccagaaaaaaagcattaacatttcttaagcccctttggcaggggtgggaatgagtagagatttttttctctcttgagtgaagtaacatttagttgaattgagggagtaaagtaagatttttgtctccttttccttgcagggatataactggtgccatgaccggaatgtagtaacgattttcagtgctccaaactattgttatcgttgtggtaaccaagctgcaatcatggaacttgacgatactctaaaatactctttgtaagtaattctacctgaacattttcttgcattactgaatatgtagggttttggtttatttattttgagagagagggtgtcactatattgcccagtcttgtctcgaactcctaggctgaagtgatcctttcaccttggcctcctagagtgttggggttacaagtataagatacagtgcccagcctgaatacatagtttaaatgtgaggtttaagagtttaagggggccaggcgcggtggctcatgcctgtaatcccagtactttggaaggctcgggtggatcacctgagatcaggagttcgagacaagcctgaccaacatggtgaaaccccttctctactaaaaatacaaaaattagcccagcatggtggcgcctgcctgtaatcccagctactcaggaggctgaggcaggagaatggcatgaatccgggaggcagaggttgcagtgagccaagatcgcgccactgcgttccagcctgggcaacag

SEQ ID NO: 117524 - DNA, 2402 bp, Homo sapiens
cataaatcaaggagagaggccatcagaagaaaccaactgtgctgacaccttgatcttggacttctgcctctggaacagtgaggaagtaaatttctgttgtttaagccacctattctctgatgctttgttgtggcagccttagcaaaagaataccgggggaaaggatgtttctttcagtaaatggtgctgaagcaaatggatcagaatgtatcatagaactaaatgtaagagctaaagctacaaaacttctagaataaatcagaaaatctttgtcaggttagttaaagattcttagatataacaaaagcacagtccataaaaaattgaaaaatcggactttatcaaaattaagattatgttttttcaaaagatgacaccagaaaaaaagtacttgtattcagatatttaaaaaaaaaaaacttttacagctcaataacaagacagataattgtaaaatgggcaaaatatttgaatagatattttacccaagaagatgatacatgagtggtcagtgagcacatgaaaagatgcttgatatcaattgtaatcagggaaatgcaaattaaagtaactgagttactacttcacatctattagaatggctgtaatcagtaaggttgataataccaagtgttggttaataccggagattaaactcttcatgcattgctggtgggaatataacatggtctagctactttgaaaaacagtttgactgtttctcaaaaagttaaacgttaccaggtgatccaacaattatattcttaggaatcttcctaaaagaaatgaaagcatatgtccacagaaaaacttccatgtatatgattatagcaacattattcatagtagccaaaaacctcagtaacataattgccagttcatcttaactgtgaatagagaaacaaaaaatggtatagccatacagtgaaggactgtgcaactatgaaaaggaacaaaccactgatctatgccagaacatgggtgagcctcaaaaatattctaagtgatatttagccaaaagactacattttgtattccatttatatgacatttctagaaaagacaaactcaagacagtaaatcagtggttgccaggagctggagtgggagtggagagtgactgcaggagggatctttttgggataatggaaaggttctaaaactggattgtggtgattgttgcataactataaatttgtgaaaaattactgaaccgtaaagtaatttatggggttttaatagcccattgatttatgtttggtataaagttggtggtagagggagtttgattttagttgagatgaggtgggcaaacaccccatgggcatttaaaaattctgtagagctgtggttttggttcactatgatatgaggatgtgtgctgttttttcaacaaaattgtaactgcatttttttctatagaaagtttcttgaattttcattggtttttgaaagagctagttgtttatgttttgcattttattgttttaggttcgttaccgtgaacgcatcaccattcttcgagggaatcatgagagcagacagatcacacaagtttatggtttctatgatgaatgtttaagaaaatatggaaatgcaaatgtttggaaatattttacagatctttttgactatcttcctctcactgccttggtggatgggcaggtatgtggatctaaaactcattgctgattatttcagagaatctgctttctttagtgttcaggtgcttatgactctttccactcttaacacccctttggggatattttttaatagatattgatagcattcattcaaacttaaaaaaaatttaatttgacaaatgtgtccaacttttttaagtgcattattctttatatcaggcactgaactgtatggtgggatcacaggggtgggtgatgtagcccatttaccctctcagactgtttttggacaagtctgggagatgtaaggagctaattattggcctaggtagatgtgcacacaaaagaacttacaataaaattttatgagtatgaagatactagtctctggcaaagggcaggagtgatatccaagaagttttctcaaaggagctgtttgaagtggagtctggttgtgacagcgatggtctattaggaagaacaggagtgtactcaatagttcagagtgggctggagcaaagatgaaccctgcaaagtcaagtctcattcaggcagagcacagaaacaccagaggggccaagtgatgggggtgcccagctcattttttaaaatttttgtagagacacagggtcttgctgtgttgctcaggttggtctcaaactcctggcctcaagcagccctcctgcctcagcttcccaaagtgctggggttacaggcatgagccactgtgcccagccaagaatgtttacaaatttt

SEQ ID NO: 117525 - DNA, 1262 bp, Homo sapiens
agccattaaccatgacagtaataatctagactaggctgggtgcagtggttcacgcctgttatctcaacactttgggaggctggggaaggcgggaaggatcacttgagtccaggagtttaagaacagcgtagtcaacataaaccccatctctacaaaaagttaaaaaaaatagccaggtgcagtggtgcatgcttgtagtctcagctactcaggaagctgaggtgggaggatcacttgaacctgggaggtcaaggctacagtgagccatgatgcaccactgcactccagccgtgtgacagagcaagacccctgtgtctttaaaaaacaaaaatctagaatggtagaaatgataaccgaaaaaagcaagttccaaaattacatgcattacatgccaattgtagctttgcaaagtgtactgatgatgatctgaacatgaagcaaaagatggtaaagagctgttagggtggcaggcttccgcctttccctttaaataaattgtttgactttacctttacccaaaaatcttggggagattttttcccccctaggcaacagactgatttttattattaaagaatattcaaaatgataaatggctgtcacagactttcctaatattagagaagcagtgagatgtggttttagcgtgagctgaattttcttgattaatatctgaattgtgtaaagtcctacgaaatatttttggagatcgttattttctgcatctgtaaaatgaaggagttggactagatggtggaaggtttctgcggtgactccaaatactatgaaaagagctaacctgtgctaaaaacccaggatgaatcccagtgctcagaggaatgaatgtgctacctttaagagtatgcaagcagcctgggcaacctagtgagaccccatctcttcagaaaacaattttagccagacatggtgacatgtgctgtagtcctagccactctggaggctgaggtgggaggattgcttgagcctaggaatttcaggctgcggtgagctactccactgcatttgagcctgggcgacagagtgagatcctatctggggggaaaaaaacttactcatggaggttaatgggctgaattgtagcccccaaaattcatttgtctaagtcctaacccacagcacctcagaatgtgactgtatttggacaggtaattaaggtaaagtggggtcacatggttggaccctaatccagtgtaagtggtatccttattagagattaggacacagatggggagaagataaga

SEQ ID NO: 117526 - DNA, 1442 bp, Homo sapiens
aaagtttgtgaaaattagccagccatggtggcgtgtgcctgtggtccccactactgaggtgggaagattcctgagccaagaagatccaggctacagtgagctatgatcatactactgcactccagcctgggtgacaaaatgagaccctgtctcaaaaaaagaaaaaaaaagaatctttgagtgctgcattgtagttagaactctgaaggtaaggaagtagatacctgaatgtcctgttcgattttcattggttttatgtgacagctaacaattagtatttaattagatggctatttgataggtttttaaaaaactcctggtattgatgataggaatgcatattttttccctaggtaacagggtgagatagctaatggattataatcatatctcacttattttaatgggttcataaatgcctgcaattttatcttagactgagtctgccccttaagctacattaagtgtaagtaaacaaatctttgttaatattgtttaatgccaaatgtattgccttatttttgtctcccatctgtaggctaaagaaatcctgacaaaagaatccaacgtgcaagaggttcgatgtccagttactgtctgtggagatgtgcatgggcaatttcatgatctcatggaactgtttagaattggtggcaaatcaccagatacaaattacttgtttatgggagattatgttgacagaggatattattcagttgaaacagttacactgcttgtagctcttaaggtaatttcaattttatgttggggcatgttgaaatgggtaagacagtcctcttgaaagttttttttcccccagttattttctctatctgaatgttaaaacaaaattccacatttaggaatgcatatgttcaggttttggacttaaaaatcataggcgtctgcgttctgagtaaggggatggtacagaatcaaaacaaaaggaggagaatgaatgcctcagtcagattgtttgaaaaaataggctgggcgtgatggcttatgcctgtaatcccagcactttgggacgctgaggtaggcagatcacctgaggtcaggagttcgagaccagcctggagaacatggtgaagccccatctctactaaaagtacaaaaaactagccgggggtggtggcgggtgcctgtaatcccagctactctggagcctgaggcaggagaattgcttgaacctgggaggcggaggttgcagtgagctgagattgcgccactacacgccagcctggacaacagagcgagactgtctcaaaaaaaaaaaaaggaaaagaaaaatgttagagggctggtcaaatagatattttagttcagtaaattggggtatggagaggtaatataattagatttgtgtttttagatacttttgaagtattataaatatataaacataccaaatgtcaaaatgttttaaatcagctggtcac

SEQ ID NO: 117527 - DNA, 1108 bp, Homo sapiens
tcttagtataaatcatgatccagagactgagctctaaagtattctaataaagtataactgactttttatattgtttattgcaacttataaaatgcctcttttcagcagggcaaggtggctcacacgcctgtaatcctagcactttggaaggccacggcaggcggatcacgaggtcaggagaccaagaccaatcctggctaacacggtgaagccccgtctctacttaaaaatacaaaaaattagccgggcgtggtggcacacacctgtagtctcagctactggggaggctgagacaggagaattgcttgaacctgggaggcggaggttgcagtgaaccaagattgtgccactgcactccagcctgggcgacagagggagaccccattccccccggccccaaaaaagcctcttttcatcctcttggcttccacagtcaaatgtcatgcatgtgtgtatttgtttcatggtctcctaggcaggaagctgtaatgcagttagtttggagttgacttcatgaggaaacagaaaaggtgaacattcccactattcagaaacacaggttccccaaccctccctacgttctccactgggaccagaattgtatgttttcagaaaattggctgtaaggctaagttgaagctcatgtactgtagaaagaatgaaggacccttcaggagtatgtgggataacatttgtattaccagtctggtgtggccctgttttatggcagcaaatatgttccctatctcatggtaagtcaggtttgtcagagttacctgtgagatagcctttgcttagtttggaaggggtaagttaggaaaactaagagactgggtttggtggggtcttttatcagggtactgaggagagaggcaaagctatatgtaacagggagacactatttattctttctgctttgacccatttctcttacttcattatcatccttgcctgagaaagctgtcaacctccactcatacacaggcagatctgaattggatgagaaccatgaaggaggaagatttttgtttttgtgggcttttttttttttttttttttttgagatagagtctcacagtcgcccaggctggagtgcagtggtgtgatc

SEQ ID NO: 117528 - DNA, 1177 bp, Homo sapiens
atcataatttgttgatagtttaataatttggtgtgcagctttgcctcaggctcagttctataatcagcattacatcagtataactggccgggtatgtttcaatctacagattgaaaggagtaaatagtatcaacttgcttttgcattgactacagtaaacaatcttttattatgtgacttcagctttgttttagcttgggtatgatttcttggctttgtgcttaccaaacatgtggagaacgttgtttgatagccagatttttttttttcaaagaagttctttacctaggtatgctgttttccattgctttgcaagcactataaataaagtgcagtcattagtcattaaaatgttagttttaacatttgttacgtgagtatggaaaaaacaaactgcttccttctaattagatgagctgaaaaatatttgaccaagatgacattcttatatgaattgggtaatatgttgctgtgagtatgtgtgtacgtttcattttaaagggtgtttggctcatttctctagaagtgatttgaatattgaggacaagcaggtgggggaagcatgttacagaacattatttttatcatacttttataagatattgttctcagttacagatgcaactcaaagactcagaaaggtaaagtgacttgactaaaggggctaaaagtgagattgccaaggcttgtggattctaagcctaatgttctggtattgcttcacagatccccttctgttttcagaggtagtgttagtagtgaaagatgtaggtaaattggggccaagctaaattgggaagtcaacactttcataaaataaaacttttttttttttttttttttgagataaggtcttactcttttgcccagtctggagtgcagtggcgcaatctcggctcactgcaacctccacctcccaggttcaagcagttctcctgcatcagtctccctagtagctgggattacaggtacccaccaccatgcccagctgttttgtatttttagtagagatgggatttcaccatgttggccaggctagtctcgaactcctgaccttcagtgatccacccacctcagcctcccaaagtgctgggattacaggcttgagccagcgcgcctggccaagacattatttttattttcattgcttgaaagcttcctattcatgttacatact

SEQ ID NO: 117529 - DNA, 2834 bp, Homo sapiens
ggattagtccggttcgccgctgtgcgcactgcgcatgctccagctccatccttcccttcccccaccaccccgccctccgggagccacgcccaaaaagtcaaggcgcttcagttaccagccggctacgtcgcgcctgcgctttgacccccagtttgcgccccaactccggtcgtgcggccgcccggggagggctctgcagttgcgcagcttgctccccggcccttttcccctccgctccccgccgcctcctgacgccgggcgtgacgtcaccacgcccggcggccgccattacagagagccgagctctggagcctcagcgagcggaggaggaggcgcagcggccgacggccgagtactgcggtgagagccagcgggccagcgccagcctcaacagccgccagaagtacacgaggaaccggcggcggcgtgtgcgtgtaggcccgtgtgcgggcggcggcgcgggagcagcgcggagcggcagccggctggggcgggtggcatcatggacgagaaggtgttcaccaaggagctggaccagtggatcgagcagctgaacgagtgcaagcagctgtccgagtcccaggtcaagagcctctgcgagaaggtgagctgtagtacggctgcggacagccgccgcggggccgagcccgccgaggaaaaggcggccgtgaggagggtgcaacatggcggaggccgccggtccgggccccccgagtctccgagaccggcgcccatcctggccggcggcggcttcctaacgacccggcgccccctgcctcccgcgcagggattggttgccgccgccgcctaaaatggcgccgttcactcgactcctgggcttttgagtcagccggccttggcgccagacgaggtggcagggggagcggagaccctgtgggtcatcgtcagggacggttttgagggtgagctggcttggattctgcggcttgggaatggagcctgggcctctccggtgggctgagtaagagtcttgccgctggtacccaggcctagttaggtccagagctgcccagaggatcccccaaaggcagtcttgttaggccgtatcccagaacatacctaaaggtcacacagctttagtaccccttggtggtttgtattaaactcaccaagcgatcttctccagaaatcaaggtaaggggtgtctttaagaatttttaaattattctcttaacctaatttttacgaaggtcatggtggtagctataagggaggagtgtaacttatttttcatagttggaagaaatcgggaatttggtgagtcatactacataaggagcttttggattggaaatcaagtgtcggttgaatatgatttatatgctgactcaaagccttctctaagcttaacacacttggcattttgccgtttatttttaaaatgaacaacataaaatggaagagcggtaaattttgtatctttgttgcaaaaattacttgatagtattttgtggctgcaagtagtagtagtgataataactgtcgactgagattgtattccagacattgtgcttagtgtttaaataatgtctcacatacactgaaaatagaatgttgtagtccacttagtaacactaaactttatattagctaattcccttttgttttcccctgggggttggggaaacaggtagttaatttagctattagctttgtgttgtatttttaaattcttgtaactcagttttctaaagtacacaaaatgctgatctctgctgtgaacattttaacttcccttttcaaaattaactttgcagcacgtcactttagtacagaatagtggagtatcatattagcattttgtatccgtgaaaagaattaatggagaactattatcctgatttgtttctggtttgatgtgaaaattaggttcatgagtttgacgtatatgtttccaagacaggcttttttagaaaccatgttgtgaacaattggaatttaagtaagtcagatttagatttgtttctcccaagcctgaacaaaactactactagtggatgaggtggcacatcatctgttggagatgccttttaatggtagcgatgtattgaatctcctgtttctttaccctctcacgtcaaatgaggttggtatttattttaaaggtttaaaattggcctttaaaaatgaatgtatattgccaggtcttaatttctaggtactgtacatgatgatcttaccgatttttggaattcagtgcattatatgaaagacttttaagtcagtagttggccagttgactagtcttttgaagaaaacgtggaaaggagggaggtaatgacgtaactggaagactggactgcgagttagatttggacatgagtccttctgctcttacttgagtaattgtgacagactttgggacagccacttcacttgtccttgttttcctgtctataaactaaaatgtgttctgagattatacagtcaattccgttttaaattagtagtgtgtttaatattgaacatctattgaatatctaagattgcatactcttttgagggaaatgaaaagcaatgaagaataagtatgcttattgtcgaggagctatgaatctagtttgaaagaaaagcatggtatgaaaaggtgtgggagatggagcatggaagtagagggtttgtgttggaaactgttgtagaagataagataatactggatgctagagtggggtgggtgaagctgatgcatctaatattgctttccacatctttgtaaaactaagatgtagtgaggtaaatctccattgcttgcgctgcttacgcaaattttagttctgagtgccaaaaaagatggaaataatatttgagagtag

SEQ ID NO: 117530 - DNA, 1024 bp, Homo sapiens
tttatagtatttaaatatgaagataaccatgatttgctttaaaatttgctttaaaatgatggtgagggaggggtggggtatagataaaacaagactgccatatattgttaatcgttgaggccaagcaataggtaatgggtgtttattatattattatctctacttttgtgagtattgaaaacttcccataagaaaaactgaacatgcctctatgcatgcctgggggcttgtaagacccaggattctaccccaatatgggggatttcatgcatggaaacagactagcagagaaagtcatattcttaggaaaaatgttttgggcactccttaaatctttggtgactagaaatccacttgaaaacagaattcccttccctgacagtacctattccagtgttaggtacacagggtggggaggagggaaattgattggaattaagaaacctgattaattcagaattaatgcaccagcttcctctgaagattaggtagtattcaattttcagcctttcagaaatatattcgtcagcataaagacaggcgaatgggctgcatgttgctatgcagacgacacagtttggaagggccttctgtttgcttatggattcgctctcccttgaagaaaaactattaactcatgctgcagcctgctgctctctgcttggtgttggctatgtcaccgagcccaaaatagaaagttcttttactgcagagagggaaggaggtttaaatttatcaattcaaataacaaagggtagaattatactggcttttctcgggtggggagtagggggagataatgcctatttcattaggagaaaaagtgatctgacattggcaggggctgggaccagaagacaagcttgcactgtggtgattgggcttgtttcccatcctggcccccctcactccctccttccaacagtgtcacctctttcaggacatgggaaagcatctgagccactgggtaatcagttccagaaatatcactgaaattatcagactgggaacgattctctgaacc

SEQ ID NO: 117531 - DNA, 1004 bp, Homo sapiens
atctaagtcaaaagaaaaaattgttatggaataaaaaattgcataaaatattttagttcacacgtactgattcatattatggagaaacaagtgtaatactctatcttatctacattttgtaattttatagtgatacaagatatatgtgttttggggtatgtaacaaaagctacaccaatattgtttaataattattcagaaatattcaagtataatacttaataaaaatttctgctatgtgcaaggcatggtgctaggtactgagactataaggaggtaaaagatagttcctgcccttaaagacttctataatttaatcagaaaggagagtatatgaaaatcatactgaataaaaagtggctcataataaatgccaaggaatcaacacaaagtcctttccctggtagggaaagtttttttgaggaaatgggacatgaatttggctttgaaggatgtggagggtttagataagagggagaaactgttgtgttctaggttagaggaacaacataaactcaaaagagactaaagaaggacaaaggataaagggcaaagtggaaaggacaaagagcaaagacatgtgcctgtagagttttctgagcagaattggaaagaggtatattagaacagtaaattggaggtagattttaaagtcttttaggctaaggagtcaaaacttgattttgtaagaggtggaaagtcgtgaaggttttgaattcagtgtaaagaaatgtaaattttaatctaccactattgtgcagaatagattggaggactaagagtaaaaataggtctgttaggagttcaattaaggaattttggaaaatgtctgaggacccttgctaaaatgcagcaatgtgaatgaaaagtaaagttagaacatgctgtattgtaaaaaacaaaaaaaaaagacatgaggccgggtgcggtggctcacgcttgtaatcccagcactttgagaggccgaggcgggtggatcacctgaggtcaggggttcaagaccg

SEQ ID NO: 117532 - DNA, 2128 bp, Homo sapiens
acaactgcatatgtatttgtgtgtgtatataatgtagcatttttaattgaggttacagtctctgaaaggagatgccctttttggtgcaaaagtcatctttctaaagcttgaaatcagcgtatttgattagcactcatgacaaattcagatagtaaactagttcatgtcattgtcgccctggctccttactgtaatgctctgcttaattctgagttgaatgcatggcaccttttgtagtttccagagatctgcaggttacaagaatttgactatgacgaatgttggaaagccttgtgttgagtctcctgatctgagaggtggatttggtgttagtgcagagcctttaaaatagggactggcagaaaacctactaattactttttaaagccattgctgtttgaagcaaaaggaatagagtaaatctgctgcctaatactagtttcctagttaaatttaatgtgttttcagtcattttgtgtttacactgaggtttgctttttttttttttcttgtagccattttgcagaagtagcctggttaggatacacagtctttgcatgtttagagcagcaaaatcaatggttctgtaaaaatattacttgcttttgaggttttaaactttttttggtataagaggacagtctatatacatcaattctttttttttaaatatattttaattatactttaagttctagggtacatgtgcacaacgtgcaggtttgttacatatgtatacacatgtgccatgttggtgtgctgcacccattaactcgtcacttgcattaggtatatctcctaatggtatccctcctttctcctcccgccccacaacaggcccctgtgtgtgatgttccctttcctgtgtccaagtgttctcattgttcaattcccacctatgagtgagaacacgtggtgtttggttttttgtccttgcggtagtttgctgagaatgatggtttccagcttcatccatgtccctacaaaggacatgaactcatccttttttatggctgcatagtattccatggtgtatatgtgccacattttcttaggctagtctatcattgttggacatttgggttggttccaagtctttgctattgtgagtagtgccgcaataaacatacgtgtgcatgtgtctttatagcagcatgatttatattcctttgggtatatacccagtaatgggatggctgggtcaaatggtatttctagttctagatccctgaggaatcgccatactgtcttccacaatggttgaactagtttacagtcccaccaacagtgtaaaagtgttcctatgcatcaattcttgaagagataatattgaaagagggatgattctcaagccctttcaatttttagataatttggagaggtatttaataagtatatatacctggttaatatatttaagtcatatggttcattttagttcacaataacaaggaaatggagttagtctgtgtctcaaaatagatggtatagtgtctgtaggtgtttacgtggcctccttagtggccttaatgttcaactttttaaattaccacgctggatttccaggttacaagaggacccacctgtgggtgtcagtggcgcaccatctgaaaacaacatcatgcagtggaatgcagttatatttgggtgagttgaaaggtttaacaaataataggtgtgtgctgaatctttaagaaaagtaaacatataacaactgtctaggaaaagaaactgaggtggaatgagagatcttaaggactaaaactgcaagataaattagaaaaaaaaaatatttcaattagagttttggcccagcacagtagtagctcaacgcctgggaggatcgctggagcccaggagttcaccagcctgggcgatatagtgagacagtgagactctgtcccctccccaccaaaaaaagttttggcccagtctgggcaacatagtgagcccttgtctctacaaaaagtataaaactagctgagcatggtggtgcatacctgtggtcccagctacttggaaggctgaggcaggaggatcacttgagcccagaagtttgaggctgcagtgtgccatgattgtgccactgccctccaacatgggcagccagcagagccaagatcctgta

SEQ ID NO: 117533 - DNA, 2400 bp, Homo sapiens
tcatattgctgtaaaatgaaaagatgtcttttcctcttaagaatatacatatgggccaggtgcggtggctcacgcctctaaatcccagcactttgggaggctgcgatgagtggatcacctgaggtcaggagttcgaaaccagcctggccaatatggtgaaaccccgtttctactaaaaatacaaaaattagccaggcatctgtaatcccacctactcgggaggttgaggtaggagaatcacttgaatccaggagaaggaggttgcagtgagctgagatcatgccattgcactccagcctgggggacaagagcaaaactccgtctcaaaaaaaaaaaaaaaaaaaaaaaaaaatatatatatatatatacacatatgtacaaaatgactggtcagtattaatgaaagtttttttgtgctaaaattatgggcaagtttttttgtttggtttggtaaaaccaccctaaaaagaaagcttagaatgaaagttaatactttatgcctgggtctatgaaaatccagggctaaggtgttactaaactctatcttaaaactccacaaatcatcagaatgagtccctctttttctgttgaagtttatcctttccattcttgaaaatcaagaaaaagcagaatgagaaacttcttttaatcagaaatcttcttgttttcagaccagaagggacaccttttgaagatggtaagtcatactcattatgttttctatagtgttatgaggttactttttagtagaaaattgtaacaccaacatatctacttgaagccattttctatggttaataggccaagttaaaagtaaagctatggaaaatttatacttcataagggacttcttcccacagcagcttggtcacctccattggtaaccaatattaaaggttactttaatattttcctgtataactgtaagcctggatggcagtgtttatgttgagaatagtttaaatttaggtggccttaaagatatctctgaggtgaacaccagaagagtaaatcatgcttttttactttgttatctttgatattgacagggtgttgagctgaaatttttcataaacatacatagctgccagtagtttcaagtactactagcatttaacacccataagtagttatcattttgcataatctttggcatctcaagttgggtattttcatcaggggctaggaaaatgggaaactagttctaataccgaatttataattgaacttatcaaactgattttaaccaggaacttagacttttcccaattgtagtgttggattttaagaaattattaaacatctttgttatcattaacaaaatgacttcagaattaatccatcaaaaatatttatccgagaatactgactgcagcagtttgtaaggacgtaacctgaatgtccagtaggagaaatggttaagcaaattatgatgtatctggattctggaatatgtacctgttaaagaataaggtagatttggacatactgtcttaagaggacaaaaaaactgcacgataatgtttgtcgtagcatcacatttttagcaaatacatatatgcatgtgtgtctatgttaaagggttatatatcaaactgttaccagtgattatctgtggggggggtaaggagttgaaggaggtacttaaggacgttaccttttttctctacatcaagggttctcaagtgtgtgatccataaaccccttggggtcttggagaccctctcgggggacccatacgatcaaatctcatcatactaagactgttgacctttgcattgatggtacaaaaccaatggtggctataactacacctaagtagtttcgtatcttagaacaaatcaaggcattagacagtggcaccaaaccatactaatagtgattatattctttgcattttaaaagatgccagttggccaggggcagtagctcacacctgtatagccagcactttgggaggcttaggcaggtggatcatggatcacttgagcccaggagtttgagaccagcctgggggagcccttctctacaaaaaattagccaggcatggtggtacatgcctttagtcccagctacttgggaggattacctgagcccaagaggtcaaggctgcagtgagccctggtggagccactgagctccagcctgggtgacagagtgagaccttgtctttaaaaaagttaccaatttttcttaatttcttaatttaaagacatttttattagtattaggaagctctggacccttgagtatctatgtgggttttttttgtttgttttttgttttttgtctcgctctctcacccaggctggagtgcagaggcgcaatcttggctcactgaagcctccgcctccgaggttcaagtgattctcgtgcctcagccttccaagtagctgggat

SEQ ID NO: 117534 - DNA, 2555 bp, Homo sapiens
ctcatttttgtacttttagtagaggtggagtttgaccacgttggccaggctagtctcaactcctgacctcaggtgatccgcccaccttagcctcccaaagtgctggaattacaggcgtgagccaccccacctggctacagttatttttaatgaagattttctgagttaaagtttttttgtgtgtgtgagacggagtcttgctttgtcacccatgccagagcatagcggcatgatctgggctcactgcaacctccacctcctgggagggtcctttgccatgtggtagtcagaccctctcaaaatcctttaaccaactcccattctaagctataataaactatttgtagttcttcaaatatgcattttaaatcttggtagctagggcctagttgccttccaaaaatatgacagttaacactcccaccaatagcaacatgaatgtgcttgttccccaaccgcttgccaatgctgcgtgttaccattctaacataaatagagtatatttaggatgttttgtatgccgaaccaacgttgacatactaacttttatgtggttgtacaaaaaccagtatgcagttgagaactgatgaagagattaaaaagtcgtgcttgtctttactataattattttgttttctctctaggtacttttaaactagtaatagaattttctgaagaatatccaaataaaccaccaactgttaggtttttatccaaaatgtttcatccaaatggtaagtagcattttatagattttgcagatgatagtggggaaaagagttgtttccctccttttagctctttcaccttactttttactgttagggctcacttgtaggtgttgcttccatgtccatgtgagccacgtattttgttgtggatttttttttttttttttttttttttttttgagacggagtctcgctctgtcgcccaggctggagtgcagtggcgcgatctcggctcactgcaagctccgcctcccgggttcacgccattctcctgcctcagccttgtgagtagctgggactacaggcgtccaccaccacgcctggctaattttttatatttttagtagagacggggtttcaccatgttagccaggatggtctcgatctcctgaccttgtgatctgcccaccttggcctcccaaagtgctgggtttgttgtggatttttggtttgtttcttatttcttcagagacaaagttatactctgtcacccctgctggagtgcagtggtacagtcacagttcactgttacctcaaactcctgggttcaagtaatcctcctgcctcagactcctaactagctgggacgacaggtgtggaccaccatgcccagctaatttttttgtttgttttctttttcttttttgtagacacaaagtctctgtgtgttgcccaggctggtccttgaactcctagcctcaagcagtcctcccactttgacctcccaaagcactgtgattacaggaatgggccattttttccagcctttagctatgtttctgtagctagactcttacaaagcttccaaatttgaggtcaagttgttttaataactcctgaattaaaagtaatacatggtcgggcatggtggctcatacctataaactcagcactttgggaggccaaggtgggcggatcacctgaggtcaggagtttgagaccagcccggccaacatggtgaaaccccatcactactaaaaatacaaaaattagtcaggcatgatggtgggcacctgtaatctcagctactcaggaggctgagacaggagaatcacttgaacctgggagacggaggttgcagtgagctgagctcacaacactgcacttcagcctgggtgacaaaccaagactctgtctccaaaaaaacaaaggtaatatgtaagccaggcacagtggtgcacacctgtagtcccagctactccagaggctaaggcaggagggtggcttgaggccagcctaggtaacatagtaagatcctgtctctactaaaagaaatagataaaagtattatctatttatttgtggaattgtgaaaaataagaaaaatctgttggctaaaattaagcttttcaaaaatacaattttggccaggcgtggtggttcatacctataatcccagcaccttgggaggccaaggtgggaaggttgcttgagaccaggagtcagagaccagcctgggcaacatagcgaggtcccatccctataaaaaacaaaaaaaatatcaaggcatggtggcgcacacctgtagtctcagctacttatggaggctgaggtgagaggatcacttgagcccaggaggtcaaggctgcagtgagccatgactgtgccactgcactctagcctgggcaacagagcaagattctatctcaaaagtacaattttgcatatacaaagttggagtcaatgaccacacacagtggttcatgcctattaattccagcactttggaaggctgaggagggtggattgcttgagcccaggagttcaagaccagcttaggcaacatggtgaaaccctgtctctacaaaaaatacaaaaattagc

SEQ ID NO: 117535 - DNA, 1001 bp, Homo sapiens
atctggagtacactcctgccctgagcactcatgacctaagcacttcttaaaggtcccacttctcaacagtgttacaatggcaattaatttttttttatttaatttttttacttttatttttttgagacaggttcttaccctgtcatccaggctggagtgcagtggtgtgatctcagctcactgcaacccctgcctcctgggttcaagcgattctcctgcctcagccttccaagtagctgggattacaggcatgtgccaccatgcccggctaatttttataattttagtagagatggggtttcactgtgttggcccgactggtctcagactcctgacctcaagcaatcctgcctgcctcggcctcccaaagtgttcaggactggcgtgagccaccgtgcccagcctccagcaattacatttcaacatgagatttggagggaacattcaaaccatagcaggtgcaaaataagagaccttagttttaagacaggttatcctgtgatacagaagaatttagttattacctaatatttaaaacttctaagccaagcattctgtttggtaaagatttctcttaactgttagatatggcagagtgtgtaactaattttagtattgtctttgcagtgtatgctgatggtagcatatgtttagatatccttcagaatcgatggagtccaacatatgatgtatcttctatcttaacatcaattcaggtaagtgtgtgttaggatgtattataatttgtcagtattctgtaggatatagtcagctccttagcacacaggtaaccaatggcagagcttggacaagaatccatgcttttcagctaacttttctctttcagtagtgcctacttgggatccagtctgcagtccctttcctgattgtgtaagttacatgttctcacaggtcaaacctaatttgtgtccatgaagcatagccaagggttgtggaaaagaaaaaatggcttggaaaaaccataggaacctaaagaaact

SEQ ID NO: 117536 - DNA, 1501 bp, Homo sapiens
ccacacccggctaattttgtatttttagaaattacggggttttctccatgttggtcaggctggtctcgaactccctacctcaggtgatctgcccgcctcggcctcccacagtgctgggattacaggcgtgagccaccacacccgacctctttttcttttttaatagaaacagggtctccctatgttgcccaggctgggcttgaactgctgggctcaagggatcctcctgccttggcctcccaaagtgttaggattacaggcacaagccactgtacccagctgaaattataggtcttaaggcaattgagaactttatttcagaagcttaagttccttagcagcaggaaaccccatagtatttatcaaatcatttctaaaagtatttagacccaaaattatatgacatgttaatctctgaagtaatttgttgttttgtataacttttctgtaatatattccatatctgacccctgttggtataaagaacaactatgcaaatctgttttttcttttctttcctcctagtctctgctggatgaaccgaatcctaacagtccagccaatagccaggcagcacagctttatcaggaaaacaaacgagaatatgagaaaagagtttcggccattgttgaacaaagctggaatgattcataatagacaactggtctgttaatctttttcatcattgttgtgtataatttacctctcattagaaaggctaacaaattttaagtgccacaggttttaaggattctgcagaaaaaaaagaaaaaagtccttcagtttagaacctacaaaagcttgtgtatcttgattaatgtactttttattgcatggtgtgaactaagttattgctgcataaatttgtaatatatcctgtttgtatttttttccaagtgtataatgttggtgtggagttttcatgacagaatatacacattttgtaaatctgtacttttttcaaatattgaatgccttatttttgaattctttagatttttaaattggagaaaagcacttaaagttttttatatatgaatattacatgtaaagctgttaaaatacataacttcagtgcaagagactttgtcacttatttccttatgtgtgtaggaggggttaataagtctctagctctccatctattgatagtttcatttacaatttcaaaagaacattcttatattttatcaaggaagtcttcaaatttgattctaaatagcgattataatctccaactttattttgaatgtacctctattagtttcaattgagtaattctagacataactggtttgactctgtccaactctgtatttaggccatttgttacagtttcttcatgcattacttactgttaaaactgtaccttttgcgatttcacagttggcacttctgccatgagcagagaactgatgcgacttgttttgctgcttggtagcactttaaaaaattttttgattaatgaagaaagtaaaaccataaacatttgccaaaaatt

SEQ ID NO: 117537 - DNA, 1034 bp, Homo sapiens
tctaaatcttgaaacatctgctgtactggtatttctgaagtccacttctgtatctacaagcaagaagtgttcacagggccaggcacggtgtctcacgccagtaatcctagcactttgggaggaggatcacttgaggtcaggagttggagaccagcctggccaacatggtgaaaccctgtctctactaaaaataaaaaattagccaggcgtggtggcacacgcctgtaatcccagctactcgggaggctgaggcaggagaattgcttgaacctgggaggtggaggttgcagtgagccgagatcacaccactgcactccaacctgggggacagagcaagactccatctcaaaaccttgtggggaacatgtataggtttgccctgcagtatcaggtcagttctctgagagctgattttatagttgagcaacctgcagtttcttattaatccacagtgacaattgttccaaggtttttaccttactactttttattgtgcagttacaataaagaccttttagacaaggtgatggaaatggccgatgggattgaagtggaagacctgccacaatttactaccagaagtgaattaatgaaaaaggtaaataggatttccaagtgcatgtgatgaaatggtgtagagttaacagtccctgccttgatgacactatattagagtatattgtttttgaatgctctttactgccccaaagacctataccctttcatttttatttccccataattggtataagccttttcataaatagttgacaactcactgtggtaaattatgcattgttgatgaggtaacacataagcttaacctcttccggttgtttaggaacattgttttgagatttttgcttgatgtttaaaaagatgttggctagaatacttaagtttcctacttgttaaaaaatctcattggtaagactcatccttaccccaggtgtgagtgccggtgtgagtgccgacctgacttgtttggcttctgtgatttgctgataagaacgtgcctggagcaatgtcgatgg

SEQ ID NO: 117538 - DNA, 2377 bp, Homo sapiens
gccctggacactgacccccacatccttgaggttgggaggcagggtgttctggctctaacctagtgttcctcttaacaggaaggcagttgtcttatgctcatgacacaggtaagaggcttctagtccaaattcttcatggcacatgcagcaggctttttgggacctcacagttctccctttaggttctctgatggggagaacaggtcagagttggggagcaggatacccctggcttgccctgtcctccagataggacccttaccatgtggctcaaaagcttacaattgtaggtctgctcaaagctcctttcagacagcccataggaatctagaatacccataccctggaacttgtaggcctgtacacttcagcccactggagatggggtacaccttctggagtcagacagcctaggtttgaatcctggctgtgcagttaccaactgtcataatggctctatacctcagttccttctgttacaaggagcactttctgcaaatgggattaataacagtacctatctcatagtggatgtatagaataagtgattacctaaaaaagactaagcccaaagcaggcatgtgataagcacgtgattagtattagtcatccttattatacctggggagggtccccgatgcagcttggacctttgatctctcacctttaggctaggccagagagccagctcgcttctctgcagaagggatcagaaggatcctgcaggtgccaataggcagccgatatgggagcgagtagacggagctctgccctctctggggcaaagagtagggtgagaaggttctgaagaacaaagtagacagagccttttcattctcccaccatccccttggtacgtccccagaactggtctggagggtgggtgtggcagcgtcttcaaggggagctgagtcccctctgggacacttgaagttgcagacaggcaatggctggtgttgcaggagggttcaggctcctctagacttggagaagcaggtccaggaagccgactggaggatcccaggcagcagccctctactctgtatacaaaatcatttttgtaactgcaattactgtccctgagaaggcattaaagttaatgagagataggaaagagtggggctgtgaccccggtttaaagcggtttaagagtgtgcagctcttgttttctgaatgtctggccttcccaacacaaggaggctctgaggacaggttttccagccgaaatatcattaaattgtattagcatcttattacacacacgccttagcggtctgcctcagacagggagagtttttgtttctctttgaaagattgtgtctggaatggtaaattgcctgcttgaaagcccttttttcccctttttttaaagaagaggacgaaatcctgctgtgtggtggcaggcaggccaggcctagtggcccctggagaggagaggctggaggccaggttggggtgttttaactgcccagggagtggctgcagtggcaggcctgaaaggcccactgttcccagggtcagctggaagggcgttaatggaggcccagggtgtttatttgagtttatttgcagagaggtctttaaagggggctggcattgggcattggtgttttaagtccagacctgaggccctcactaaggccaaccactagtgctgccaagaaaacatctgccaccaaattgctgccctattactgagttgacattgatcattagccaggagcccaaccaaataaagcctcctggaaaatgtgtgaggttaagacggggaaggcaggctgtgaaaacaagggcgaaatcttgggccagggtgtttgttcctgcaagccacaggcaggccagctggactgtgtggtcccgacacttcttgggggagggagcgagagcacactcagcactccctagtatgtcactggggttctggctggagtctaaatggaatgctccttactcttcatggaatatacattcccaaggagaacgacatgcaacaagtagctcaacaagcacagctgggatgggtattccgtggacactgggtggtgaatttcttcagatagtgtgatgagcatagactgacatgggccacactgaagcttaaacctgaaggttgaaaagtcagacatgcatagaccacatagaagaatattccaaacagagtggagtacagcgtgtgcacagggctcgaagtatggaatatttggcttgttcaaaggaatgaaaggagcccagcatggctagaaggtggtgaggaaggggatagtggtcagtatgaagctgtccaggtggcaggggccagattgtgtagggtcttgtggtcaggagcttaggctttgtcttttgatctatgaagcctttgaaagattttcttaggggc

SEQ ID NO: 117539 - DNA, 1074 bp, Homo sapiens
ggagacacctccccacctcaagtcctgggctctagaagggccaatgaagtcctccccgcccagaacccttgaactgttgcccagcacaagcttttcctcccacagtaggctggagagcagcctgagaggttttcctagtcctctaagtgacaaggttgagccgtggccggcataaattccaacttatcttggggcagagaggaaaccatcaatgaacgcttccaagttatttggctcatgagagggcagagatgaaagcgaggatttggcggcagagaatgtttgcactaaatctcacggactgctctcttctctttctgtgaatggcttgggcggggcctttatggtctgctgagcctgggccttggataccctggtgaaaggggttctgggagccccatctactcaatcccctggagtatgaagcctatggggtggctgtcaggctggtcatgtggtttgcttagtgtggcaggagtccccagtgggaacacttacggagtgatgtgtgtgctgtggaaagcccctccttggtggctgcagagccatggaactcgtggttcacttgtctcctcatctctaaatgtgggcaatgatggggtgggggacacagtgaatccaacagctatgaaagggctggggttgggtttgggtgggataggcagggatgccctttgatgacctctcaggggctgccctttcccagtgcaccctaagggcgcaagccaaggggcactctacagcaagtgaggtgcctcagggctgaagaaagcacttgaccaggagtcaggaccctggacagggctaaggcctggaggcccagcttcccatctggcccttgcccaatggctggcccttccctcagccagagtgaagggggagtgagtgcgggcctccgagctgagagctgaaggcatgggccctgggattcttgggaggctgggctaggatttttggtggaagtgcgcaaagcctgaagtctgccctgggagctccttaaggcagtagaaggaaaaggtggagctgcccctgagaactcagcctgctgtcttctgctgcctatggcatcccaac

SEQ ID NO: 117540 - DNA, 1039 bp, Homo sapiens
gttactgctgaatctgtctgtcatgagccttcagaaggctgagtgaactgacttagcaccgggcacagcggtggatgctgacttttccagggaggaatgtggggttggagtttggtctcaggcctggagtactccttgaagtggtttctcttgtctcagtgatgtgagttcttctttaacttgtgattctcaaatgacggtgatcactgggaaagttggtacctgagcaagtcacatggtgtctagaggtgccaccacattccacaatagcgctttgtggggggatcacgcagtgggatcaggtgactggggcaggaggcgttgccagtgccagcccaggcagagtttagagcttgttctgaggtggaactgggggtggaggtgggagcagcagacaaaactctggcaagagcaatttgccccaagtgagcaagtgctcagggtgtgaccactcatggctttgctctgaggggtttggatgtgcttgattaagaacaaagacaaccctctccttcctgccttcctacccccccttccccaacacacacaaagccggtcgagttaggagagtgtccttgttcttgagggaccttggaagtcccagctcatgtgaagccactatctaggctgccctaagccccggccgtcccccagctgtttgcataaggtttgcataaggcctttcctggggttggcgccctgtgctgttttatacctccacttgtgtctgggggtgcagatagataacatgattgtgaacctcagtggaaatgtcttgaacagtcacgtaatggcagtattttttattttattttattttatttattttgttttgatcttttgagacagggactcactgtcactcaggctggagtgcagtggtgcaatcatggctcactgcagggttaacctcctgggctcaagcaatccttccacctcaacctccagagtagctgggaccccaggcatgtgcgaccacacccagctactttttaaattttttgtaaaaatgaggtttcaccatgttgcccagacttgt

SEQ ID NO: 117541 - DNA, 1051 bp, Homo sapiens
acagtgctgggattacaggtgtgagccaccttgcctggcccttttttttttttttaattttttaatttttagtagaggctggatcttcctgtgttgcccaggctgtcttgaactcctggcctcaagcagttatcccacctcagcctcccaaagtgttgggattacaggcatgagccaccatgcccggccatcagtattgctttcacattagcctctctgtcctctgaggttttcctctttttattttgatttttgcctttctctgccagtctttctttctctcataggtccactcccaactatccctcaaactctgtcctttaataggtcagagcagtgtgaattcagttaatcacatttatggaacgtctactatgtgcaaaacatgtgcagagttcagagctatgttatttattgtgctgattgcttttatttcgtcttatttctaagtgcgcaggcagaatgtccacttgagttgcatgtatctgcctcttcctctggcctgtggggcagactgccctgaggcagtctgaagtcactctttcccctcttgcccctcacaggttttccggacagacttgatcacagccatgaagatcccggactcataccagctcagcccggatgactactacatcctggcagacccatggcgacaggaatgggagaaaggtgtgcaggtgcctgccggggcagaggccatcccagagcccgtggtgaggtgagccaggcagcccaggctagggggccattgggacaggggaggaaggggaggctgctttccaggttaggtgacctgccagtcctggaattcctttctagtccatctctattctgtattccattcccttttccaacaaaccattgaaatgttccagaaatactggtggtttaactgagaggctagggggttgggctcgggcttggctatagagccagaatgcttgcgttcctgttgacactcatattcagtgtggccttagaccagaaatgtaatctctctgggcctcagtttccttatctatgaaattggaatgctaacaataactaa

SEQ ID NO: 117542 - DNA, 1096 bp, Homo sapiens
gtggaggtagatctttctctcaaccacatctgcctccacacacagctcctccgcagggaaggagaagctgctctgtaactcattctggctatcgtcccccttctcactgacctgaccgcccaccacctccttccccctcatcacatgacaaaggataatgtgcaagaaaagtatttttatgtatcataaatgtattttgaaacaaatgagaagaagaaaggtagaagggtttattttattaaatgagcctgacttagtgacagtgtgtgagcatttgcaatgtaagggcctcagcttccttggagaagccaccccaggtttccagacatagatgttgaattgtttgtggggggtgtgccaggccacgtctcgtgtgtccgtatgcaggcatgcctgtgtatactgtgtatgggcacactgggactagctgggacaattcctagagattcaactgcccaattctaaccaacattggcagcggctgaacttggcatttccttgctaactgccagatgtggccaacctttgtccatatgcaaaccactgaaaaatgatctggatttctatagcaaggcccttggggagggcactctcccatgcccttggcctcgctggccacattggccaatgagccagggctggagtctgagacctttggttgttctttaaggcacctcctgccactttctccctcagaggcacaaacactttgtgttccacgtcagtttgaggggacggtggggggatgatatgaatgtcacaggaggagacaccttctgtctttgtttcaaagaaagtgatgtgccatttgttaatatacaagagaaatattgaaaatatattgaaaagagcaattttaaattatttttggcttatgttgcaatatttattttcttgtattagaaaagattcctttgtagagaaaaaatgtatttttcattaacgcaaagacctatttctcctttttgtacattgtccatgtgcgcaacccttaacgagcaatagaatgtatggtcacctgggtgtggccagtgcccgctgtgccctgcatgattctgtgttgccgctgctgcatagttcccagccccatcctgtc

SEQ ID NO: 117543 - DNA, 1088 bp, Homo sapiens
gttttcatgtgtagtgtgctcaaaagacaaggttacggagaaggcttccgctggatggcacagtacattgattaacacaaactcacattggttccaggtctcaacgttcaggcttactcagagatttgattgctcaacatgcataacttgaattcaatagacttttgctggttataaaacagatgttttttagattattaatattaaatcaacttaatttgaatgagaattgaaaactgattcaagtaagtttgagtatcacaatgttagctttctaattccataaaagtacttggtttttacagtttataatctgacatcaccccagcgccatttgtaaagagcaactttccagcagtacatttgaagcactttttaacaacatgaaactataaaccatatttaaaagctcatcatgttaaattttttatgtacttttctggaactagtttttaaattttagattatatgtccacctatcttaagtgtacagttaataattagcttattcaatgattgcatgatgccttacagttttcaataactttttttcttatgcaaacgtcatgcaataaaacaaactctaatgtttggcatccttgttgggcaaatgtttcatttaaatgtgtcttatctagctagtatactctgaaaatttgagtatttaatattaggcatatgaagtggttgttgggaaaggagattccttcagaatatttagaatagcgtttaaggctctcaaggcttaggtatttaccatgagatggttgtggtcagttgcacctgataccatgtatccctgaatcatgtgtatttttattagtaatgcagccactaccattgctgatggggtctgtgtcctagtccctgtgggattggccttctgaagaaaagcacatttatggtacacaaggttgattctcagtttggtaggctctatagttccatcccagctgtctaattctgaagtgctccagtcttattggtgcccaatggggtaatctgtgcctcttccccaaaagcaatgacaggcaccagtgtctccacatttagatatattcccagtctctgtacatttaacagtactc

SEQ ID NO: 117544 - DNA, 1010 bp, Homo sapiens
aatgcctgagttcctactttgttccagagactgtgcgtattacttgatttaattctcaatttcatagggtggatgctactgttcctaattctctctagagcttcagtcaggctaacttgcccaaagtcacatctcaaaagcagtagagccagaagtgaaaccacatctgttcacttctaaggtgctggctctatacgttctatgtcactcctttaaaggatgagcagagtaaacatttacaggaagagccttaggaagacagaagaatttagcttatggtttcattgaggtcactttaaaatgtggggaaagtttgacaaagaacgttggtatgacatgatatggtagaaaatgagtcctttattgttttatcatatcaaaataagctctttggatggtttcatatcaactcttgttttgtattgttttgtttttttcagtcactaatgacagatgaaaccattgctaatgtgcctatactgattcttgggaataagatcgacagacctgaagccatcagtgaagagaggttgcgagagatgtttggtttatatggtcagacaacaggaaaggtaaaaaaaaaaaaaaaattatgatgggtgtgtttaattctacagtacaaatgtcttcttaaattactattgtccaactatacaagcccattatcattttcttaaagaaaactgtcatttatacctgtgggtctttttaatgtcctcatttctttctaccatggaatgaaacattttcttggtgacaacaaaaatgtcaaggatgagttatgcctaaggcttgtgcttataggaaactaaattaaagctttcaaagttatttatcatacattttcagaattagccaccaaacgatatatttgagtgtttaagtataccagtagtgtgtttaggccctgagtttaccagagataaataagacataaacttggaatattttacggttttctgaacatatactttataataagctttaagacggattgttttggtattcac

SEQ ID NO: 117545 - DNA, 1070 bp, Homo sapiens
aacaaaaacaaaacaaaacaaaacaaaaaaaccttcagtggctaactcattacttacaaaataaaggccaaactcattaacctggcattcaggatctctatgatctggtcccagtttacttttctgggcttttaaaaattatcttatagagacagggtctcactcactatgttgcccaggcttgtctccaactcctgggctcaagcaatcctctcatctcagtctcccaaaagttgggattataggtgtgagccaccacatctggcctacttttcttttatttccctctattccccttcccgttctttttgcttcaaccaaatcagaccttcttggtgttttcctctgtgcttttgttcatgccatccccatccgcacatgagtaacccctttaggccccagcgtatgccctgctacctcccttgggaagccattctcagttggagtgctctcagctatacttcatagcacttagtatatttgtgtacatgtctacaacaagtttggaaagactgccttatctcttatattaaacttgcggggactaaaatcctgttttttgttttgttttaattaaaaaaaattttttttgtagagatggggtctcacaatcttgcccaggctgattttgaagtcctggcctcaagcaatcctcctacctcaatttcccaaagtgctgggattacaggtgtgagccaccacacctggcctgttcattttttatatccccaaaagtacttggcaacatctacctcatagtaagtcataactaaccaatattaccgaattggtgggcattctaaaaacctgatgcgacatatagttgaaaagattgtaaatggttctggctagtgaaagcacatttgagacatgtaattgtctggcatatacacaaaataatttctggaatacgatgattagaattggaatctaatggaatttgtctgagacttcatttctatgttgtttcaagatatgtcataatggctgggtgtggggtctcaggcctataatcccagtgctttgagaggctgaggttgggaggatcacttgaagccaggagttcaaga

SEQ ID NO: 117546 - DNA, 1034 bp, Homo sapiens
tactgctgtgtccggtttccattggctggaatgggacctcacattctgtatttgtcctgattggctagcaacttagaactttttaaaagaggcaaaggcagaggagaacaaaggaaggaggaagtaacttgtggaatgctgagaaaggtaaaaacaccttcaaataaggaagaggaacaggctatgacctaatgcttgcttggaccagtgtaagtatgccagggcaaatatttaggctaaattgtgggagctaagaacataaagtacattgatttctttattacggctggcagatatttaagaatgttagcacgggtctttgaatcaattttgcttctaagagaagttactatttattcttaattagatggggaggaaagtctttgaaaaggaacctctactttactttttacacgattaatgggtttctaattttcatgtaaaaatattttaaaatcttatttagcttccgaagaactgaccattgctggcatgacgtttacaacttttgatctgggtggacatgttcaaggtaagattcttttttttttttttttttttttttttttttttttttttttagacaggctcactctgtctcccaggctggagtgcagtggtgcaatctcagctcactgcaacctctgcctcctgggttcaagcaatcctcatgcctcagcctccccaatagctgggattacaggcatgtgccaccgcgcccagctgatttttgtattcttagtagagatgggatttcgccacgttcaaggtaagattctcttactcttacagtcactttgttttattttaacttaacaaaaatgtggccattagttctagtgcatgaaatctcattctagtcacgcaaggccagagtagatttaaaatttagggattattactccccgataaatactttaaaagcaaagggtgattttcatgatacttctggccaattcaaatgagaattgcttttggtggtaaagtgtatgagtaaaattaacttccattctctctacttcaatctacctctc

SEQ ID NO: 117547 - DNA, 1051 bp, Homo sapiens
ctaaaactttgacattgttagctgaaagaaccaaattcgtcagcaatttaaggtgtttggtacagtggacaaaatgaggtgaagaagtccttttaacttgaaaaattaaacatagtattatttatttgtgtgttcttacatcagcctctatattactaagtgtctttgaagacgtcctatattccgtgttaaagtatcagtgaagagtaggtcacattgaaacaatgaaagaaggaaagaaaaggaacatttattgactactatgagtaaggcactagctgtcattttacagatgacaaataaatggtggtgccagtatagcaaagcaacatgattatctactattatacctttcagtagacttgtgtctgtcaccaaaatgttttgaacttaaaaaatgttaagatagttcattggcattttctgagtttgtagaaaaggaaggtgtcttcattttagaaatgtcagagatgcactgtcagtaattacaaagattagcagtttaaataaggtatattttaaccttcctttgacttgcattattgtactggaatagaaattcaagcaagaattaagaaaaaagatgagtctaacagaaatgaaaatcagcctgggcaacatagcaagacccagtctctacattaaaaaaaaaaaaatttgctgggtgcagggccctggctagcaggccagtagtcccagctactcgctgctgagatggggggtttgcttgaagccaggtcaagactacagtgacctgtgatcatgccactgcactccagcctgggtgaaagaaaaagacattgttgctaaaaaaaaaaaaaaaaaaaaaaaaaaaagaaaaaaaaagaaatagaaaaggaaatgaaaatcattgccacatcatttgaagcttacaagttggaatgctatattagtatttcttttcttttttctttttttttttttttgagacggagtctcgctctatcgcccaggctggagtgcagtggctccaggctgactgcaacctccacctccagggttcaagtgattctcctgcctcagcctctca

SEQ ID NO: 117548 - DNA, 1032 bp, Homo sapiens
cttaaagtattgctatattcgttggtaagactaatttttcctccttttattggaaggtcctgtccaaaatgcattgctgtcttcacaagagtcagtgagccaaggatacaatttccagcttccaggatcctaccctcatccaataccagcaaagactttgaatccagtctctggacagtctaactatggtggttctcagggatctgggcagactcttaatagaccacctgtggcctctaatccagtgacaccttcgcttcatagtggtcctgctccccgaatgccattacctgcttctcagaacccagctactacaccaatgccttctagtagctttcttcctgaagccaacctgccaccacctttgaattggcaatataactatccatccacagcctcacaaacaaaccattgtcctcgtgcatcatcccaaccaactgtatctggaaatacaagtttaaccacaaatcatcaatatgtttcttctggatatccttcacttcaaaatagcttcataaagtcaggtagtattcttatagaagtgcttaaaatgtagaaatgtgaaacttttgcttatttagatgtttgaaataatacttgaaacctgaaaaccatatggaaaatgtgacttttaaaattattagtagttttttgttgttttttgtttttcggctttccagcaaaaaccagaaagcctgctagacaaattaagtaagctataacactcattagtagttttttttttcattcttttttctcttttttttttttttttttgagatggggtcttgctctgtcacccaggctggaaagcagtggcacaatctcagctcactgcaacctctgcctccctggttcaagcaattttcctgcctcagcctccagagtagctgggattatgggattacaggcacgtgccactgcacccagctaactttttgtatttttagtagagatggggtttcaccatattggccaggctggtcttgaactcccgacctcaggtaatccgcccacctcagcctcccaaag

SEQ ID NO: 117549 - DNA, 1020 bp, Homo sapiens
acttgtctatactgccatagatatgtgtgaccacttctttgataagggagttacatggcaataatctttgtcttcacttttgtcaacaaggcactgatagtcttgttagcagttgtaagattcagtaataggcaatttttctttttcttttttttttttttttttttttttgagacggagccttactctgtcgcccaggctagagtgcagtggcgcaatctcggctcactgcaacctccgcctcccaggttcaagcagttcttctgcctcagcctccctagtagctgggattacaggcatgcgccaccacgcccagctaattttttgtatttttagtagaaacggggtttcaccatataggccaggctggtcccaaactcctgaccttgtgatccacctgtctcagcctcccaaagtgctgggattacaggcgtgagccactgcacccagcctaataggcaatttttcaacttgatactggagtatttaacagtattggtgaaacattttgaaaaatttcaggctgagcgtggtggctcacgactgtaattccagcactttgagaggccgaggcgggtggattacgaggtcaggagtttgagatcagcctccagcctggccaatatggtgaaaccccatctctactaaaaatacaaaaattagccgggcgtggtggcgcgcacttgtggacccagctgctgccggaggctgaggcaggagaatcgcttgaacccaggaggcggaggttgcagtgagccgagattgcgccattgcactccagcctgggggacaagagtgagacttcgtctcagaaaaaaaaaaaaaaagtgttccttctgcctcggtctcccaaagtcctggtattatagacatgaaccactgctcctggccccctatttttatttttatttatttatttatttattttgagacagagtctcgctcttgttgcccaggctggagtgcagtgacgagatctcagctcattgcaacctctgcctcgcaggttcaagtgattct

SEQ ID NO: 117550 - DNA, 1103 bp, Homo sapiens
tccagctacttgggaggctgacacaggaggatcacttgaacctaggaggttaaggctgcagtgaggtgtgattgcaccactgcactgcagcctgggcaatagtgagaccctttctccaaaaaaaatgtttttttaaaataaataaatcaagtattctggagtataaaatagaacttaaaagttaccttgtttctagcaacaccacagcttactaacaagaatcccaaaatgagccgaagtgttggatattcatatccctccttaccacctggttatcagaacacaacaccacctggtgcaactggagtaccaccctcttccttgaattacccaagtgggccacaagcctttactcaggtaaactttttgggattttctttaacctatttctccatttggtttaaactgtatacacatgaagaaagttttaggaaggtatattatacatttttataaccatttagaataataatggatatttcataaagcctttgtctttatacatttttccagaaccaaaagattggccaagagatctagattacacttttgttatttacagagaaattaaccacttccctacacacttaataaaagttacttactttaaaattatgtatctgtagactcccttaggtgctaatcatttaaccacaagcatgagtggattaagtctacaaccagagggtctaagagttgtcaatcttcttcaagaaagaaacatgcttccgtcaacacctttgaagcctccagttccaaatttgcatgaagacatccagaaactcaactgtaacccagagtaaggcttcagatgtgacattatgcatgtccgaaaagttttctagctttttgcagggggcacatcaggtgttatgaataagctgtacaaattattaatttatgaaagttctggatacagatgatagaactcttttacttgtttacttaatagagatttgaaaagtcctacgtcaagaaatagggatgtaactcctgaagtgattttgttcttatcagctctaatgagattatgatattcattatcattatggtggttactttctttcttcaaaatccaaagtacagggatttgtttctacata

SEQ ID NO: 117551 - DNA, 1050 bp, Homo sapiens
gctctcatttaaaattaatttcataacaaacataatacctttttttcctaaaaacttaccataagcttaaatgtatatgatcaataatttctgataaattaaatttggtacctttaaattgtatttagaatcttcagcaaaactgaacttttaaataatagactttgcaatttgggccatcacctaagtttaatttaattccagtgtcaactagacttacaaaacaaaaaataagtcatttgatagtttagactgttttacacacaagccaaaaagagactatattttagttataggataaccatccactctatttctgcataggacttagatttaaatatttaaatgggataaaattttgagactctattgaaatatttcatctgtaatctgatccagtattaaaatgtataccttttaaatctttgttgttgttttcttcaaaaataatcatagcagcaactgatacatactttttactttgatataggttatttcgatgcacgctgactagcattcctcagacgcaggccttattgaataaagccaaacttcctttggggctgctgcttcatcctttcaaagacttagtggtatgtttcttttcttttctttttttttttttgagacggagtctccctctgtcgcccaggctggagtgcagtgacgcagtctcagcttattgcaacctctgccctccatgttcaagtgattttcctgcctcagcctccctagtagctgggattacaggtgcctgccaccgtgcctggctaatttttgtatttttagtagagagggggtttcaccatcttggccaggctggtcttgaactcctgacctcgtgatccacctgccttggcctcccaaagtgctggaattacaggcgtgagcctctgcgcccggctctttttttttttttttttttttttctgagactgggtctcactgtcgcccaggctggagtgtagtggcgagatctcggctcaccgcaatctccgcctcccaggttcgggcaattctcttgcctcagcttcctaagtagctggcatt

SEQ ID NO: 117552 - DNA, 1025 bp, Homo sapiens
tcaagtgatgctcccacttcaacccagctcaccacactgggctaattttttaaatcttttgagagggtcatgtttcactatgttgcccaggccggtctcaaactcctggcctcaagcaatccttccgccttggctcccaaagtgctggagttacacatgtgagccactgtccccagccaataatttttttttttaagacaacttttaatgagaatggtcttggagcaaaatagtagggtttaaaattaatacatttcaactacatggtttttgtgtatggcagtttagatacatcttgtactctaagttttctctaaaatgataatatcccaacagttatttagacaggatggattcatgcttatgttttcaacatgatgatttttgcctttaaaaatttaattctgtttttttttttccagcaattgcctgtggttacctccagtacaattgtgagatgccgttcatgcaggacgtacatcaatcctttcgtcagctttcttgatcaaaggagatggaagtgtaacttatgttatcgagtcaatgatggtatgggatgcttttttgaaacatttaaacgtttctacttgcattgtagggaaatcagatgatacaaatgcacagttaaaaaaaaaaaacccttttatttacctctagtcaatccttccactcagagaaaactacaggtaacttttttctgtgcgtttatatttataaataaatttaattatttattttttaagcaaaaaataatgatagtattacatggatatcccatttttacattgtattgggtatataataagtggtatatttcatggtattacttaagccaggaatttaagaaacatttttatttagaaattgtcccacgccttttctctagggtgaaagaaaataagtccacagaatagctgcccaattcattcactgctgaatgaagggaagtaggcagtgctagaaggttagttgaatgtagttttctcagtaattgaggaggaggagatttctctcaataactatgt

SEQ ID NO: 117553 - DNA, 1011 bp, Homo sapiens
cgggcacctataatcccagctactcgggaggctgaggcaggagaatcgcttgaacccaggaagcaaaggtttcagtgagccgaaatcgagtcattgcactccagcctgggcgacagagcgagactctgtctcaaaaacaaacaaaacagagccaggtgcagtggctcatgcctgtaatcccaacactttgggaggctgaggtgggtggatcacctaaggtcaggagtttgagaccagcctggccaatgtagtgaaaccccatctttactaaaaatataaaaaaattagctgggtgtggtggcgggcacctgtaatcccagctactcgggaggctgaggcaggagaatcgcttgaacccgggaggcggaggttgcagtgaaccgagattgcaccattgcactccagccttggcaacaagagcaaaactccatctcaaacaaacaaataaaacaaaacaaaaaaacagttttattgtttgtgtgtgtgtgtgtgtgtgtgtgtgtgtgtgtgtgttttgagtatagaaaagtaaggataggctaagaactttctcttgcactgtaacaattctgaaaatgtacatgaagtatttagttacctttaaaatttttatgtgtaggtgctttaatatacaaaatgaaattataataaaagttgaagcccctttcatctgcaaaccaggctatttcctgaactatagcttaacctttagagtgcatagggatttgaatttctaaacaattagtaggaagacagatacaatgataattaatttagaaaatactctttgaccactagtgtattataagtggtaggtatgatgttaggttaagtgatgttccataaagttctcattaattaatgaaacttactaaaccttatgaccttgacctctgaaattgtcttaccatagcttctagtgccagctagtgtctgtacatttcatatgtgaaatgttaatatccttgtataattgggaagtttaagaaaataggccgggtgtggtggctc

SEQ ID NO: 117554 - DNA, 1017 bp, Homo sapiens
aactcgctttggaacttacaagaataaagtatgtagaggtgatggagaaggccatatttcatggcattaaaatacatcaaatctctaaactgtgatggttcttttggatacattttggacttatagtcttgctggactactgcatgtgcaagaactgtaaggcccaactttgatttgtcttgcttgccaatttataatgttgacttaaaatggctttcttgtcatttgaccaacttcattgtttagtgtctgtagattctctgaccatcatcatgactcaatgtcttgtctattgtatgagatactgacttaatgtgaaataaaattttaattatgacacttgagttttcttgctttgttttacaagctcgtgcaagatttactgaaaactttgccacaaatgtttaccaagactctggagacccagagtgccttgggtcctgcactgcaggctgcctttaagctgatgtctccaactggtggtcgaatgtctgtctttcaaacacaactcccaactcttggagtgggagccctgaaaccacgagaggaaccaaaccacaggtcatctgctaaggttagagagtcatgaaatgtctgataaggtttatgctggtgttccatccctgtgaccatagaacttgttttttctttaaatttatttgtcaattgttgggaggagggactataaggaagttaacttttatgtagacatttttattttgttacatttttctctacctgattcacccttccttaatttttagtatctttagcaggccactagcaattcagcctgccttcagagagatagtctgggagactaacagaatatgcttgatagggacaaagagaacctgattgaccagttaagaatagtcttatttggctgggcgtggtagctcacacctgtaatcccaacatcttgggaggccgagttgggcagttcatctgaggttgggagtttgagaccagcctgaccaacatggagaaaccccatctctactaaaaatacaaaat

SEQ ID NO: 117555 - DNA, 1827 bp, Homo sapiens
gtagctgggactacaggcacctgcaaccatgcctggctaattttttgtatttttagtagagacggggtttcaccatgttagccaggatggtctcgatctccggccctcgtgatccacccacctcggcctcccaaagtgctgggattacaggcgtgagccaccgcacccggccatttttttttttttttaaataaataaagtcatgttgcccaggatggtctcaaactcctgggctcaagcagtccacccgccttggcttcccaaagtgctaggattacaggtgtgagccaccacacctggctggaacttacagaaaattcctaagcagtacttgcttcttaatgaaaaatcaagtagtaccacaaaggaaaaggactttgtagaatgcccagaaataattgcaattgttgttaacatcatgatgtatgtagatgtgtatttagattttatgacaatgtaatgattttttaaaatgtctctttataatttattataaataggatatacacatgacaccatccactgacttctataagaaattagccttggactgttctggtcagcaagttgctgttgacttattccttctcagtggacagtattctgatttggcttctctgggtaagttcttcgtaatgattttttttttccgttaaatgaatatcaaaatggtccttatatgatagtgttctaaatatagaacaaagttaaagaatatgtatgcccttgggaaagttaatcagtcagtttagtctattaaaaaccttatagtcttctactctaaacatttagtaatagagaaatttctattctactatttaaaggaatgcaggccgggtatgatggctcatgcctgtaatcctaacaatttgtgaggcctgtgcaggaggattgcttgagcccaggagtttgagaccaacctgggcaacataggaagaccctgtatttgcaaataatatgtatatttttttaaataaaaaactagccagacatggtggcgcacacctgtggtcccagctgcctggaaggctgaggtgggaagagtgcttgaggtggagaggtcaaggctgcagtgagccccatggtatcactactgcactccagcctgggtgacagaatgggactctgtctcaaaaaaagggaataaaatctcctttctgacagtagtttaccttggaaagttaaagaaagattgattccaatgtctttagttactttggtgtagtagaaatagttaacggcacagtttaaaacagtgtgtgttctcttccaggttgtatttctcggtattcagcaggtagtgtctattactatccctcttaccatcatcagcacaacccagtccaagtacagaaattacagaaggaactacagagataccttactcggaagattggctttgaggcagtcatgaggattcggtgcaccaaaggtaggaatattttttttttgcgtaggactgaataatatttttggtttcagtaaatgtacatgtttttatctggtcttataagattgcccttctgagatactttgcctactctggaatatgcaattaagaggagagaagaaacactgtaaccaaaaaaagggggcctattgagaatatactcaaaagcactgacttatatatttttaaatagagaattttatggtgtgtgaattatctcagttttttaaaaaagaccttatctccggctgggcacagtggctcatgcctgtaattccagcactttgggaggccaaggctggtggatcgcttgagcccaggaattagagacgagcctggacaacattgcaaaatgatgtctctacgaaaaatacaaa

SEQ ID NO: 117556 - DNA, 1046 bp, Homo sapiens
aggtgggattacaggtgcgcgacaccacacccggctaattttttttttttttttttgtatttttagtagagagcaggtttcagcatgttggtcaggctggtcttgaactcctgacctcatgatccgcccgcctcggcctcccaaagtgctgggattacaggcgtgagccaccgcacccagccagttatgggtaaggttttaagtattccaattgatggaaaggagtaaaacaggcagagagaaaagaataatgaaattacgtattaaaacaagtacactgactatattaaaggaagataataaaagctcttaagattttaatggaagaaggaaagttccatctattcattcaaaaaatatttcctgattgtctattatatactaggaactgttctaactgctaggacaaaaaaatgaatgaaaaagataaaaatccttgtcctcatggagcttacatcctattaagggaagaataaaaataagcaaaatatgtggtatgtcagtgataaatgctataggaaaaatacaggaggtaagggtgattaggggtgtcaggatggtgagggatggggtgggattggggtactgcatattaaatcgggaagatcagagaatgtaggctttagaaaaaagtatttcaagaaaggcctgaagaagaaagaagagctcagatttttaaacgtcaaaatttaaatatttcggccgggcgcggtggctcacgcctataatcccagcactttgggaggccgaggcgggtggatcacaaggtcaggagatcgagaccatcctggctaacacggtgaaaccccgtctctactaaaaatacaaaaaattagccgggcattgtggtgggcgcctgtagtcccagctactcgggaggctgaggcaggagaatggcgtgaacccgggaggcggagcttgcagtgagccgagactgcgccactgcactccagcctaggcgacagagcgagactctgtctcaaaaaaaaaaaaaaaaaaaaaaatttaaatatttccaggcacggtggctcatggctgtaatccca

SEQ ID NO: 117557 - DNA, 1574 bp, Homo sapiens
tcaaaaaaaaaaattaaaagaagtttataaagttatagtaaactacgattaattattgaagaaagaaatttttttatatatctctagtgtagcctaaatgtacagtgtttgtaaagtttatagcagtgtccagtaatgtcctaggcctttacattcactcatcactcactgactcacccagagcaactttcagtcttgtgcactccattcgtggttaagtgccctatacaggtgtactgtttatcccttctgccatatttttactatacctttcctatgtttagatacacaaatacttagcattgttttacagttgcctacagtattcagtacagtaacatgctatagacgtttgtagcctaggtacagtaggctataccattaaggcttgtgtaaatccactctatgatgttcatacagagaaatcacttaacaacacgtttctcagcatgtatccacattgttcagtggattcatggcagtacatttgtctgccacctttcccctccatatcttccttgtttcatgccaagcataaaatgtctcatcaggtaaatactaattattattaattcagttaaaggctgtacaatctcactaaatatacttacctttttgaccttttaaaatatactcaagctgggtgtggtggctcacacctgtaatcccagcactttgggaggctgaggcaggcagatctcttgaggtcaggagttcaagactagcctggccaatatggtgaaaccccatctctactaaaaatacaaaaattagctgggcatggtggcacacgcctgtagtcccagctactctggaggctgaggtgggaaatcgcttgaacccaggagtcggaggttgcagtgagccgagattacaccactgcactccagcctgggtgacagagtgagaccctatctcacaaatatatatataaaataaaaataaaatgtactcactcaacagactcacctttatgtatgctgcatctcaaaataattttattcctgtccctaggtactgatgctttgggttggaaaaaattgtacacagaattttctcagccaagttctaggagttcaaaactatgcatcaattccacagcctatggtaagactcttttattatagtgattataaagggcatttcaaagttggcaaaaacatgaatatcccctattttgatatcagaaaataataacaaaatcataccaaaaatttttattgatgggttttcatgttgatggattctatgactccactcatagaatcattagggaatttatatatttaaaaggcagatatgccagccacagcggctcacactgtaatcccagcactttgggaggccagggcgggctgatcacgaggtcaagagatcgagaccatcctggccaacatggtgaacccccttctctactaaaaatacaaaaattagttgggcgtggtggcgcacacctgtagtcccagctactcaggagattgaggcaggagaatcgcttgaacccaggaggtggacattgcagtgagccaagattgtaccactgcactccagcctggcaacagagtgagactcca

SEQ ID NO: 117558 - DNA, 2975 bp, Homo sapiens
ttcagaaatggaatttctggatcaactatttctcttaattccaccataagcttttcccttaaacaacttgaaatttacataatcaaccaagtattctcagagaaagcctctagaagtaactgtttatatagtaaatgttattagggttatgaggaaatcaaaagccttctgacaagtctattttactgctacattttatctaaatttttttgccttttattcctaagggatgagagtccaatgaaagcaaacttccttcaaaacatgatagaagacagaacagaatctgcattatcatattatgaattcctgttgcatatacagcaacaagtgaataaatgaatgaatgaagaaatttgacttatttttaaggaatgtcacgatagtgcagaatacctggaaatgtgtaataccttctttttctattatgtttgtggactaatgtgatgattgagatgttctcactgtgatttcaacaacctatagcaaataaaagaccacagcagagaatcaaacatgcaactctgaaatactgtatttttcaaatcagaatatagctacgtatgattggatacttttttcttgccaattatgtttgagttgttatggattaaaataagaatattgcagaggcaaagtacattttgtaaaataaagatttctgtgttctacatgtatatttctcatttttaatttttctgaatctttggctgctacatttaaaacctcacaaacctaagtgttgcagggaagttacaaattgattggtagtgatgtttttaaaataaaaacaatggaaagtaaatataatgtaggaaaactagaattcattccccacacgtgtcttttttttttctttgttaagggaaaggatcatgttgactaaaactaaactaattctagtatagcttgagaaaaatatgaagaaacacattcaagctttaaaatctgtcagtattctttatgcttgaagaacaaagtcactttgatttgaagtgagaactatcattaggtggttttctgatttcctgatgaagagttggacatactgtcttaatctatagtgaaaagaatttgagctgtcttcataaacactgggactagcaatgataatagggagataagaaactttaattatcttgatcctttaagtggattttatttggtgcatttctgctctgggtatataataaaagtgggggtttttggtgaaatgagtgaagaaatgaaaggtttctaaagtgctatccaaatacatcagtaacatttttctaaggagtttaattgttaaattggaagtcattcataagaaatatttatgcttgaatatgaaaatctatgaaagcataaatgctgctgtttgatttggtggatattaagattatacacatccaacatattaaagttatgaaagaaacttgacttctgaaaatccttaagagactgctttcttgattcagctagagaaatattatagtcaaaactattgagtgaattttgtttacaaataggtaaattatacatttgtatatttaaagtgctgtgacatagtatctttaagagtttggctcagttttcacagattcattttgtcttaagaatttcttaaatatgttcatgtataatacttgatcaaaatatttttgggttttttgttttgttttaatgggttagaaaatgtttacaatcttggtcttatatgatcaccaatggaatagtaacttccaggtttatatcaatatgagctgactttaactgagttgtttgggatagggaagaagcagtccctctacagtatacaactactgcttgccagctggatcaaaataatcatgttttatgaaaatatctcccttaagcagtgttaaggttggtttgcagtgtgtaagtggcacattgaactggaagttttcttgaaagctgcttcatctattaagaagcaattttcaaattgtagcgaattatattatcccctcttttaaagaaacagtcgttatatgctgatgtttcttaaaataactaaaatgttcctcttaatgtgattttaaatggagttatttgtaggtcctttcttagtagtaaagaatcttctagagggaaacatttgtgcttttagggataatcttccttgtgcctcactacatccctaagtgggtatgactcttgttattaccacatgcttttttagtatatttcacaaatttacttttaaatattattttagatacggtgtaacatgtgcaattcagaataattttataacaggtcatgaaaaacataactttagttaggattcacaatatttgttctccacataatgagagaatgaatgagcctttggagatactgatataaggcaattattttttgcaatgttgaatgtgttttttagtttgattctttttttttcccccaatagggcactacctgccatatcatcttgtattactttttgatgtaaagcgactaatatttacactatgccatattttttttaattatagttgtaaattatgaaagatccttgaattttctacagatctacaactactaatgtaacagacaagggcaatcttggtatttaaatctgagcatggcagttctaccataaaaagtactctatttttctaatttctaggatttttaaaataacatttctgtaagtctgacatactaatagtcactcaagcagtaccatttattttagtttgcatatattttcactgtttttaatttaatgtattgagtctaatagactgttttgcaataattagaataaagatttatttcttctaatcaaagatgcataacagctattatctaggggaccaccaaatgtgatttcaaaattttgttaactattacaaatgtaatccttatatagaaattttaattttgtaaagtagtgtataatattgtaatattaaattcttgttcttaaattcaaatatgtattgatcttcaatgtgctgtgt

SEQ ID NO: 117559 - DNA, 1032 bp, Homo sapiens
aaaattccctgtatatctacatggctcctttatttcctccaagcctctgtaacaaatgtcatatttatattgtatataaacatactatatacagtgtttgtttcttcacttgtctgccgtcttttcctttaccggagtgtaagctgcctggagctcaaaggcaggagcttggtctgttttgttcactgtccttgcctctctttcaagacagattttccacctctacatgtgtctgtgctgaagcagaagggttcattttttccctcctaattttagaaaaattcataaaaagttctttgagtgttaaatttgtctgctgaaattatttttagaaaaaatgtaataaaatgtaatagaagctaatggtgtttgctgaacttaatctttgacttattgttctagccactatcgaaaacgatcggcatcccggggtcgctctggaagtcggtctagaagtcgctcaccctcagacaaaagaagtaaacgtggagatgacagacggtctagaagtagagatagagataggaggagagagaggtctcgtagcagggataaaagaagatctcggtcaagggacaggaagcgtctgaggtaagacattaattaatttccaaaagacgagtgataaattgggccttctcggctatagcaggcttcttgaaaagtatgttttcaactggagtttggtggcccaattgcaggcccttttctttatcccctacttgtttgattagacccagaaggatgtgcctacaaagactctatcaaacagtgtttttttttttttttaatcttttttgagacagagcctcactctgttgctcagactggagtgcagtggtatcatctctgctcactgcaacctccacctcctgggttcaagcgattctcatgcctaagcctgccaagtagctgggatttcagatgtgcaccaccacacctgtctaatttttgtgtctttaaaagagacggtgttttgccatgttggccaggctgctctcgatctcctggcctcatgtgatcctcccacct

SEQ ID NO: 117560 - DNA, 1041 bp, Homo sapiens
tttatcatgttgatgtcgtttattttctaacttgtaatagaaaattgcttttcatagaggcaattttggaggcgtttaggggattaaaattgagaataactgggaaactttgcttgctaattactttagtttctgttgttaggaagaaataaagtttatgtgtgcataatgcttgtaagtaaaatgagattgatttatagtgtttgaaatctatcttttggctttcttatttgaagatgctttttttgtgatttcattttggtaatatatttgtgtgtatatttataaaggtatgtgatctaagtctaccctgaggggtttgtatatatgccttttttccccttctttatactttgaagaacttactggaatgtcacttggagcaaaattattaaatttggttttgctttttattttcccccatctctttctttcttttattcccccaagaactttgaccagaataagctggaagaagaaatgagaaagcgaaaagaaagagtagaaaaatggcgagaagagcaacgtaaaaaggctatggaaaacataggagaactgaaaaaggaaatcgaagagatgaaacaagggaaaaagtggagtttagaggacgatgatggtatattttttagcctaatagcctgtataacacctcatgtagaatattatatgaataatatttcataaggggtttttaatcttttttattgttgaaaactatgcataatatgctgtttaccattttcatcattttcaggtttcaattcagtgataaatacatttgcagtgttgtgcagtcgttaccactgtctgtttccatgactttttcgtcattccatacagaaactctgcaccttttaaataactctatgacgccttttctcgctacttcttgtgacctttgctctattttctgtctctgaatttgtttagtctagctacctcacataagtggaatcataatacatatttgtctttttgtgtctggcttatttcacttagcataatgtcttcaaggtgcatgtatgttgtagcatgttggaa

SEQ ID NO: 117561 - DNA, 1063 bp, Homo sapiens
tccagagtagccaccatgcctggctaattttgtctttttcttttttcttttttgacagagtcttgctctgtcacccaggcggcactgcagtctccgcctcccaggttcaagctattctcttgcgcctcagcttttcaagtagtcaggattacaggcacctgccaccatgcctggataatttttgtatttttagtacaaaaatatgttggccaggccggtcttgaactcctgacctcaggtgatcctcccactttggcctcccatagtgctgggattacaggcgtgagccaccatgcccagctaattttgtcattttttgaagagccagggtctcgatatgttacccagctagtcttgagctcctggggtcaagagagcctgctgctttgacctttctcagtgttgggattacaggcaggagccactgtgcctggctgctgatatttcataatttaggatggaaacatttcccttcacatctgattttgactttcgagattttagtaaagtaggagattgtagaattttataggaaaatgggattttggtccattgtctgtgaaagttccaaagaatggtttaaatagattctatctataagtagtcatgatgtcttttttttttcgctctgttgcctacgcttgagtgcagtgccgtgatctcggctcactgcaacctccacctcccaggttcaagaaattctctgcctcagcctcctgagtagctgggattacaggtgtacaccaccacgcccagctaatttttttgtatttttagtagagacgaggtttcaccacactggccaggttggtgtcaaactcctaaccttgtgatccgcccgccttggcctatttttagtagagatggggtttcactatgttggccaggctagtctcaaacgcctgacctcgtgatccacctgcctcggcctcccaaagcagtgggattacaagtgtgagccattacgcccagccaagtagtcgtgatgtcttaattctagacaatctaatcttttttacataactgagatatgctatcttctgtgattgaaaggtaattgaaa

SEQ ID NO: 117562 - DNA, 1106 bp, Homo sapiens
ggcacctgtagtcccggttactcgtcaggctgaggcaagagaatggtgtgaacccaggaacctgggaggcggagcttgcagtgagctgagattgtgccactgtactccagcctgggtgacagagcgagactccgtctcaaaaaaaacatcatttagcagagaaagtttgtagttctgcatccagctgtatagctgtaaaatctattattggagatcaccttttttggcataattaatcttttgacccttttacaaccaatttatgttttattcatatttattttgtcattgttaatattcagaagtaatacatgcttcatgtaaaaatggaaaaacctcagaatatgagcatttgaactgatggatggctggagtaattggaaaaggggtgtttgggcagtggcagaaaaggttagagaggtggggtgtggtctgattgtgaaatactgcatttttaaacagatgtttaaagaatgtgtattctggtattttagatgacgaagatgatcctgcagaagctgaaaaggagggaaatgaaatggagggtgaggagttagatccattagatgcttacatggaagaagtgaaagaggaagtaaaaaaatttaacatgagaagtgtaaaaggtggtgggggaaatgaaaaggtatggaatttcttatttttaaagatttccgtttcctcttgggtaacttgagttctccattgcattgtcctactgattggcatgactttgtaaagctaacagttttctttctcctcatctgagagatggcagtactttttctgagtaccagagatactggtaaattttagctataagtgttctttcaaaagtcactcttttaacaccatcaacttagtttgatatctttgcttacatattaacctttttaataagttctctggagacttctctagcactcctgtctttgatactcttttttttttttttttttgatacagagtctctcttttgcctaggctggagtgcaatggtgtgatcttggcttactgcatcctccacctcccaggcctatgcagtctacctacctcagcctcccaagtagctggaactacatgtgtgcaccaccatgcctggctaa

SEQ ID NO: 117563 - DNA, 1042 bp, Homo sapiens
aaaaatttatacaaattaatgagaaaaacaggctattgtttgtcttttcatttaataactcagttggctcagtgccctggctcacacctgcaatcccagaactttggtaggctgaggctggtggatcactggagccaagtagttcaagaccagcctgggcaacatagcatgactctttctactaaaaaacaaaaaaaattaactgggtttggtgacatgtgcttgtagtcctagcaactcaggaggactgatgggacgaatccttgagcccagaaatttgaggttacagtgagctatgatcacaccactcaagcctgggtgactgagaccatgtcactaaaaaaagaaaaaaaactaaagatgaaattgtgtcagttactgtgtgcttcagcagtcatataacttgtgtttcagctttgcaaaatattctatatttgttctttattttagaagtctgggccaacggtcacaaaagttgtcactgttgtgacaaccaaaaaagcagttgtggattctgataagaagaaaggtgagctgatggagaatgaccaggatgccatggaggtgatttttcttaattttgactttgtttatgatactatcctggaagcatttattagaaagcattcatggagatgtgcgtttcatttgtgtgagctaggagaaattcccagaattgagagacattcttgctattcttagtagtataatagtatctagttaaatatctgtttagtggaacattctgatgtcttcattcctaactgtatgatctttctgcccctcatcagctcacttcaggcatacaatatggagagaaaaaaatggagtaacagaatgaattaattttctttccattaacacgtaaagatttatatagtaaaaacagtagcaaagccttattagagctgtctctgatgattactgttttagctttatattggcattttaaccttctaaaggcaaagaaaaaaaaactaagttgaaaaattcttcaggagctgcttgatacgtttctaattcaaggtgtcatacgtcattt

SEQ ID NO: 117564 - DNA, 1005 bp, Homo sapiens
aaatgattctcccatctcagcctcccagaatgctgggatttcagtcatgaaccactgcgccctgcctaatttttaaatttttcattatcccaaaaagaaacttttgtccattagtagtcagtcttctcccctctccccacccctgggcaaccattaatctattttttgtctctagaatagatttggctattcctaacatttcatgtaaatgggatcaaacaatatatagtctttactgcctgatctttttcactttacataatgttgtaaagattagtccatattgtagaatgtgttagtacttcattcctttttattgccaaatagtattttattgtatgatatataccaccttttggaagttcatttttatgggaacacataggacctgtctggggcccagcaatctcaattcttaccttttcttcctttggttttctttttaaggcatggctatgaaaagcccacgcccatccaaacccaagctattcctgctataatgtctggacgagatttgattggcattgccaaaacaggaagtggaaagaccattgcttttctgttgcccatgtttagacacatcatggatcagaggtcattagaggaaggagaggggccaataggtacaattcttttcattaaactatttttcaaataacagctttgttgtcaaacagaaagaccttatagtttataatgttcttaattatgacaatgaagttgtctttatgtacattttctttatcaatttggcactttggggctgatttccccttaccagcaggtggagtgagaatcttcagagctctggagtgacatctcagaagtacaaaaacagcctctcctggcacagctcagtttttaaactctgacttggcaggtagactcctcgtgcatctatctgtttatttatattgaggtttgttagcccagtatcagtggatatataaaagcgacatggaagatatcctagggaaacatattttcctaggtagtttttggcct

SEQ ID NO: 117565 - DNA, 1223 bp, Homo sapiens
tggaaagttgttcagcttctctcttaggaacacggggcatagtatatctctcctctgtctgtgcccctcagaccaaggttgtttctggaagcagcagtatggcttctgtggcacagtgagtcacttgattttctttgttctgtgatttgcattagaaaactgtttgcattcttttgaaccaagtattttcctgagggttggatgaggcatttaactgtcatttatcttcttttagcatgtttttaaaaatctgcttatatttatccttccccacaacctctgctgttatacaacttttgaaatagttttcagggatgcataacaaaacaaaaattaggtgaaacaatctgaactttattgtaaaggttaaattgaacactataaagcacagccttaagaattttggtggttaggctactgatgtatttatctttccagctgtcatcatgactccaactcgagaactggctttacagattactaaagagtgtaagaagttttccaagactttgggacttagagtggtctgtgtttacggaggaacaggaatcagtgagcaggtagttatataagaaacattcatgttttccattcttttctcaagttggatgattcaataaagtaaaagtgacttttacttttagttttttgaatagtgattgcttctaaaatcatttaaaaaatgaagtataaaaataatagtaagaattagttattttatgtaggatgaatacctttggagatgtaatgtacagcatggtgactagttaatgttatattgtgtgctgaaaattcgctaagccagtagatctcacatcatgttttttttttttcttttttgagatggagtctcgctctgtcacacaggctggagtacagtggcgcgatctcggctcactgcaacctctgcctccctggttcaagcgattctcctacctcagcctcccaagttgctgggactacaggtgcctgccaccacgcctggctaatttttgtatttttagtagagacggggtttcaccatattggccagattggtcttgaacacctgacctcaggtgatcctcctgcctcggcctcccaaagtgttgggattacaggtgtgagccaccgtgcctgaccaatcttacatgttcttaccacaaaagaaaatattggtaactatatgaggtgatatgttagcttgattgtgttcatcatttcagagtgtatatgtatatcaa

SEQ ID NO: 117566 - DNA, 1950 bp, Homo sapiens
agtttgtgaccagcctgggcaatgtagtgagaccccatctcttaaaacagtaaataaattagcgagtgcctgtagtcctagatactgggagggtgtgtggggtggtggggggaggggctgagatgggagggtcacttgagcccaggatctaggctgcaatgacctatgatgacactgctgcactgggcaacagagcctgggcaacagagtgagaccctgtctcaaaaaaaaaaaaaaaaaaagctgattatgactgttaaagtgatttcatgattcactaatgtggcaaccctcaatttgaaaaacactagtctatgtggtcacttagaaatttctttttctgaggcagggtcttgctcttgctcaggctggagtgcaaggatgtgatcatagctcactccaaccttgaactcctgggctcaagagattatcactttttttttttaaactgctttcttaagttcatttcttggttttgagggatagtggcaaatcaaatttgcagaattctctagttcttatttgtttcaaatttatggcactatgtggtcacgttgttgctatttctttagtagtgccccgagattcaaaataattaagcaggaagcttggaagtcttctaattagactaggcaagaactaaatgcagtattttttagtgtttaagtaagcattagtaatagactataaagtttcatcttttttattagattgctgagctgaaaagaggtgctgaaattattgtttgcacacctggtcgaatgattgacatgttagccgctaacagtggtaagtcaggggtatttttttggtgtcttttatttttgaattctttacttttttttgttaaaacagatgcaagaaaccaacaaagggtttctatatttcttcttaaagctgcagtatcttaaaatttgtagcctgtagtcccagctacttgggaggctgaggcaggagaatagcttgaacccgggaggcggagcttgcagtgagccaagatcgcaccactgtactccagcctgggtgacagagtaagactccgtctcaaaaaaaaaaaataataattgtaacaagttgattattacaagcattaatgatatttttgcaatttaaaattttttttcagaagtaactccatctgatcataacttggattcttaatccagttttggcctggctttgcttagtaaaagagtggggtagtagctttttctttattacaaaatttagactttttctccacatgagctagtattttcttagatactacataaattaagatattgcagcttcaagaaattttatcttttgtaaatattgcatgtttgtagctcaaatgttatgctttgttaaattattccctatcaaaactcttactaaactgttgacattatttaacttctgtggagaaaggcccttcaagatttatagaactgggcttccgagacttaaaccatcaaaggtaggtaatttaatgctgttcccgaccttgcaaaactaattggggctacaaatgctagtgtggaatacttaaatattagatagcacttattttggcactttttattttttgaagaaaatgctctcagaggtttccattgcaatatttagtgtgtacataatagagtattaaaaactgagttagtgcatgtttctagtagtattctgcttgaatttctaattctaattgtacatgaagttggcaaagtgacatcgaaattgagaagtcattgtgcttgtctagcatatggaaagttttggtttgaatgctgattaaataatccctttttttttttctcaatgctgcattgattaagtctcctcctgaaattcatcttgattaattttacctttttctcttatctgtcattgtggtctatttttaaataactattttatacgtgtttttgccaggtgattgattcaacagttgatagcaatgcttctgtt

SEQ ID NO: 117567 - DNA, 1036 bp, Homo sapiens
tacatcagacagattctatcagcacaattgttgtctaggtgtggatacagattcctggtgattcctgttctgccaacttcccagaatcctcctctttttgtctgtttttgttgcatattcctagtacttagaacagtacctggttcaaaatgggtctttaataaaaatgtgttgaataaatgaaggaaaacagtggtagttggttgtatcctagatataatttgaagatagaccactatatttgttgatggattggttgtaagatgagtgacagagattaatcaaagatgtctcctagatttttgtcctaagcatgtgtggagttgtcatttcttgagattgggagactgtgggagtggcaaaactgagacagttgttctcaaaagttccttttacttggttttaacattgcataagctttgaagaccatatttaccatatttatttgtaatgttttctttttctcaggtcatgcgcatcgtggataatgttcgtcctgatcgacagacggttatgttttcagctactttccccagagctatggaggctttggctcgcaggatcctcagtaaacctattgaagtacaagttggaggcaggagtgtggtttgctcagatgtggagcaacaagtggtgggtaccatctttaggaaattcccagtttccttgatacttaggtggtatgtatgattcttctatgatcactgtttgtgaggtaggcaaggtaatttctaaaatcaagtcgtataccactactctagccttcagtattttaccagataaacttaactgtgctgttccacggagctatttaaaatgcttgtttttttttttttttgttttttttttgctgggtgcagtggtgcatgcctgaagtcgcagctttgcagtccccggagttctgggctgtagtgcactatgcctatctttgtccatgctaagttcagcatcagtgtggtgacctcccggtaacaggggaccaccagattgcctaaagaatgggatattctgtccagggcagaaaaacagaacaggt

SEQ ID NO: 117568 - DNA, 1073 bp, Homo sapiens
tatatagaaatgtcacataccagatgggcatggtgactcatgcctgtaatcccagtattttgggagaccatggtaggaggatcacttgaggccaggagctggagactagcttgggcaatatagtgagacccctgtctctacaaaggaaaaagaaatgttacatatctattttatttcttggttactaggatatgaaattaagagccagagagaacagatgatcatttgccctcatttgcaagcctgttaaaccctgaaagtttacaatttttatcatttacaattaaaatcaacatcttcctagcccttggtaaagatatagcaagatattgtcattcattcactacaaataaaatgaatatttctgtccaggggatccatttgcattttcacttcattaacttgatacaatatggtgttttcagattgtgattgaagaagaaaagaaattcttgaagttacttgagcttctaggccattatcaagagtcaggatctgtcattatatttgtggataagcaggaacatgctgatggtcttcttaaggatttaatgagagcatcttatccttgcatgtctcttcatggaggtaattattcacttgattcacacataaaatatctattaagtacttgccaagcattgtgctgtgttctcgatgatacttactttgttctctataattcagaactaaattttatgtcagtttttactctaaagtgctttgtgggagtaagattattattgtctcatctaagagaaagaagatcatacaggcatactttggtttgaccaagttccatcgccatttatcaactatggaggaattgaatttaacttttctctgtgttataccctttccattgtacgtgctatctgtaggttttcatgattcactttaaagagcttttattgaaatttcaaagtaacgttttaatttcttgtgatattgctatcacatgcatgtaatagcaatatcacagtatgtggaactagaacacaaaacacagaccgggcatggtagctcacgcctgtaatcctagcacttggagaggctgaggcgggcagatcatc

SEQ ID NO: 117569 - DNA, 1032 bp, Homo sapiens
aaggagaaagatctaactcttgtcaatataggctgaatgtttctgccttttctcgctttggctcccaaacaggtttagattaatttctgatattggacctttgcaaatataaaccttatatagaagaaagggggcaatacaagaccagagttgaaagattcataaatgagttaatagcaataacctttaatcttgccattacattttcttagtcttttattttctatattttaggagttggatgtgtcaatttgttcttcactgagtttagattcttggtcagaagacatggaaaatttaatttgaacatgttttaaagctctctaatttacttgcaggcattgatcaatatgacagagatagcatcataaatgactttaagaatgggacctgcaaacttcttgtggctacctctgttgctgcccgaggtctagatgtgaaacatctgattcttgtagtaaattatagctgccccaaccattatgaggattatgtacacagagcagggcggactggaagagcaggaaacaaggtaaaaataagttttttatagttgatcttcattatattaaaatacaggtgtttctttagtatttcaaggagtagataataggagttatggagacattttgaaaatctttaatccacataatgtgaagagtggttgatgttaataatttatatacatgtacaggtctaagtgttgttcaaattatcagatacctagctgctctttgtaggcagatcctgttaacagtttgtcttcccttttaggtttttcccctcatgcctaaacgtttctatacagatgttccttgatttatgatggggttacaatgtcccgataaacccatcgtaagttgaaaatgcatttaatatacctgacgtactaaacatcatagtagcctagcctacctttagcatgctcagaacacttacattaggttatacttgggcatcatcatctaacacaaagcctattttataataaagtattgaatatctcatgtaatttactgaatactgtactgg

SEQ ID NO: 117570 - DNA, 1009 bp, Homo sapiens
ttgggccgggcacagtggctcgtgcctgtaatcccagcactttgggaggccaaggcgggcggatcacctgaggtcaggaatttgagaccagcctggccgacatggtgaaaccatgtctctagtgaaaatacaaaaattagccgggcatagtggcaggcgcctataatcccagttactcgggaggctgaggcaggagaatcacttgaacccgggaggcagaggttgcaatgagccaaaactgcgccactgcactccagcctgggcaacagagtgagactccatctcaaaaaaataaaaaacaacaaaaaataaaaattaaacttggatatttcactttgaaccattaagtaatttagtaagactctttcgtggcttttaaaattctttagttaatgttgtcaatctcgaggatttattaggtggatcagattttatcttatgatctaagtaggatccatcttgttagtgtctaataattgtactttttcatcatgcattagggttatgcttatacttttatcacagaggatcaagctcgctatgctggtgacataattaaagctcttgaattgtcagggactgcagtacctcctgatttagagaaactgtggagtgatttcaaagatcagcagaaagctgtgagtttttaacccatgttactcttctagaaatcattaatgtgactaaaccttgattatttaattcttggaaatcttttatttaacacttgaaaattttgctacgactatttttatttctctctagagggaaaaatgagtgaaagctaaaatcctatcttattcttgaacttagtattttgtggtgtctatgtagagctcttagtttatcttacatgctagatgaagtgtttttattacattgacatacaccaccttgaaaaatatttaattagtatgaattcctaaacattaaagtttttactatgagattaacttcgttttctttttttgaaaggaggggaaaataattaaaaagagtagtgggttct

SEQ ID NO: 117571 - DNA, 1039 bp, Homo sapiens
ctcaggtattaagtaatttgttccaagtctcagtcaatacttttaagaagttctttgattttacttttcaggaattatgttgaacacaagtaaacaagttgtcctagacattgagtttgtgagaatttaacattctcaatacagaattttttgataattgcatttggatgatttctcagtgctattgactgaggactttgggcctattctggaatttctaactgttagccactggtagttttatagggtagtattctgatgagtcttaacaaaatcttaaagatgtattaataattctctttttctttctttatctgcttttattgggcacacaactccctggatatacaaacacccagttacatgactcaaatcaatatggtcttaaacagtggagaaatgtgatttttaaatatttcacgttatctttttcttggaagcttacttgttattttgaagcttttgaggcagtcattaactataacgtttgtaatgttgggttgggtcatagagatgaaggagctcagtgatggtagtagtacaaacattcaaattcggaggagactcctaggaattagagtatgcaaatgattttcgaaatatttactgtgtctgacatcaagagttagctaattatcaactacatctctatgatctagtagaatatttaatagagttgaatgttctccagttttcttatccactaggaggtacattaaactacattataaatatatattgctaaatcacacatatcaatgagactatgcattagaaaggtttatttattaaacttgcatacaaagttagtagcttttcagagaataatttgtggtgtggtccctactcttgtctctgccctcatttgagatttaactaagtcttctttaactacaggatgtgatgcagcaggccaccaatgcaattcttaggggtggcaccattctggctcccactgtttctgcaaaaaccattgcagaacaacttgctgaaaagatcaatgccaagctcaattatgtgccgttagagaaacaagaag

SEQ ID NO: 117572 - DNA, 1201 bp, Homo sapiens
ggctagtcctcctttcattttaaagattttgttcagacgagacccttctgaaacatttgtagacttcagtgaacatcataaatgtctaataaatacttactaaatgaataaaccaaggaagttatatttccctttagccttctcttactatctcctggacaaatcactaatagtctttttattccactctttttaatcaccatactaggaactcttaacacataatatgacctcagtggttacatttgaaactctgaaagtaatcaaaataataagcagccattatataatgtgggtaatgttccaccaggcattaaatggctatcttggcaggcagtacagtgtttctgaaagtcacctacagtgtttcttcctggacctccgtgatatgggtaaacacagtgtaagtttagtaatttgaataatatgctttccactcaatcactaggtgccaatgaactggctgtgcagaaagcaaaggcagaaatcaccaggctcataaaagaagagctgatccggctggtgagtgaaaaccttaaagtttcgtttgttttgttttaataagtgttttattgaaatataaatacagagaagtactcaaatcataaacatatagtttgatgaattttcacaaagtaataagcataccagtgtagtcactacccagatcaagaaataaaaaacattactaatatcccagaagtcttctctgtgtctattcttgtcactattcatctccccccaacaaaaccataccttgaattttttttcttttcttttcttttttttttttggagactgagtcttgcattgtcacccaggctggagtgcagtggcacgatctcggctcactgcaacctccgcctcctgcgttcaagtgattctcctgcctcagcctcctgagtagctgggattacaggcgcacaccaccgcatctggctaatttttgtatttttagtagagatggtgtttcactgtgttggcaaggctggtctcgaactcctgacctcatgattcacctgccttggcctcccaaagtgctgggattacaggcgtgagccgtggcgcccggccctatattgtgaattttaaaatcatagattagtttttcctgtttttgaactccacataagtgtaatcatgcgtttgcaccttttgcatctagtttccttcactcaacattttgaggagattggtccat

SEQ ID NO: 117573 - DNA, 1120 bp, Homo sapiens
acatttcctttgaaaggaaacgttgtcttttatctaagtgtaattctgagagcttttctaaaattcccctcacagagcattcctttttttgttggggggtgggggtggttagaagtttaatgaaaagtgggttcacaaaacaagagggaaaaagtaaaacagctgttaaatcatgtgcttaatactatttcaccaaggagtggtcgaaaagaatcttgtgcccatagatgctaccaccattaggttgattcaaaacatagttgttaaggaatagttgagtgaacagagaattcattagttattgaatagtttttcctttctcaatgcagtaatagtaacatttaaaattttaaataaccaatagttttataagttggcaaaggaaatgatcttaaatatttccttttgggtttgtttggttggttggttggttcgttttttttttttgttttttttgttttgctttctctgatgacatatcttttatttcctattacagcaaaattcataccaaccaacaaataaaggaagatacaaagtcttatagacatccggaaaaaagatttttacctgtgctggtctatgatgtatgtggcagttgctgtctgcagtttacaatgtattgtaaatgaagattttttaaattctatcttgctgattttttttaaatataagaaactggtacttggtaaagaaatctgtccgtaagtacccccacaatcagtcaaactatatttaaagccagcctgttttcagagtatgatgtcctttaatgtaaactcaaatatcaatattttaaatgtccggataatattctagaggtttaaaaaatggaaatatttgaactttctattgaagacaataaagtacacaagtcgttaaggggctattcactttatcctgtactttcaatgaaattgtgatcatttcctaagaaaaggtaaaattcactatcatattttgtgtccccaccttgatgttacatgactctggaacaatatgaactggatttaagaatgttataatagaagtcttacaaaatgggttgagagtttttgtttcaatttttatcatcataaatgggcaaaaagtagttggactaatttcggtttttatacaa

SEQ ID NO: 117574 - DNA, 1037 bp, Homo sapiens
aaaagcctgccggctcgagatcggcgtcgcgatggagtgcccgtggacttctacgcttgcggaactccgagtggacggatagcggcttatgaattttgctttttagagggtacacaaccctttctctagggtggcgtgcatcttctgcaaacttgttattgccaatacgctaatagtcgctttcagcacacaacaggtaatacattctaaacgcctcgtgtcaaaataaggagagtccttatttgtgcaccgtggggcacagttaaggagcaggaagaagacaaaggaggccgttatttatgtgccgtcctattatcaaaactttccgtggtggggcagggtgcgtggctattggcctctgctgaatggactttcagagtgattgaggtgagttgcaaatcttcatttagaattatgaaacgtatatgattatacataatagttagtcaaatgacctgaaataaatctctgagaattacgtgatctttgatctttggagaacagaacttgggtttcttgaaaggaagctttctccatgtttagaaagcttcagggatgctttgtgaagttactaaaaatagttacatttctttatgttggcagtaatgactgccacattcaagagaagagaaaggaattgttctataaagaacggctcattttaggggttaaactttaggagttaaacacaataaaacaacttcaaggatggtaagttttagcttatgctttaagtattcgaatttagtcacagtccaaatatatagaagctcttagttgactcctgtacattcagggaactatttattggttgtttttgtttgttttgttttttttgaaacggagtctcactctgtcccccaggctggagtacagtggcgcgatcgcggctcactgcaacctctgcctcccgggttcaagcaattctcctgcctcagcctcccaagtagctgggattataggcatgcgccaccacacccagctaatttttgtatttttagtaaagatggtgtttaaccatgttgaccaggctggtc

SEQ ID NO: 117575 - DNA, 1614 bp, Homo sapiens
aggtcaggagttcgagaccagcctgaccaacatggtgaaaccctgtctctacaaaagtacaaaaattagccgaacatggtggcaggcacctgtagtcccagctattcaggaggctgaggcaggagaatcacttgaacccaggaggcggaagttgcagtgagctgagatcgagtcactgcactccagcctgggtgacagagcaagactccatctcaaaaatttttttaaaaaaggagatactttattatggttgttatccatatttttgtagtataagtcttaagcatttgtataatgttcactcattttagctaatggaaacctttgtttaccttttgtattggtactgccttctgttggaatggaggatgtttgaagggagtcagtaccttgggccaagagattgtattctttacacttgatcttagccaaaaggccaagaagcagtagagattgtgttcattgcttggcacatgctgtcttttgtgaagtgtaacatatactcagggttctgtataaataataaattacaataacgatggagtgtccatcttgtggaaactgttgtcaggccagaagtatgcatgtgagaaatacaataaaaggccaacaggaggcattctaagaacatcaggcaaactgaaaaaaagaattgtgttaataagagttcttggctttactattattcttttgaggtttagtaatctagaagagaaaagcccacagaatagaacatttgtttttgacttacacacttttctggttcctaattggagagcattatagctatgaaatcagtattataatagagttatcttgtatgatgtttgtcccatgattaaattgagaagaagtgtccttgaatctgctgatgtgtgtttgtttataagtggtctggagtcctgcctgttagcctaattttatgtagcctgcatagttgttggaagacagactgttttctcactgaatgctgcatacaggtatgtatttgtgtgtgtgtatttatatatatttgtcttttatttttggtagaaaatgatgcatcctgttgccagcagtaatccagctttctgtgggcctggcaagccttcctgcctcaatgaagatgccatgagagctgctgatcagtttgacatatattcctcccagcaaagcaaatacagccacacagtcaaccacaaaccaatggtttgtcagaggcaagacccattaaatgaaacacacttgcagactacaagtggcagaagcatagaaataaaagatgaactaaagaaaaagaagaatctcaaccgatctggtaagcgtggccggccttcgggaaccaccaaatcagcaggataccggaccagcacaggcagacccctgggaaccaccaaagcagctggatttaagacaagtccaggcagacctttggggacaactaaagctgcgggatacaaagtcagcccaggcagacctccaggtagcattaaagctctatcccgtcttgccgatcttggttatggctgtggcactgctgcttttccttaccctatgatgcatggcagagcagttcatggggtagaggaaactagcagtgaagtcaaaccacccaatgagtgaatgaggcaggaa

SEQ ID NO: 117576 - DNA, 1022 bp, Homo sapiens
acagatgcactcagggcatgagcagcggcattgtatttgtacataggttcaagtgtaacacctaactaaatcatttttccttttcctttagagttatggtcatgtctcatgtttcattactactttggggctgttctaaatagatgctttatgtgataaacaactgaaaccattatacctattagtttgtgaagtaagcctacagtataataaagacactaacgtatttttaactgatggagcaaaaaagcaaactaatgaatcaggattacttgaggtaatggctgtgtgagtttttgtaacatttattttcacaagatgggacacatatttgtatgctttggcatttacatccacttcaaatgttaaaaaacttatttttaatgttttaggtttaagcagcttgtaatttattgatctacatggcattaattgatttaaccattatacctgaaataattcttcagtgtttgcctttgagcagtgataggttgtgtattttttaattgcctaagagcatatataccaaacactacaaacaattcatatttacagaaaatttaaactattttataaaaactgcacattacatttttggtgaaatatagtgcattctgaggatagcatatttcatataatagaaaaagaagcattctctaggtttgcatgtagctatagtcactatattttgcctttcatatagaaagttttaaagtattatgtttaaaaacatttattggctgggtgtggtggctcacacccagcactttgggaggccgaggcaggcggatcacttgaggtcagcagttcaagactagcctggccaacatggtgaaaccccatctctactaaaaatataaaaattagccaggcgtggtggcgggcgcctgtaatccaagctactggggaggctgaggcaggagaattgcttaaatccaggaggcggaggttgcagtgagccaagattgtgccactgcactccagcctgggtgacagagtaagactccgtctcaaataaataa

SEQ ID NO: 117577 - DNA, 2692 bp, Homo sapiens
attagctttgcacaaaccatagagaacgatgttggatggttacataatcagttataacattctggcagctaaattgctacaagagctttttcttgcaaaagcttaaaatacaagatttttaataatttactcagaacagtataacttctgacacacacaaatgcttgcctctttattcatatgttcgttacctactctgtacatgtatctgtcatttagctgtttctcaagatgatgttcagcagttggctgcttagaaatctttttcaagccagtttctaaagacatttgtttaatgttctaccatagaataatgcacaccattgtcaaagatttgattattgtgttttatagtaagtccatttgacatttatttccctttcagtttattttccttccttattttgttatacatacccttccctttctcccctgcctttcgtacattcattcctcttcctctaccctccagcacatctacttactggtgctgtgctgtgtgtcagaagataaaacaggtgtattattgtataatgaattttgtatacatgtttatgaaatggtgagatcaactaaaggaggcatgttcataacagtgtttattatcagcagctatgtcccaggaaaaaaaaatgggaggggcaaatggctacagttgtaaatggataacatcatttagaaagccgaatttactgttcatctgagcggttacctggagtattatatctatgcactggtgagcatctcctgattccacttacttttctccctgtgaacagtttaccggtgccatgctgaagagaaagacatctaagtgataacatgaatgaagtcttaaaatttaaagtatttttactgctatataaactaaagactacattgtgcatattttgttaacactgtctcttgttatgataaacactgaaatagcatgttaaacagttgcctatactttaatataatcagttggggaaaactggccttttctcccccactgtatgattgtttcttgaaaggtaaattgctaattttatacagtgtaattctgttcttcacaaaataggtttcattattctatatttaaactgttggtcagaaaatgatctgcaattcaagtaagtctgcattacttttttctttaaaaagtactttaacatgccttatttattatattagcaaatgagctaataacagatgaaattttcattttttgacagatataaccttgcataagtagtatttagggtgattttgatactatctttagagttttgcattggatattaaaaaatatattggcacaatgtattggaagaaaatgagtagtatctggtttaatttttaatatttagggacattttaaaaaatcaatgttttaattagactaaaaattctttatattttttatttactttttaaagaaacatctgtcaaagtaatattgattccaaactgatgtttgtgtgaatttacatgtctattttcatgaactaagaatagagtttctttgagttgaggagaaaaaaatatatatgtgggtccatttattaggttaaagttgacccattcagtgtaaaaataaccatagtgtgtgagctaaagaaaaaaaaaagtaaatttctcctttatattctaagaagctttaaaagaacaattcaggggttattgataactgctactctgtcggtcattgtctctatatgcagtaaaattttatggtccctttataggaatataaagaattcaaaacagtttttcaaaagatttttttccttggacataaaaaattttgatgctattctatttttgtttttattacagcttaactgtatgctgttaaactctaggatgtatctgaatctttccttttttcccccctcctccaaatatataaatctgtgctctcacatgtaatgtatttaatttttggaaaatttaatgctatatagtaaatcaagtgtgtgatttaaagtaatcagatcactttgattcttttaagttttcagaatttcttttttccacaggtaattttggagaaaataattaccaattaactgataataagcacgctgtcctctgctgtaaaaagtctgaatagatactgtgtatgtttttatgtccatgaacttgagctactcgtgtgcaattatgtgtatgggaatggagtagtgttcatgatttgtatctacatcatcatatggatgtatatttattaataaagtcattactttaaaaccagctatgtttactatgttttttagtgtggtacttttcaagtacttaagtggtaaatggtaaacctttttcatgactgtagatcttgtgtttttcttagaattttgcttttttttttttcttttttaagacagggtctcactctgtcacccaggctggagttcggtggcgtgatcatagctcacagcagccttaaccttctcggctcaagcagtcctcctaccttcccacctcagcctcccgagtagttgggactacaggtacctgccaccatgcccagctaattttttatttttttatttttatttttattttttttggagacagagtctcactctgtctcctaggctggagtgcagtggcgcgatctccgctcactgcaaactccgcctcccaggttcacgccattctcctgcctcagcctcctgagtagcctggattacaggcgcccgccacc

SEQ ID NO: 117578 - DNA, 1037 bp, Homo sapiens
aaattgagcacatgctgttggaaaaatggtgctgaaaaacttgctggatgccgagttgccacaaactttcaatctgcaaaaaatgcaatgtcagcaaagtgcaatggagtgaaatgcagtaaaatgaggtatgcctgtatttgaaatgatgaattatgaaaaatattaaaataacttgtaatattaggaaagcgcagaggaaagtttaaaactttctgcttaattcagcaagacttaaaaaaagtgaaagtttataacttgtcatttgatcatacttttttgctggttcctggattcatatggttcaaaatccaaaaggttccgagggttccttctctcgctgctcctacccacccgttcctctccctggagcagcagtgtgtcctgtttcttgggtatcctttcagaaaaatgtacttttactgctaactttaatgcttgtttcttttaccacaggaccttatggattttctgaacccaaacggtagtgactgtactctagtcctgttttacaccccgtggtgccgcttttctgccagtttggcccctcactttaactctctgccccgggcatttccagctcttcactttttggcactggatgcatctcagcacagcaggtatcttccattggtggggtttacgtccatcctcctggctgatggttgcagttatttggaggtcctaattagttaagttagaagcagaagagggggggcatgaactgtgtcctgggatggaaggcaaggcaagagtgaatagtgaggattatcatactcctgagggagctggtggtgtcactttatggaggccccttaaagaaagtgggctgttctctgtgtggtggatttaaaggtggcaggtggtagcacctgatggcaggggaggggccagaagacttttgagggccatagccagactgaatcagcacaattggtatcacagtaggatattcctttgtgactttaaggcgcaggttaaatccccatcccaggcagcccaattcccagcacccctgttttgtgtctactcaggat

SEQ ID NO: 117579 - DNA, 1309 bp, Homo sapiens
tctgtagacacctgagaggagttttactagttacttactgaactttggtctcaaaagacaccaaaatacaactcttataaacacattgactaagaaacttctgatgagttcacagaaattctagtgttttagttgtgaacagctgaatgggttcctgatcctttgatgcagtggggagaaaggcaacttacaaattacactgataggcaagtgaaatccatcccatatatttatatatatactagtggcaatgcttattttaggactgcatgtcattttgcataccatacataatacttgagaaaaatctgtggtgggtgctttttctgcctgatttgaaaccagtgatttttctttcaggtatagaagccaagaagaatgtggtggtaactcaagccgaccaaataggccctcttcccagcactttgataaaaagtgtggactggttgcttgtattttccttattctttttaattagttttattatgtatgctaccattcgaactgagagtattcggtggctaattccaggacaagagcaggaacatgtggagtagtgatggtctgaaagaagttggaaagaggaacttcaatccttcgtttcagaaattagtgctacagtttcatacattttctccagtgacgtgttgacttgaaacttcaggcagattaaaagaatcatttgttgaacaactgaatgtataaaaaaattataaactggtgttttaactagtattgcaataagcaaatgcaaaaatattcaatagatgcactattcttgtttttactgcatgaacgtaatccagtatttggaaagtaatccagtttgaaatgtgaagatgtattccggcagaatagtgagtagaatgacatgcttactatacagaaggcaaaaataggactctcaggtaatagtttaaggaaacccttgattccttatatatgtttaagaaggttagttttctgtttctttgcagtttttcttctagagtccatagcaggaaagtatgtaaccagaattggttagtgtgaccccctcaagtagcaagtgatggaaaataagagtcaaataccttgatgtttgtgatctctaactcaaaaaatttgaagtgttttaagttgtttctgggtaagggagatgttaggagaaaggaaatgctgtaactaaagctcaattattatcagttctatgctaacgtatacattttaatcatagttacctaagcagcatgcattaattgaaccttaaaatgttcccagcaggctgggcgcagtggctcatgcctgtaatcccagcactttgggaggc

SEQ ID NO: 117580 - DNA, 1053 bp, Homo sapiens
tgccaggctcaatgctaggtaccctcacattcaagatctgtaatctaagcctttcaaaaaatcttggcaggtagatattataatatccccactacagacagaaggatcccggaattcagaaaagcggagtttagtatcccacagctaaaagtaacaaagttaggccttagatctagtttactctcttcaaatcctagcctaccccccatcccctgaaaaaattaagcccaccaccaagggttctgctgtgaatgtgccctcatgggggcctttgatgttatgtagatgaagtggctccatttcccagtcctgggtgtggtccctgctgctgggcaggtgtctgttgtgggcataaagtgcataccactgatcttagcggggatgtggatggtccagcactcagagaaaacagctcagtgtgttctacagactccaggttcctgccttattacaggcagcatgtttaatggttttctttgcagctactcagtgtggacacacataattctgtttcttttccaaaattctctgagttgacaaaataagtgtttaataagaatttcagaattctttctttttttttgagacggagtctcgctctgttgcccagactggagtgcagtggtgcggtcttggcgcactgcaactttgcctcctgggttcaagcgattctcctgcctcagcctcctgagtagctgagactataggcgcgtgccaccacgcttggctaatttttgtatttttagtagagacgggtttcaccatcttggccaggctggcctcgaactcctgaccttgtgatctgctcgcctcggcctcccaaagtgctgggattacaggcatgagccaccacgcctggccaagaattttagatttcttatgatagatgtatgtgtaagtttttcagaactgtcactggaaaactgatgaatgaatctcttttgattttttttttttaattgagtcggagtttcactctgttgcccaggctggagtgcagtggcacgatctcggctcactgcaacctctatcatccgggttcaaatgattctc

SEQ ID NO: 117581 - DNA, 1001 bp, Homo sapiens
gcaaatgctgctaatgactctgtttgcttgtgtgctctctgccaacagggcaggatggaggcttttttttttttttgagacggagtctcgctctgtcggctaggctggagtgcaatggtgtgatcttggctcactgcaacctccacctcctaggttcaagcgattctcccacctcagcctctcaagtagctgggattagaggcacctgccaccaagcctggctaattttttgtatttttagtagagatggtgtttcaccaacatggccaacatggccaggctgtacttgaactcctgagctcaagtgatccgcccgccttggcctcccaaagtgttgggaatacaggcgttgagcccagctgctgaggctttttgctatatcatacatcaaactgacttcaagtgccctgtcctcgccatcgcagccctgtcggtggacatgcaccaggtgggtggagcagccccaggctggctgggccaggagtcacatggtgtggttctgtcaggattcgtgaacccagcagagctgttgggcttatatccactgaggggctagtgctggtctggatccaagaggtggaaggaggaagatgcaacagaaggacctggtttcgtttctgcccagaagatctcctagttttgctggggaggtggcacatctgaattgtacaaggtgattgatttttttcagcttaccatgttagtcaggtactagaatgtgaagtgctgtgctaataagccacaggaggtgcacttcagggtggctgctgcctggagaaggggagttttgagttggttcttgaagatctggtatgtggttgtaagggaaggcactaagggaggggttagcaggtgacataggtctaggacagggagtaagaggacatactttgtctgcagtgtgttgggaaataagggccctaaaatgggttcagtgagctgggccacagagtacaggggggttcctgtggcgtactctcctggggtagctttcccaccag

SEQ ID NO: 117582 - DNA, 1018 bp, Homo sapiens
agctttatgtgttgggtggggtactttgggaacacaggattagagtttggattagagtttgacttagaatggaaattaacctttgacttaattgtgtgtgagagtggagaagggggaggggatagagttaggaggctgtgaagttaggaatgcttgaatgctgtctgagaggtttagaaattttaattactttaaaaaatatatacttagaatactgttaaaggaatttttaccaggttttaaaatattgcattaaaactcaaactatttcccatttgttttgacgtaaccaaactcatttattactaactcataaagttacaaggggcaaaagaaaggtgttgtacaaaaaaccattttagccataattttttaagcttttaaataaagcagggcctagctgcacatctaaaatccaaagactttacttaaatgggataatgtaagtactggttatattaatatagccttcatattgtcagatttgtgagcacgcataaatctgttttcttaaatgtattattataattgttttttactcttttaaaaatcatgtttggaatatacctgactatacttactatttaaaggaaatatatttaaagaaaatattgaatagtatattttgaaagaaaaccccaacatgtaaccttccaaaaatagacattcctaaggtactgtcatcattcagtaccgtcctgtcttcttaaaaagtggtacacagacagaaggtgcagaatttgtatcttattacaagctcatgttaatgtagtcattttttattttcaggttttgatgttttgttgtttttttttttttgagattctgaagtttttagaagtttgtatttataactttttaagcccatgtaatgcatatggggcatctgctgggccataggaggaatcttcacttttggagggtgtttttagggaaatcggaagcagtcaggagaaagaatggtgcatagtgcccctgtctgttcaaaaaaaccagaggctcctaaaatcctgtgtag

SEQ ID NO: 117583 - DNA, 1007 bp, Homo sapiens
atatataaagtatgatttgcataaggtatgaaataataaacttgtaaaaacaaaagggaagaatttccctgtagcagttgcatcaaatggcagtgcactcctcctccagcagtgtgctttttttgccctgatggtttagagccagttgcatgactttcctctgatgggattgcaaatgagctgagcagtctttgcagagatggagctttgctgtgtgctgcgtgcctgtcaaccctacctgcacagagaaggtgattgctccgtggcagaacagaatgggagcctgctctgaggaggagaaaacaaatgatcttgtttatatacactcaggaaaacaaaccatttttctttctttcaggatattgtgaattacttatataaaaaaagccaacctctccagaaacttcctagatcaacagctgaagttaagataatttatatagaaatgcggaaaaatttgacttaagaatttattattttaaatgttttctctcttcattgctattttctgaattactagcataatttgtgaatttttgacacagagacttaaaatttttcatttatattcaagattcagctaagtttggctacacagaacaaattttctagattttaaaaaagtggcataaaattactttatgtatgattccagcaaattggaaccgcttcagtgtcccaaagaagcacattttctgcgcaaagcactgtgcatttttgtgagacctcctcacacccagtagtgatgttaagaagtaacagagcctcagatttacagagtagtagaggcaagagaggtttaggatttgctgaaggccatagaatgagacatagctaggattagcatttttcaggatataaggataccacccaccagactttgtctttgataccaaaaatagggtttaagtgctaagcttactttcctttctttgtggctataagccctggtatttttctttaacaaataattaaaattattattaaataaataaatatacttaaat

SEQ ID NO: 117584 - DNA, 1011 bp, Homo sapiens
gtgttttcatttgtaatcagacataaatatcatttccttccatagcaattgtgttttataaaagaagggttataggcctacaaacataatggtgattcataaacaatagatgtctaattcattgaattagtaaaggaagtatttagaggcttaatggagattgtactggggaaattactttggagtagctggtgctcattttcttagtgggagatatgttcttttttagtgcataattaaaatagtctataatcaaaatataaaaggcagctgatttaaagaatgtatatcaaagagacttgctctgagtaacgaaagatttgtattgtaagtatgtgctagaagtcttagaactttaataaatcatacatgttatttgactgaagctgtattttaaattcagggtgctgttaaacatttcacagattgatgcacgatttttgtcttggttttgtgcatctgatagtctttcatagtttcatggaataaaatgaaacaaaaggaactttaagaaaaattaaagttcccaaagaatacttgatttggggttcatggaaaaatctttaattgctgatggtttggagatttccaaatgacaaacttcattggcccaatttactgtgattgtattgcttacattccttaaaatggtagagtaacttaaaaagtcatacttcatcatacattcattgacttgttcataaaatgtttgtaatttgcaatagaggaaagactgaaactattatcagccattatacgttatttgttggccatatgtttgtttgaaatggctgtggctcaacagaacatggctcatagacaaactatgctgtaaattggcactaaaaacccacctaaacaggtaggcatatgttaagaagttaacatgagccaaaatattttaatgtgaaccaggttatgtacattaaaggattccagctccctttacagtgggaacttcatttgcatgttgttcatttttttcccaaactaatttttaaaaaatagatc

SEQ ID NO: 117585 - DNA, 1037 bp, Homo sapiens
tgccatttactgtgcatgtctctgtgctttgcatgtatttgcctataagccccaggaggtaggtgttatctccattttacatataaggaaattgagtttcagaaaccctcagtgactattattactacttgctgtgattgtttaaaggaaaatgttacacaaattagtaaatggactaaaactcaggacttccggcctctgaagtccatgctcttaatctcttctagtagcctttattttctcttgtttttcatcataccgtggtacaaaaaggtaagagaggatttcattgcctgcctctcctggacctcatggcctgtagagtgaggatggtgcgttgagatgaggcactgactcctccatcctggtcagcggccatgggccctttgctgtccttatagacaatgcaaagtgtgtccaactgctcggggctctgctgaggtttgtgtgagaagcatttgtgattctggaaaactttccctttcccaggatgaccccagtgatgatgatgctctacccaggagcttggcttgggtctgtccagaagggctgctgctgtggccatgggcacacagagccctgtccctggcccagcaggtgtgtggcctgtctctgactccctgcagcacctcccctgcaccccagacatcctgtgtgtctgtccttttgatgccaactttggggtgccatgcagccatcaagtcagaaggcggttgtgctgtcacagggtgacaaggagattttcgttctccttcctctctgcttagcctcattttgctgtgcgagcctgaaccttaggtctctgttgctttctctattgcatagggatggaaattcctgccaaatctgtgacacagtgttgctttgaggactgctgaggtttgtcagtgctaaatctaaaagggcatcatggttgcctttagacaccacctgagaaggcttccctgatctccctcctcgtggcttagaggcagtgtatccacagttcacttatacttactctattacagtcatcatcacactgcagtaaaaccacc

SEQ ID NO: 117586 - DNA, 1413 bp, Homo sapiens
gtgtgaaggggtaactcttctgtgtgggtggatagaggtcagtgccttcccagagaacctgcagccatcccctggggctgacatcaagagcctgggctatggctcaggcactgtgctagtcaaaggtatcatggaaaaagaaaatcaggagcttacactgtacttcgggggcttaatgcacaccacaaaacactattctgtttgctggctactgccttctctaaaagcacatagcacatccttctgcaggtgccagctctctgcccagttgtctgtcccccatcccatcttctgggcactgggctttcccacactggcgtacaagcagacacggggctcaacagacaccgacccaacacaaggcaagctgcagcacagagggaggtggcctgtaaggtggggcaggtcctgcagcccccgtggcatcccagttgctgagtgcttatcttctcttctccaggaacggttttccaaagcagacagcagctcagctgattctgaaggccatctccagttacttcgtgtctacaatgtcctcttccatcaaaacggtgtacttcgtgctttttgacagcgagagtataggcatctatgtgcaggaaatggccaagctggacgccaactaggctgagcaatgacagaaccagctgcaccatgtaccccaccttcagtttaaaagaaaaaaaaaatccccttcactcctactgggaggtgggacccctttcattttcagttttgctcatctagggaaaataaggctttggtttccagtttaattgtttttgaccttctaaaatgtttttatgttagcactgatagttggcattactgttgttaagcactgtgttccagaccgtgtctgacttagtgtaacctaggagattttatagttttattttaatgaaaccctgattgacgcacagcagtggggagaacagcgtcttttacctgtcaccgaagccaggaagccccgtttgtaagcgtgtgttgtggtgctttattgtacatcctccagtggcgttctttttactctaatgttcttttggtttcccccctcagaagaatcatgaatttgcaacagacctaatttttggttactttttgtcttattgatggatttgaaaatgaaagatttaataaggcaaagcagaatctgttgtccttaattatatttgcaatttggaatttgtgtgagttgatttagtaaaatgttaaaccgttgttgtgactggtgtgttccagttattgtgcccgtgagtcacaggtcttaagtcggcttctgcagtcccaggatgtgggggcagggcagtccatccccctcaacccccaccctgctcccacaactccttggatgctccacagtgttcactgcaacctgggtgggtgtgggccatctgctggccccagtggttt

SEQ ID NO: 117587 - DNA, 1065 bp, Homo sapiens
aggcaggcctcgtgattttgcctcctgcatgctgccatcactgaggtcccacacctcaagtactggtggcagaactagtacagagtgggcttcctgtcacttgacattctgcctagtaaaaggccttgtccacaggcagatgggcactgccaccgttccccagggctttctatggccaaggccatgtgtgactggcaggacccaccagtaccaggctctggggaaagatctctggttgcacctgaaccttctctggagcctgtatcactgcccgccacccgccgccacccccacttctcccagtcaagggcaaaacagcagaatgagcatttccccagcaacccctcaccagttgttgagctatgggcaggcttgcctcccccttccctggcctcacatctctgggctgtctggtcctggggttctgtgagtgaggcccctcagctctcctatcctgtgtgacctttggttaaatgaatcagcctctctgccctggtctgccttatcagcaagtgaggctatagggactgcccatcctcacaaatggttctgaggctcagttaattagtgctttcaatgcactttgatctgctctgatgaaaggtgcttccgcagagggaggcaataggaaactttattggaggtaataatttcacaacctttcatatgggtattgggaaatttttaattgaagcataaaagtaattctcataaaagagcatctgttattacaaacttatttacatttttcatggagtaaaaagtaggaataaaaataatcaattgaaagcttgaagagggggaaatgcctaaggcagcacatgtgtacagctacccaggccacatctgccaggcagacctcaccccatagagctgtgtaaacagctgccctctctttcatgagtaaaaaaaaatgggattacaccagagccggccagtaaatcacagtgggttttaggaggggaaataaaacagcttgtttgttgcatccagtgtctctggcacggaagtaatgttggaattaaaacagtataaaggtaagcatgttgggaaagagccattggt

SEQ ID NO: 117588 - DNA, 1074 bp, Homo sapiens
tgtgcaagtcgataattagcacaccagtcgacttgaagaagaagggttggaaacccaaaacaattattttgaggctgcaaatgttctgacacgttgagtttgcgttcagttgagttttgatggataaggctctgcctctgggagaaccgtgtatgctttctgagagtggagagaggcttactacgaacttggtcaaaattcctggtggtgacacatcataatgccaactttccaagggtgtggcttggctccagctcacgttggaatcacaacgcagcagacagctgtggaactcctcggacacagggcattggagggcccaggaagatataccgtggcaggggagtgggtctgtgtttggcatcttgtgctttgcagtgaaccagagctcactgtttctgtttcatccccgcaccactagctgctgtcagcgcaggccatggcctgcctgccaagtttgtgatccactgtaatagtccagtttggggtgcagacaagtgtgaagaacttctggaaaagacagtgaaaaactgcttggccctggctgatgataagaagctgaaatccattgcatttccatccatcggcagcggcaggtaggggcacatgcttgttacgtatcggtcatgggtgtgtctctctgcgcacacatggcccataattgtggtgctctcactctgtgcaaggcccacggaggctgccttaaccaaggagaccagaagcacaacacagggaagaatgcagacattaaatgatggtgagggacaattagagagacccaaatcccaaggatgatataaaacttaagttttgatagcaaatgtcatcacagaaggggaacccagtgtgtactgggaccacagaaatggtacctcagagagtaagttttgaggggcacagtgacttgggtggagaagatctggaggcgtgaatacagggatacaaacgaacagcttggctgtctcagaataaggctatagctgtgttatggtctgtcccccaaaccacagtattctttggataaagccctctgcccctttcctttctactcacaagtatatttcacctcctgag

SEQ ID NO: 117589 - DNA, 2883 bp, Homo sapiens
aggcagacccagctgtgccacccagaagagcccagtccttcctgaattgtgactggaatgggtctctttggaataaggatggtgctaatgcttttcctctgacatgttcacctacaactcattgataggcacagggtggggaattattagcttccaagccacaggagcaatctgggcccaggaccctggcacacatcattcaccgacactgtaacacctgcagaaatcctcagcaggttcagacaccccaactggccaaggcagaaagactgccaggtcagaacccagtcttccaaagcccttcagggcttttctgcccagcggaccagtccaaaccagtattgaccccagatatcttttacaatcccaatgataaaccagattcctacatggcctcaattggttccagctcccactttgatgtgtgagaggagaaaagaggaagctagtaatcactccatttctcatatttggtgtgaagtcctgagactgctggaagaaggaatccgagtgcaggaatgcttagccccagtgattaacttttacccatcaaaagttctttctaacagtgaaatagaccacaggcctagcctgacatttgtccaagcctaaattttcgcttaggctgttttgaacactgatacttatgcctgctttctaagcatgaaataatgtccttgttctcatgggagtaacacatgtttatgcttgggggcaaataagccaattgctttatgattaaccctgaagttaagcctaaaaagcaagagtcttacaataagagtgttgacaatatggttgaaaatgggcctgtttcttgttaaaaagtacatgtgtgtctacatgaacatgtgcatacatatgtgtgtgtaggagtcaagtcctgactgggttgattgcctgcaatctagggttcagtttttaagtttgggaaatgcatttaagtgtattttaacttggaaatttcacttttacttaaagcaatatttataagtaaaaattttaaacactcttcctaagataaaacacctttaattatagatcagcccattttcttaaatattttagaaaggagttggtaatcatgataaagtaaaaacattattttacctttcaaatttctcagttctcaccaaagagttaatctgataaagactgagaatgctaactagtccagcctccagcatttttgttgccctgcctcaagctggagaatgggtttaagacagaaggctagactgggccccaggggcagcagtgtgtggaatccagctggttccggctccagattcctttttctcagctgcagggatagtttaggtgaacctgtattggggtctcactcgcctgggttgcatccactttgtagtggtggagttgggctctaagcccccggcctgcttcctccagtgcatgccccattcagctgccacctctgatgctgactttactagaaacatgcagcagcaacaggtgtgacattctcactctgccatttaaagcctgtgctgctttccaggacaggtagaggcaggagggcagtctgagatcatgaagggtaacacaaaatcccacctcaaggatgctaagtttgtgccaccctctctcggacacagctgagagctcccctgggctatggctgctggtcatgttcatctgcacaccccaggtttcctacagcgggtgggtacaggcccagtcctagccattagccctggttcttatttgggacaaagcccaagctatttactcttcttcccagacacctcccggggttagttcacccctgcagaacaaacattcaaaggaggcaagtttcactaagataattaaccctggtcatcgcagggtgactccaaagagaatttgggctggtgcattccgatgcaccttgaccgtcccataccagaattgtgccaggtgcacctggaattttccaagacagatgtgaatcttaaggggagtattttgtcctcttgtgaggaaaagtactttaaaatgtgcaaaactgaggaatcagagcttaaggaagactcagaccccattctggccaaacttgaaaggctgatcttgttgctaactttgattgccacttgctatcccacatgagcatcaacccagagttctcataggtgttggtgatcttgtttgggaacttggttttcacagcaggaactgattacttagcaagtgccctaattgaagaaaacacattgctcccaatctccattggcttttgtgaaaaatctggtcctgagcagttagacatcctcctttccaagctttttatagaacacagattaatctttaagctctgcttctgatgttgcccttctttactgaaaacaattctgaatcattagtgtaattaagaaaataccgtctgaggccatttttattttgtatttgcatatgacaccaaagctgcaaaacaggaactaagcatggtaataatgctggtccaaaggtggccaggtatgaacacttccttctaggcctgctgccaggaggagagctggcttattgatgggagcattgtatgctgctgaaacctccttacttgggggttctccccagagacagagaagaaaacctaaggcaggcattagtcttggaaaccagtaccagctagtatctcatgccaatgaaaagcatccaggacaagcatgtttgcaaaaaacaagcatgtcctgtctctttcacatctctggcacatccatgatcaccctgagtcagacccaaataaggggcagcagagacagccagatgaagcagcaatttgagggtagtaactggtgatgacaaagcccttctcaattttactttattaacttagccaaggcttagttcctgttttgcagcctgatggaaatttaatagatc

SEQ ID NO: 117590 - DNA, 3607 bp, Homo sapiens
ccctagaaatgcagcaacttgctctgttgccaggagcttccctgccaagtgtcttgtgcacagccctctcctgggtgagctcctggacaaagcctcatgccctggtaaaccctgcagactgcagccactattctggcctaggtcatagtcttgagcaccagctctgctagggctactcaggcattgcacttgtctgcaggtgttaggaatttatgttactgaagagtgagcaatgtcattgtgagagcatgtgcaagagcaagctttcctgcaatacctaaagaaaagcaaggggaatagtaggacctgggacagcagtcctaggcccattaattccccttgcccctctgacagaatttcgaactcagtattcttcgaatactcagatgccagggttgccattgtaacagaataacagtggctgggggacacccattcagtggctcttcagaaagaacaaattcactgggtggatataacacttaaggaaaatgctcaataagccacccattgagtctcagagcaacctgaccaacaaggtgaaaaccatttaaaagacacattgtcttgctggagaaccttcctcccctgggtttcaccatggaacttcagcattacatgactaatgggcacgtaaattaaatgttactaagcaagagactattctcacttcttgccaccctgagcagggcagggaagccagccagcagtcacagtgatggggacagccttaaaggcccatagtcacttggaagacaatggcagagcccttaggggtttgcccaagccaggtaggatgttagcaccagcctagtgctcaaggatgaggacagtcacatccaccagcccccaaccctcagcaatgagtactcattctaggtcctgatagctgccttactttggcccccagatcacaagtccctttaaaggaaagctgatctcctcgtccactgtggcttgtgcttccttttgtcccaggtgccacccacgggctctgaacattcatcctagtttgcttgctcccgcatcccgagcagcatttgagtcttatgtttgaaatgggttcatttgagccagcaactccctgcttcccttttgtgcctcgtgcacttggagtgtccactgtcctttacctgtatcccaaggctccttctctgagacttcccagctctcctgttatttcccacctcatgcttttctttgcagctgaaccttattcacagtgaaatcagtaatttagccggctttgaggtggaggccataatcaatcctaccaatgctgacattgaccttaaagatgacctaggtaattggggacggggttcggcaccaccagctgtcagatgaaaagttatggaacccagaatttaggcatttcatcttcccagactttacagtggtcaagccaaatttccaaatccaagattgatatttgagtgtagacgctgaatatcaacttactccaggccattccaagtgtaaacggtctgtttcattaagtgtgattggctactctctcctcaattgcaaatacattgccatctgaattctcttccataatgatcaaactgactgctggttacttggggagggatttttaaacgtgttggtttttgtttgtttttttgtttttactttagaactgaaaaatctcaggtaactacaaaatgatagtttctccatttaaaccttaattagaaatgacaaagcttgaaagagaagacaggccacatcagtatgctattaagctgtctttagtccacaatttactaccatcacttcaacttttctttagaactgaaaacagtatatgactgaatgccaccttcttgaattatttggctagaggatggtattaaacagaagggcaatatctccaagtgagttcttatggaggaaaactgccccagagccatggtgtctccctgttcaagatggcagatggttcagggcagactgagaggtgcccctcaagtgtcctgcctctatggctttatctttgcatatgtggcactgtcagctcaatggcacgacagggctgctctgctgctcttcgatgtagaggcttgccaggggaaataggcacacagatgcagcctccttcctaaccctcaactgcaatctattttgtatcccttgagctctcagcttctgctgtttttgtcagatagcagacttccttactgggagatacactcattccatgggcccaggcctgacccacacgaactgggtgcaacagtgggctgaaaacatgaggactggactcaagagtgtccagcttgaacttgttttccaactgccttatacagatacttaaaaaaaaaaaggccacaagctagaaaaagcaaggattctatccaaagcacattttatactaaaatacaaaggccaggtgcagtggctcacacctgtaactccagcgttttgggaggctgaggcaggaggattgagtgaggccaggagttggagaccaacctgggcaagatagtgagacctcatctctacaaaaaataaaaaacttagctgggcttggtgacacgtgcctgtagtctcagctactcaggaggctgaggcaggaggattgcttgagcccaggagttcgaagctgcagtgagctatgattgtgccactgcactccagcctaggcaacagcaagatcctatctgtaaaaaaaaaaaaaaaaaaaaaaaaaaaaaaaaaaaaaattaaaccataaaaataagataggctagagtaagagatgggcctggaaaaatattgatagagatcggcccatatgttgaggggaaaaaataaaggcagtcctctacatatatcaatactgttctctgggttttcaagagaaatcccttgaaggtagacaaaatggtaaatgtcacaagaataaaaatcaaagcctgcaagttgactgctgcagacagaatggagaaacttgttgttttggttggcctgatggtccactttttttttttttaaacagatgccatgttttagtagccttctcagtgggatgccagctttataggcttttgcgaagtgaaacggggcattcattttatttcttttaacctttggaaatgatctcatgtgtgtgtttctctttttttggacttctcattcaaatgtttaatttaaacatgtcacatttgatattcctcctcctcctgtcctcacccccatccacatgtgcgcacactgcgtggactgattgccccttgggctcatatgttggaatcgaccaggtaggccagccctgccattggggcattagtaaatgtgcctgtgcgtgggtctcggtccaacacagttgatatacatttgtttacctgttatagttgcaagttgtacaggctgacattgcctcgatcgacagtgatgctgtcgttcacccgacaaacactgacttctacatcggtggtgaagtaggtaatgcctagccgggtgctgccgagtgtgtgtgtgcatggtcagtcggccgctgcagacagcttgatcctttgacagctatgcagggctgcattcatttcacacttccagctgtcctgaccctgtctcctgtccctgggttgtgaacctgagtaataaagctagctgtcagccagga

SEQ ID NO: 117591 - DNA, 1044 bp, Homo sapiens
tatcggatcccagtgctggaagggatcttgaaggtcccttggctacgaccctttctgccaactgtgcagccacgcggggacccccttctgctctataactggcagtgccctatgattactttcctcagtggctaacagtcttcatagctgctttaaattcctcatgctgtggtttaaaacttagttttccatctttcctaacgacggtacaaagaagcagtcaccttattcaaattctgaaaccattaatgatccttattcctcccagaaaatcagactaattttgggaatttttacagttcccagaaatctgatttcctaacccacaaggaccacttctctgccatgtacttcagatggacacacacccctctggctgataaaccccactggatctgaccctggctggtgggaggggaccctggggcctcctaggactggacctctgtcttggctctatctcgcttattcatttgtgactggacagtgggagcctgtccagacacatgtgtacctggtccatttgcacgctatgctcatgggctttcttctgtatagtggagctactgtcttcgttcatgatcatctcactgtcagcttctgcccactggcccacctgccaagctgattacccatttgtccttccaaagtacttgaattaatttgtcttctccccttcccattctcttcccctgatgcacacatcccaagcacacactttctagtcaagattgtttaaaaatacatatttgtacacattttacagcaaaaaaacttttgtggctcagctgcataccctgaggacttctgctgagccccagtgcatagcagagcatagttggaaaatcacagctctagcctcatccacagatgtgaagagtgaaacagcacttggttggcaggaaatcctcaatgctgagtagtagtggctccctgaggtactgtagtctgcacttccaagagtggggatgcctctggtcagaagggaaggtagtgagtccaaaggaagctgagaattctccatgagcttgagttctgttcgca

SEQ ID NO: 117592 - DNA, 1120 bp, Homo sapiens
ttctatctgtgacactgaaaccagtgcttgaagattgcaagcaagctggggtggagaaaggtgatattgtgcatgctacagccctgtaaggcatggttgctaagctactcaggaagcatggcccaggcttaggagcctgaccattgatgttaatgatgtatttcacatactgaagtctcaggagtcatcatagccattactctctgattttgcccaatgttcacacacattgttgaattgttttaaaaaagaaatcagtgctgtgaatctgagtcaactaaatgcttttgctttgtgttcagccaagatttgcagccttttttcagaggttttaaaattttcagaaaaaacatttctaatgtgtctaatgtgtcagtggtaacactgacttaatggtaaatggtaaatgatttaagtttccttgtcagagtcagtattatttgaaggagttaggaaggcagtctgaggctgtgatgagtctccttacctcccaaatgatcaagatggcaaccccagctcgcaagccattcaaggcgggcataacgtaccatgggttttctccctttgatccacatacccttctcccgggagctggaagaactgtgaggagaaagggagctcttgaagttgaagcatcagtgaggagaaaaaccattcaccccttccccccactatggctgaggactggcttctgagacagtttaggaaactgacaaagccatgaaggaatggctcagctatcgaccatctggacatccagcagtatctatccatgtccttatctttgtggggctctttctagctggacacactagattctgcccggcccaaggcctctggagaaatccagcttgggcatgcatgcatgcagggagagccacacagcacagctgtgagggcaggagccagccctggagtgtgccccagggaagacacagctctcaggaggagactggaaagggtcctatggaagacattgcccttcccattcccctcgttgaagtgaactttggggacaggaaaataactgcattttaggtggtcagccaggcttccttccttatctgttatgagaaaatgagagacaccaaaatctgacagttacaggctagatttaaca

SEQ ID NO: 117593 - DNA, 1717 bp, Homo sapiens
ctgtgggagatggggacccttggttagtctggaggaggagctgcttctgtgggataaactggtcatcagatagcaccagccagggaatcaggcagaagtcaagccttggtggtggaaggtgaacaacctagccggcagcctgcttgtcctggggggcactaacggtagagcctcaggtctgattcagggctctacaggggattgttttcagactgtactgatgggtgcactgggtttcttcactgaaccaccagatgactcttccagctaattgtttgtttgttttaaccatgggcaatatattttcagccgccccagtgatgcaactttgccaggacgccatggttttgtaaaagacaattcacttttattgaaaataaaaatgatgcaaaggcttttaagacctgagaatgagagttaactaatatttctttattgacatcaaaaaggggtgggaagaaagaattaaactcttcttaattttttaatcctatacttaaagaattaaaggaatgaatttgacgttccaagttaatctgtgtttagtttgagtgtggtaacaaacttggatctgaagctgcatcatttttaaaccctcactgtcaatttcttttgcatcacagtgacacggttccctcgctcacgtcattgcaagttctcctcctacccctttccctctttctgtcactaattgcactctctctcatgatgcaattcctgtggtggactctgtgttccagaaaataaccattactgtttacatttttaaccattctttgtattttgtatgcatttttcaaaagaaaaagtagcactagttgtcatcttaaggtctggggatttgaaagtttttgttttaaaatattttttgttcctttaaaaatttcgactcagcagtgaagacaactgcctgggtctactttcacccctgtaacatattccttgggtaatgtattgaaagttaacgtgacccatccacattacttccatttgaaatacagagcagttcagcccttggggtcaccttctccctcttttccccactctgcccttaggcactcccaccctggcctctcccctgcctatgttcttgttacctcctgccagccactccaaaggcagcctcagatcagaattcctcatacctcccttgctggatgaactaaaatatttccaaagtagcagcaaatatggctgtaaaaatgtccatgcaaaatgcagatgcccttcttgttgctgtgatcttctgaaagaaatgggatcacggcctcctctgggctctgtttgttagccctggaggggagggggcaaacaccacagacatcttgctagcttctcccaagagccaggaacatgtcagctctcagcaactcaactcttccttttcagatacatctggtctcagggccaggcatcacacgaataaaaataaagtacagtagagtaaaattttggctaataatgactgttccctactcagagttggtagggtgaggatacaaaaagccatagaaaagtattgatactctataataaattacaaacatatcatttaatgttatttttaaaaatggagaatgaaagcagtgaacttagcttaacagtgaaattaatgtgcttatcttgacttttggaaggaaaatttgaaaggaatggttaagctgccacccagtataaaatggtcagccataagaggggctgaatgtagacccagaca

SEQ ID NO: 117594 - DNA, 1552 bp, Homo sapiens
tagaccttacttttcattgtaagtaaaaaatgttaatatgctcctgttaatgaatttgaatcctaaataggcaaatggataggacacaggccttgcccagagtttattcagatttatccttcaggaaagcatggccatctgtaatatttctcaccccttctttctggattttctcccactagaccctccctcaggagtgaagtactttttattaataatttggggaagggaaaggtgaagtgtctaaatgaaaaccaatgttgttctcactatccttactctacaatttatttgaatgcagaaaatctccaaattagccaaagtatccatttctaatacaggctttgtccttaatagaaatatgccaaaaacacgcatccctactcccacagtggtgtgccatattagtatttactctgggaagtgggaggagggtagttatgaaaggagctctggcgtggcaccttgaccacaggtgtacttcttacggcagatcagttgtaggaaaatgttaggaagtagaggatcggaaagttgttttcttaaactctccatgtcatgtacctctctcagaagttccttgggaactccagggcatacatatttcagtcttaataatgctgaggaagaagctgaagaccaagccaagaaccatgggtcaaggggtctgcagggagacagatggttcatcacagccaccacatgcgtccttctctaacactggctttaaggaaggaagggtggaagcgagtctgaccttctggagtcaggaaggttagagggttatagtccttagtcggctttttgagaattagtgacctagaacagtttttcttcttaagcttgaatagtattacagacatctagaaaggaaagacacttaaagatccttaattaagagacatttacttggtctgaatttatgaaaatggttctattctaaatgatcactgtaaagtgaagttttacctttaagtggctggtttttttttacgatcataaagtgattaacatataacttaacacactccacagaactcttgtacctcaaaatgagtctgagctcccccttggagaaacgctgagaactggttgtggtttagtttcctgtttccccttgggtgttatgggtgaggcttgggagctgcctctctattaggatgcctgtgtctgtgtggcccacattctgacccttccgtctgtgcaagaagaagcagggtgaagtcagtaaggcagccagcgccgacagcacaaccgagggcacacctgccgacggcttcacagtcctctccaccaagagcctcttccttggccagaaggtaggcagatgcgcggcctcagtctactcgagggccccaagggacaggtgggcacaggctacttccactggaaggctggggggatcccgggggccactcccagcctcgtgggtagacagagtgggctgtgagctttgggagtggcctcagggagggctagatgctggggaggccacaatgctgagggaggaccctggcagctggggaagggagacagtggtaaaaaagaagag

SEQ ID NO: 117595 - DNA, 1804 bp, Homo sapiens
aagtaacttctccaaaatcacacagcacagaaaccttagcagtcagaggaattggaccccagagcacttcatccacttggcatttcctttgtcttgaagcagccaccgtacacctcaggaagactggtaaatgcccggtccccaaggctggctcgatgaagacacagcctgaggggacagactctgcaacagtcatgggtgattgccagagacattcctgtggcctcgtatgggcagggaggacaggggtcctgcaagataggccttgaaggataggcagccctggacagggatgaggaaagtctagagcgcacaggcaggaggtgggtgtgagcacaggaggggcgaagtcccctggagtgacatgtgctggcccgccgggaaggggcggtctggtgcatgttagagctgctgctgtagcagtggcagagcaagcgaggtactgggcagagagctgccctgaggagccacagcaggcgtcggagagggcagtgcccagtcaggtatggggagcttgtgtcactcagtggcactgaggagggctggagagtgggaagctttttggccaatgtcctttcattgtccccttagcgaagaggaggtggaatcctaggtgttggagcttaggcaaatccttagacaagcagtcctcagcatcgggaatccacaccggcagacagcacagaggccaggctggtaaagacctcaggagctatagtgccctctcaggggcctccctttctatgacacactcacactgctctaaaaacagccatgaaaaaagaacctagaaagtcttcgcatgctcagaaccattttttgggagaagcaggattaagcaggctgggacagagtgtctgagggtaagggggcttgtgacctgtggtaccaaaggccagctggggcagccgatagcagaagtgcctgcagcttctcatctatccagtgttataattattttcattttgaaaggaaaatatgcagaagataaattcaaacagcacaaaagggagtagagcaaaacgtctccctctgaccaagtccctgattctgctcccagtgggcgaagctgctcccctgtcttgatgaacatgtgtagcccgattgcagacgtcgcctcctcccccaacacagtgcagcccacgaaactcactgttctgctcctcgctctttcgctttgagtccatctgggaaaccgtaccatgacagggctccttaaatgagtttcctctttacattatactcttcaaatcatttcatttcagcagacatcgctgattgttcaccccttcctgagatgaattaagaacaaatggctgtggttttccctatcaaaacaaacatacatattaaccatttccttgtaacttaattgagagtccttgacagcaagtgattggtgggtcagaggtcctgcccagctgccagccaggccttggagtagaacaggtttctcagggcctccccaggcaccttctccttcccagggccttgacttctactgcctgagccactggctctgcacgctctgctgtggtcagacaaaagccccagacctcattccaaggtagagatgcctgtgggggcgccctgggtgctgtgttccatcaaggcaggtctggcagcaccgaggttaatcgagttcaagtgcatttttcaaacatatgttaactgttaagcataacagcaaagagtaaactattggcagaggaaacaccaggttttctgttgcttttttcctccttttggcacaaatccatccatcgaaatcatccagttatagatagaggaaatcgaggcaaag

SEQ ID NO: 117596 - DNA, 2042 bp, Homo sapiens
gctaagccttatcagagtcctgtcctgtgaagcccacactttaacttttctctaaatagccttccgtgagactggttatcttaagagtttggcacaacctttaaaagagagaggagtatgtagaaaagtttttttgtaaagcaggcaggcagtaacttgctgttaaaatgtagcaagctgcacagttccttcagtgcatctcgggaagcgcatcaccgaatgggtttgcagaggtgaaatttcaatcccagactagcttccccaaaactgtttcttgcttgtggtaaatgacatttgtgtttgtgttttgtttcttcctgccactgaaaacataacaggagtaagacacatctgctggaacaaaatgcatggtttatgatttatttactatctcagttggtctgtctcttctgtttgcagtcccctagttcactgagagtggactgtaggttctttaatcatctggctcactttttgatatggtgttttatgaatggagagagatatttttcctgattggctagaatactagaacaggtctctgatccaagccaatcagagtgcagcttgtgaaccccagctctgtgagcaatggttgtctagtatatccacatgcctctggggacatgacagcgggtgacaccgttaatcatttggtgtgataggagtaaacggaagagggaagagaatgctgtaaacaggattagtgtcttgtccttcagaattaagtttctcaggttggcctttgtgattggagttgatgggaaggtgacaaatgcatgtggatatgcgggcatttatccagctgccagaatggatggcgtggttcttcctcatcagcagttatttgagcactgatagctcagactcctctatcctcaggggctggagatagggctctttgactagcaactccccagcagttctaatcaatattgcatgggatcaataggcatgtattcattgcttagataataaaatacttcatgattgactattccagcggtttcatgagtgccctgattgtttaaggggtttctgtgctgtagcttaaacaggagtcaatctcttatagatgtgaggaaggttaagtattttcctgcagtctatggtactgagccagaggcaggaggagaggtcactggaaccatagaactgtcacagagtcataaggcctcagtgtgccttatgcccagctatcagggcaattggagtgttcctttcctgagaatccccaaggtagctctacaagctccctgaattttgagtgtctgggctcctatagggattttgccaggtgtatgtacatgaatgtccaagagaaggtctctgattggtgtcccactagccatagctcccagtcctgtgggctttggaaatgctgccctctcctttctccctatccactgtcagtgccaactaatcagctaccttgtagctggcatgtgcatgtctaccgggtgccaggcagggtggtgggtgcttggagatacagtggtgagtagagcaaattggttcgtttcatcaagacagacaggtaaataggcaatgatgataccatgcactgagtgctaagaatgggatagctggtttcagaacttatatgtaaatgggatctagagtgactggcaatcatgatggaaggaagggctggaaactgcatttgcagagtactgtatataagactaagaaaaataattgagtatattaaagaataggggcagcctgagggagattgtgaggcacttttagctgggccctgggtctgcagctgccacatccattgagggaactgggagggagaaattcatcccggtggatctctggttgttgcaaatagagagatgtgttggaggtcaacagggcctgtgcacaaggttggagtctggacatgcagctgccccaaactagactgtgactgacagaaggcatggccatggcaggaatgcagaagagggagcacattgatggatcattgccagggaaggtattgggaccagtaggcaggattactccagacaaagggctagagagatgttcag

SEQ ID NO: 117597 - DNA, 1244 bp, Homo sapiens
ttttgttcaaaaaagaaacctggaaaccaacttctcttcgaaacgcatccccctgcccgcgcctgggcgcttttgtgggaaaaaagcggtgctggcgcctaccctggcgacccttcctggggcgggctcacgggccaggcccgaggccgcaggaggccccgcggcgctggctaggcagtctgggcctgggcacccgggagctgctgtgagcagagttgtacttggtgaggcccccgccggcccgcgagttgccggccccggcacaataagtcgggcccgagccccggggggccgaggtgtaggcgtctggctcgctatctgcagggaggggaaggcgggggctactcgcgggattgaagccgggctggtgcgggggaccgggttggggagtggtccaaggatgggctggagaggggccacgggaacccccgctgctcccgattgtctcggtatcagccttttgtttgctttgtggtaggaagggtttgctttttttaaaaggtaactccggaaggctgtaggcttccccgggtggagaaggccagcaggaaagagcctcgctgggggtggggtggagtggggaggtgagtgtgcaggatgctgctggcagtgtcacctgacaacaggtgtgcgacatggcgctccctacccccactcctgcaggggccacagatcactcaaggagttggtcagtacattgcttgaaaggttcttttagacaagatgttaggggaaatgtttctgagtttcaaagtgagagacttctgtacaaacaactgggacaaaccttgaattcaacaattacaatgactataaaggccttgtaagattttaatgacccagtaaacagcacataagaatagacaattagagggggcactcctgctagcttccctcttttcttccacctttgtggtttgaggttttaccgttaaagtagggggtaagggaagtgttttgttccaaagctccctgctccagggagtcgggcattttttaacagtcttaggtttgaatgggagactcgagttgtaaattaggtggaattcacctactgcaggccacctttaggctactagcctgttgtcagaggtgttaactctgaaatggacacctcttgcctgcaactggaattaatacccattgtacacatttaactagagttgggcagcagcatctcagtcttgcacaagagactctctgatgaggatgagtatgttttcaaacttattttttcttaaaca

SEQ ID NO: 117598 - DNA, 1037 bp, Homo sapiens
tgaagctgagcctgtgtgtccatgttccaacttcccaggacttcttccatggagaagcccctcaccgtcctgcgagtgagcctgtaccatcccacgctgggcccatctgcctttgccaatgtcccaccacggctgcagcatgataccagccctctgcttctcggacgggggcaggacgcccacctccagctgcagctccctcgcctctcccgccgtcacctgtccctggagccctacctggagaaaggcagtgccctgctggccttctgcctcaaggccctgagccgcaagggctgtgtgtgggtcaatgggctgacgctgaggtacctggagcaggtccccctgagcaccgtcaacagggtctccttctcaggcatccagatgctggttcgcgtagaagaaggcacatccctggaggcttttgtctgctatttccatgtcagcccttcacccctgatttacagacctgaggctgaggaaactgacgaatgggaaggcatctcccaggggcagcctccccctggttcagggtagcagatccaggttgcctggggtttctccacggcccttcccagacttgggacagccctctccagccaagacctggaggaggaacagaaatacagctccagagggaacccccagacagtgcactctgctagccctgccactagagcaagcctttgctagatgaaacaggatttgaaatacttgagctgcatcatgcaaggttgacaagcaaaacccactggctgccttgctcataatgaaccaattctgcaaacaccgaacaaacagcccaggggggagaagcaccctctgtggccagagctatgcaatgtaatgggaacatcatatacttttagaggccctgaggggttctggggagcctctctcagcatttccacacatttctccctgttgtctgactaggagttactttatgtggttcattttgtgtgctgcttaagagcaggagtttgaggttgcaccaggaatgcgtggacacatgtaacaattacatttgtggtagcttg

SEQ ID NO: 117599 - DNA, 1050 bp, Homo sapiens
tgcattatttgggcaaaatacaaagaaatatacaagcctaagtcaagtaagggaatgcctcccacccttgctattttctctaaatagagaggctgagtacagacgcggaaagaaacaaggaggtgtgggagcagcccgccatgctagagaaagactacattcctgccactaacagtcggtggccactgggcaaatcttaagtctgtggtgcctcagtttcctcatatgcaaagcgggtttgttccataggcctctgaggacaaaatgagattgcagaagtgagattgcagatggttagaaaagacaaagccacactggtgtgagttttcatggtccccgggaccacatcctcagaaggatccctcccacttctcctgggggttcctgcagttctgggacaggggcattccctgcagaccagacgtgaatgaagccgcttagccagcatcttgtgaacggcctgcctcatgtcctgagccacttacacatgtgttttttctccccagggtctacgaagaatagggtgaaaaacctcagaagggaaaactccaaaccagttgggagacttgtgcaaaggactttgcagattaaaaaaaaaaaaaaaaaaaaaaaaaaaaaaaaaaaaaaaaaaagcctttctttctcacaggcataagacacaaattatatattgttatgaagcactttttaccaacggtcagtttttacattttatagctgcgtgcgaaaggcttccagatgggagacccatctctcttgtgctccagacttcatcacaggctgctttttatcaaaaaggggaaaactcatgcctttcctttttaaaaaatgcttttttgtatttgtccatacgtcactatacatctgagctttataagcgcccgggaggaacaatgagcttggtggacacatttcattgcagtgttgctccattcctagcttgggaagcttccgcttagaggtcctggcgcctcggcacagctgccacgggctctcctgggcttatggccggtcacagcctcagtgtgactccacagtggcccctgtagc

SEQ ID NO: 117600 - DNA, 1050 bp, Homo sapiens
agctcctcaaatccaaggacagaggttttggcatgtgcaccttgctggcattagctttctccacctcctgatcccaggctcagagaggctgggagtcctctgacctttgttccccaaaagaggcctgagccctggagacaacacactgcatgaggttgggggtgggagagaccatcccagactctcaggactcccaggggaaaagtgagggctgctcactacatacagggttaggccctaacatggagtcagagaataaggggacaaccagaaccttccaaagagccagcttggaagtgagcacacaagtcggctcccttgagaggaggcaggaagccacagtctctcagggccctgacttagcccagggctactcacaggccacacaagaggcaacatgttattcaggctcctcaaccctccacctcatcctgctccgtttcagcatcaccaccaagagcgtgtccaggtaccgaggtcaggagcactgcctgcaccccaagctgcagagcaccaagcgcttcatcaagtggtacaacgcctggaacgagaagcgcaggtacgccccgcctctactcaccttccttcccaccagacccagctgtggctctcaggatgggaagggacccccccaccaggtcatctagccccatctaatatgtgaacacccaccacaacatccacagcaaacagatactcagacaatgcttacatacccccagggacaaggaactcaccacttaccaaagctagctatccatctcttgtccatttgcaagcatggcaggtttgtcattttgtaaactaaagtctgtctcactctaatatttgcattataatcttaattcctctttttatttcagttacgtaagttgttaaatggcagagtgagcactggcatggctgccaggggagctctgaggacttcagtggggtgaaatgtgaccacttaggtgactgtgtatgttggctataaaactgcgctataaaaccatgaggtgctgaggatgatccttgccagaaacatgttttcttctccaaggtgcccca

SEQ ID NO: 117601 - DNA, 1014 bp, Homo sapiens
aactcttgtatttgaaggcaagggggatccgctttcctgtctcctgctccatctgtccccattctaaaacagccaaaggctccacaaggcttcctctgcactgctcaggtgcacgccagtttggaatgaaaccaactctcagccaattaaatggcgtacgggagcgttgatataattccgagagtaaggacttgtggacagttttccctttggttgttcacttcttttgcattgtgtttgagtgtacagatgtggagccacagctggtttcctcctttctgtgagggccctttgatagccagtcaactgagttttccattgttatttttcacaggtctaatagctgttggcaaccactttgtgttattttgttcacataattattcactgagcatgaaatacccctgaacaaccatcagcgtctcagctgtggccttgctagctggcgtcaccactagaaagtggttaaaaccttgaggacgaaatggggatttttttctaataagattgattcagccactaagcgcaaagcctgacacatgtgttgagttcgaattcactctgagttgctgtgacatggttgcgcaagtgccctgagttctgccaagtctgtgatcataacccttcttagaaaagtgtttttagggaagacaggtcagcctggtctctgctgctcatgattgaaattgagggcagagactactggaccccacatgaaacctcttccttcctgcctggggcttgtccttcagtggctcatgttttactagcagctgcttcatagttccagcactcaggaaagcatagatacccaaaagagaaaactcagagactttaatctgctctctgcctgtgtaggctcatgtgctgtttggagagaatgtagaacttctccctttatctcataacttgaactacaattgctggcagtgaagttcagggccaagggaggagtaaagagaatagggccaagggattgcattgatgggcatgaccaggcaataagatggccac

SEQ ID NO: 117602 - DNA, 1045 bp, Homo sapiens
ggttatgaaatgttcaacatgatcagcttcttccttgctcatttcaggcccaaaacccacattacctcctttcataacctttaatatccctcggaaaccctctccctttacattctccatctcttccctggaacatctccagaagggttcgtgattgggttacatacaagtttccgaggctgtaacttcctttcagtcataaatcacctcttacacactcactttttccttctcattgttcttctgtattaatagccccaaatcctgggagcatttgagaactgttccaattttggtttgaaaatcaatttggaagctaatggttggctttgcttagacctccaattcctctgggaaggccagttcctacaaattggccaagccagggattgggggcttctcttaaatgccggatactttggtctcagtgtttttcttctactctgtccctaaaattaaaaagttaattctgggtgggggtgggggagtagagggaacttaatgccttctgttgtatgagttggtagataatttttaaaatggttcatttcatggtaggtcaaattctattacgaaagaaatataaaaatgaaattaccttgtgtttgttaaaaggctctgatgttcttctcatttttttggaaacatctttctcctaaataagttctgcttcctccataggctgctgacctccctcggggaaagtgagaaagtgtcagattcatcaaatgttaatggggcggggctccccaccagatgggagcagcgaccctcggctggttgacaggcctgccctcaacatcagccagctgggatatgcattcagggataaaggaaacagactcttgggtgggtttcttcaggaagacaaaagaggaacctctcacatacagcatattgacttatctggtctgtaccccaaaccagagcaagaaatggaactgatattgtgcaaacctagaggctaacaccaggccagaaaagattcagccaagggcaccatggccagccttctagagagcctgctacataaaggaaaaaaggc

SEQ ID NO: 117603 - DNA, 1036 bp, Homo sapiens
ttttcatgcaaatttgacttgctaatttccacccccaaaatcctgttgacattttgattaggattacaatgaatttatggatgaatttgtgataaaatttagataattttcagtcatgttttagtctgttttcatactgctttgaaaaaatacctgagactgggtaatttataaagaaaaagtggtttaatggactcacagttccacatggctgggaagacctcacaatcatggtggaaggcaaaggaagagcaaaggcacatcttacatagtgtcaggcaagagagtgtgtgaaggggaactgccttttataaaaccatcagatctcatgagacttattcacaatcacaagaacagcatgggaaaaacccacccccatgattcaattatctcccaccaggtccctcccatgacacgtggagattgtgggaactacgtttcatgatgtgatttgggtggggacacagccaaaccatatcaagtcattatttctttaagcaattttttgtccatcctctctctcttcttctgaaactccaattatatgtatcctaggccatttgaagttgtctcacagcccattgattttccctatagtttttctctctttttcctctctgtgtttcattttctttttctttttttctttcctttttttgagatggagtttcgctctagttggcaaggatagagtgcaattgcacgatcttggctcaccgcaacctctgcctcccatgttcaagtgattctcctgcctcagcctcctgagtggccgggattacaggcatgcccggctaattttgtatctttagtagagatggggtttctccatgttggtcaggctggtctcaaactctgacctcaggtgatctgcccacctcggcctcccaaagtgctgggattgcaggcgtgagccactgtgcccagctgtgtttcatttataatagtttctatttctgtcttcaagttcactattttcttttcttcagcagtgtctaattttctgttaacttcatccaatgtatttttcatttca

SEQ ID NO: 117604 - DNA, 1088 bp, Homo sapiens
ttgtggggaggagagggtactccaaaagaagtactcaagctttgtgctcagaccgcatctgccccttgcacttggggcaaacctgcccttccacaaagcattctagacatgactgaggagcacatgaagtatgtttacctgttcccttcttcagactccgtttccctccagtgcccctgtgtctcactctgcaaagcaactatgcatgcatagaccatcctccatagccaccattcagggaggctctgtatgccagaacttgcccagtctcaggcacccaccccatcaaaacttatccatcctatgttccccttctgccaaattctgcaatcagctgatctgataaaccaacttatattttgggtttaacgaacagtgatcgctcagcattaacctaagaacttgctatgcaatatatgttccccaggccagtagcagtgccatcacctgagagcttgttggaaatgcagaatctcaggcccagcccagaccttctgaattgcaacctgcattttaacaagatccccaggagattcaaatgcacattaaattctgagaagcactcacctaatatatattttgctcttttcagcagtataatggctttcaacgctaggcatttcgtgttaatgatgctagtagtttggtatttcatacttttacgaaactttttcacaactatgaacttgtgtggttatcagagcagctagactgagttctcagaggcaccaggggcccttctgaggcctcccagcagccctgatgaggcttgtcattggaaaattgtttagtagctgaacaaatgaataaacgtagaacctccaaaagagacaggacacgggacattatgtattttgcaagtgaagaaactaaggctcaaataggtcaagactggctctttatagcttataagtagcagtaccgatgctccaacctcaggcttccaactttgcatctccaagtgactgaagttagttcttagggtgaggaggcgttttgaagctctgtagcagacagatttgagtgttcctccctcccccatcatatttcaaattctacaacgaggtttgaatttgtgtggaatgaca

SEQ ID NO: 117605 - DNA, 1035 bp, Homo sapiens
tcctcctctaggaggctaggagaggttggggctccggattcagcgtcacagttctgacacatctgagaaaagaaggacgttccatctgttactgcatcctgaattcctaaccacaccagctctgtccccagtccctgcctacattggagtccagaggggtcttacaaagcccaaacctgactgtggttctcctctgtgaaaagccagcaatgggcctcaaccatggctagattgctcaagcactcagggcttcttgccattcctaagtcacaccaaacttgtccttcccttagagcctgtgccaagatctgctcctggactctcagctcagaagagccttcccagccccagcctccctgcagggtgactccagatcatttcatcactggcatgctcttcctgggctgtgtggtctgcctgcttcatgtgtggggtggtcttatctgtcttatctgtctggtgcctctcgttcacaataggaactcaactgacactttttcaactagtctgctggctctcagtccaactcatattcccttcactctgtccagtccagccacacaggccttctcttgatccatctcacttgccaagcatcctcctgccacaggggctctgcatgggctaatgcttctgcccagagtctcttccttctcctttctcctaggtggtgacttcctcagcgcttggttaaggtcacttccctaatgtccctggcttagtggcatcaccttcttcatgactgccaccaccctcatacccctcattcagagcacccgttcctctgctgtgaaatatttgactgtgtggtttcttgattaatatctctcatcctgttagttacaaattccaccaaggcaaggcccatctgtctagatcacttctgtgtcccgaaggcctagaaaaaccctggcatatggtagacaccaagtattggaagaaaggaaagaagggtgggagggaaggaaagaggcagacaaaaagagaacaccttggccaggaacgaagtctttatcagactccatggtgatagga

SEQ ID NO: 117606 - DNA, 1053 bp, Homo sapiens
tcacttaccacagcagctgctagagtcttgctcagtgaaaatgtgttcaagggagaaggtttgaaggttgtattagttcgttttcatgctgctgttaaagacatacctgagactgggtaatttatacagaaaaagaggtttaatggactcacagttccacgtggctggggaggcctcacaatcatggtggaaggtgaaatgcatgtcttacacggtggcagacaagagagaatgtgagccaagcaaaagagatttccccttataaaatcatcagatctcatgagagttattcattaccacgagaacagtatgggggaaggtaccaccatgattcgattatctcccacccggtccctcccacaacacgtgggaattatgggagctacagttcaagatgggatttgggtggggacgcagccaaaccatatcaaggattttccaaaaatatgcaactaccctagctggggagggggtgcatagtggtttaggtaggacaagtacttagggctgggctgcctgtgttcaagtgctggctctcctacccactagctttgtcaccactccaacaaacttcttcacctctccagccttgccttcttcatctggaaaacagaaaagagaacagtactcaacccataagagtattttaaggatggaatgacttaacacataaaggtattgagaatagtacctgacattggtaaactcttatttttctttaataagccagtattctacgtgggcacatgcatgcactgttttttttttcctactgtttttttttttccttctgctttcttccctgcatcattctcaaacgtatagcctttcctaaacatagcctcatctggaggaagcttggaggctaattcttgcttttgttgtctttagaagcagaaatcattctaaacatttgtatcttaactacagagcactatgtggtttatgtagagcacagcattcaccccattcctgtcccagtgaaatatgaggagtcccatggatggaagactgaggaagaaaatgctgggaaagactggggaagggtgtgtt

SEQ ID NO: 117607 - DNA, 1048 bp, Homo sapiens
gctattgaaggggtctggggacagactcaatcacagaggcctttcagaagatctgcctgctgtgcatgggcaaagagggccacttgctgacctcagagcatgtgctttctcagtagtgcccaagctgtcccatggtcactgacccagttagaatgactgaatggactttggcttgtgtctcattaggaatcctagccccattctagtcttccagtgagatctgtccatgagtgaaggaatctcacaggaaaaaacaaaatgcttctatgggtgtggttgctggccttatctacaccacagaagccatcacacagactgtctttcttcccattgttagaatgtgccctgaccaagcagcccacagggcctgggacagaggctgatctctgcctaactgagctcacctctcctccctctcctcctgactggttagattttctaggtgactgttcccctgatgacacaagcccgctgggccccagcagtgtttagaggggttgttgactcacgagatgacattcctgctgatgtgtgtcatgccctggggtggatgaatgataaatgaaaacagcgcttttaacttttgaacccactttctccttccttgtagccaagacactatttgaattggctgcagagtctgatgtgtccacagccattgaccttttcagacaagccggcctcggcaatcatctctctggaagtgagcggttgaccctcctggctcccctgaattctgtattcaaaggtaacatggggaaggcatccctgttagattgtccctggaggcagcttccccacccctgtcacctccacaacactctccgatttacagcaccccatgggacattagaacttccactcagctcaaccaaaagcagatgtgacttcagcagaaacttcagaggctctgttgtttcattaggcagtgcagagaatgcctttggggagccgttcctcagaactcaagacttgacatctgggaggcagccgttcctcagaactcaagacttgacatctgggagagcagagcattcccttgcctttc

SEQ ID NO: 117608 - DNA, 1009 bp, Homo sapiens
cgctttgtgtttcaaagataaggatccgcgcttatcggtgggaattacactctgggcagttgtgaccggctactgcaatcagctggtagttagacctggtttctgccacttgccatgtcagttttcaccactgcaaggatttcttctacttcatgtaaacttctctgtgctgcaaagagaatgccaaagcagcgtctttttgccttcaccatattcagccgctggccgggtcctatacttcaatatcagggctcaaattaatattccagtctcttcccctccccttttcccctctcctcctttcagctgctgttactacgtggagtttggagcctaagctttgaaaactcccatgtggcgcgcccgtcttaagtctgagcatgctcagtagccaaaacagatttttggttgcagaactcgggcgaggatacttggggtatttggacgtttgccggcttcccaacagaatgttccggttctggtggtgatggcattggagaatggggcttaggcaagcctgtaggtgaggaatggctgaacaccctgagccagatgtttatcttgattgtaaagacaatgtttcctgaccagctggagctttggggggggggggggggtgttgcggggggagggagcaattttggttgcttgtgcatttaaatgggtgtggcgctaagtatatcttgtttaccttatctttctgtggaaaagttttgatgtctaggtttgtcacatcatgcctgttgcctagcactaccaaaagggttgttatctagcagcaaagattgaataggtggaggtcgtggcttggcctcacagaagttgagaggaaagggtacttgggttgcgtttttgaaaattcgtatttaaaactagagtacttgaatttccttagagtacctgaattgcccagagtgaattagtttttaattttaatttgaaagacaaaagattgaaaaccttagtcccagtaggtttagtaacattccaaatagcttacaatttctgc

SEQ ID NO: 117609 - DNA, 1019 bp, Homo sapiens
atacataggaggtagagcaacctggttttgcctctggttatcatttgacattgccagtgtcttacttgttcatattatggggaaggaatcgagtggtcacagaacttttggagaaaatttatcaattttttgtttactttgtaatgcttttctgttcttatttaataaaatatgcctttcgattatattaatttaaatttgtatatattgaattgatttaaactaggatcctttccccctttctctttcaggacttgacccaatgaaagaagcatatggcacttgtgaagataaatgttactcctccctttttaattggaacttctgcttaggacctgtgtatgacgtttcacctgtgatctgttctttcggtagccactgactttgagttacaggaaggtctccgaagatttgtgtcaaatgacgtcaatggccagcttgttttcttttactagtccagcagtaaagcgattgttgggctggaaacaaggtgatgaggaggagaaatgggcagaaaaggcagttgatgctttggtgaagaaactaaaaaagaaaaagggtgccatggaggaactggagaaagccttgagcagtccaggacagccgagtaaatgtgtcactattcccagatctttagatggacgcctgcaggtttctcacagaaaaggcttaccccatgttatatattgtcgtgtttggcgctggccggatttgcagagtcatcatgagctaaagccgttggatatttgtgaatttccttttggatctaagcaaaaagaagtttgtatcaacccataccactataagagagtggagagtccaggtaggtcttattcctgagaagaatttggaaaaacaaaaacaaaaaacctctcttcctgatatgcatgtaactagatttagtaatgaaaaggttgtattagctttgtgtttccatcttaaatattctaatcttggaagggctattggattttgagtttagctttttatatgtaggtgatacaattctcaggtggctt

SEQ ID NO: 117610 - DNA, 1056 bp, Homo sapiens
tgacagattgccacaaacttagtggcttagcacaatgcatgtttattacctcacagtttctttgggtgaggagtccagtcacatttagctgggtcctttgcaaggcgctgtaatcaaggtgttggttagggccaaggtcttatcagaagctcaattagggaaggatctgcttccaagcccatgtgattgttgacagatttagttgctttcacatagccttctttataggtagttcacattcatgacagcttcttcaaagccagtaaggaagagagggtcttctggtaagaaggacattatattcttgtggaatgtaatcatacatacgctgtcacctttgccatattctgttggttagaaggaagtgataggtcatactcatactcaagcagggagaattacccaatggtttgaatacctggaggtgggaatcacagtggttaccttagagtctatctgggtttcacgtggagatgtgtggtaaaaagactgaaaataacattggatgtggagactagtagaaaggatagcagatagcagtgattatgctgtctgtgaaagttcaacttaagagctttagagtgtctttagacagttggtatgatatgattctcagtttcttactgagtccaaggaaagctgatagctgaaggaactgatgaagaaaggaagataaaaggatttaatagagaagtataggctgaaaaactcccaagcttgctatttgctaggagggagtctaggaattttatgtattcccctatagccaaagtgtgactagtagtcagccagccaatagaaatgtcttattttttgtatacatttttctcagctatgattcattctatagaaaagactggggcatagctctgatacttttaaataacggaaaatttcatgtcttactagttcaactattggaaagagactatagagacctcatgtttcgccctgagcccaaactcttgggggaaggggcagattacccagctagattagcttgctgaccccccatgattaagcagctatgacgcagaatggatcacttcatattac

SEQ ID NO: 117611 - DNA, 3950 bp, Homo sapiens
gtaatatgtaatgaaataattatacatttcaccataatgtcaaattagtgggagccctgagcttgtttacctgcagctaggttgtctcatccaggcatgatgggagacagtgacagatcatcaggcattagattctcataaggagcgcacaacctagatccctcatatgtgcagttggcgataggatttgctttcctatgagaatctcatgctgctactgatctgacaggaggcggagttcaggcggtagtgagagcaatggggagtggctggaaatacagatgaagcttcgctcactctctctcaccatcacctcctgctgtatggcctggttcataagagagcatgaactgggggggttagggacccctgatctaatagacagtattgtctattgattaagactgtgggttctggagccaggctttctggatttgaatcctggttttaccaaatactacctcaagccttaacctttctgagatttagtttcctcattgtaaaatggtaataatactacctacctaataggttgttatgagcattagatgagttggtgccttaaaaagtacttgttaaaacattaagtggcctggaatcagtttcaaattaaatatcaattctaatagaataatatattctggaaatagagcattgaggaagatggcagagagaaaattttccaagaaataatatcaaacacttccccaaactgaaaattgaaagggctcagtgaccaagtaatcagaacaaaggataaaaaaagccccacatgaaatttttgtatatcatagattaaaaaaaagattctgaaaactttccagaaaagaaagacaggaaacatataaaggactagaaatcagaatactggatttctcaatgcagttctggattctagaagaaagtaaagtagtgctgtcaaaattcagaaggaaatgttatctgcctgccgacaagcaaaaaaaataaatttttatacatgcaggaagtcaagaaaattcaactttttactttctcttaggacactaatagaggatgaggtccaggaaatgtgatccagcagtagagaagggaagtccaaggacttcagacttgtaggagacttgagcagtaaccaatataggttggaaccaaaagttggaagatctgggcctggcacggtggctcacgcctgtaatcccagcactttgggaggccgaggtgggcagatcacgaggtcaggagatcgagacaatcctggctaatacggtgaaaccccgtctctactaaaaatacaaaaaattagccaggcgtggtggtcagcgcctgtagtctcagctactcgggaggctgaggcaggagaatggcgtgaacccgggaggtggagcttgcagtgagccgagatggcgccagtgcactccagcctgggcgacagagcgagactccatctcaaaaaaaaaaagatggaagatccaagggaaaacgtagagtgaataaattatttgattatttgttgtatccaagaaatagtaatgataggcgtttaacagatctgttggaattctggaaatattagtggaatgtacttaaaattaaacaaatgaagaaacaaggcaatggttaactttagtaaaaacattgttcaagaaaaagtagactcatagtacacttgattcagcaatgaattacatgtatgtatatatgaatactggatattgatttaagcaaaatgttatatttaactctattttggggatgggagtgggatagaataataaaagaatgctgcctcatttgccctaagagcaagtctacaaataatatcttgactaataatagcaatataagcatattatttagcagtacacaaagtaaatgttataagagatggctaagagtttaaatttgttttctatagaaacagtatatgggagggggctaggaattgcagtttttgttataatctctaatagcatgtctttttttaaactgtccacatattaacattattttggatgatataaaataattttttaaaaatcgtgcatagataatgtacaagtgaaagagaagccagtgattttagcatacctctaaagaaaaaaaaaagcaaattcttactgaactgaattcctgagtagttatttcactaagtctctcagattgctagcctgctaaatgtagaaattcttgctgcctaatgcccttctctccaatggcagctgcctcttgttctgcgaggggaatagcagttgttaacacacagtagaacaaaacgattgtagtcagatgttaaccacatatttagtatactaatgcagtagaatgaaatgaaacaatagacaaaaatagcacaaatactgacttaacagaaacactggattgttgtgtacatccctacttcagggaggtgaagtgtgacttaggtagcttaaaaacaaactcattttgttgatgctgaatgatatcagaattaagttgagatttttctaagtgaaactacattgacagatacaggacaattgttaatgagatgagttgtaaatgtttgaagaatcaggtttgtttcagtttcctgcatggaaaggtaatcagatatttgaatgtgattggtcacttgggtctttagagaaagcgaatatttgaataaagtttatctcttaaaaatgtatctgttaaaaatgtttagactttgttgtgtatattttcattatggtcatatttagaagactgattttgattggaaggcttttacctagagaatattaccatattcaatatggaaaaccgtactgaacaacgtaaaacatgagatctttcaaactaagaaagatcaaagtgttcataattggaaatgtggaagtttttagggcattcacataacagattccaacttcactctgtagtcttaactccttgttcagtgcgtaggccaactgattttctcatctcctctgccaccctccccttctacctcttcccagccctagtactcccatgtgaaatcctcctgtatctttaaggttcagtcaggtatgtttttttcttacagtattttgtttgattctctgctagctgggagcgctcacctctgtttaactcctattgtgttaaattctctgttttatggttgttttttaatatcctttatctcatagaacaggagtggtatctttctctggattttctgtcttccagggtaccttatgcaggctaaatgcttacagagttttggattcagtttttatgtaaatagagattcagggctctataaaacagccctttctaaaagtaaattgttttaataggtttacagtcttacatgaatcctttctaccaaccccttagtgtggatggggcatttgtttagtcattcctgacaaatgacttttgatttttgtttttcagtcttacctccagtattagtgcctcgtcataatgaattcaatccacaacacagccttctggttcagtttaggaacctgagccacaatgaaccacacatgccacaaaatgccacgtttccagattctttccaccagcccaacaacactccttttcccttatctccaaacagcccttatcccccttctcctgctagcagcacatatcccaactccccagcaagttctggaccaggaagtccatttcagctcccaggtaagactttattttattgataccaaaaaaaaaaaaattcctaagaatcacagttgttcttactgtgggccctctgggtgaactgttacatgccaaggtataatagctgtttctgactctttattctttaggtaattgtttgatttccagaagagtttagattttattttgccaattaccgtatgtttaaaaaatggaagtagccctatttgacttaaatattttcttctattttatgacactcagtaccatttattgtcttttatataactgatactgtgatgaaagctatggcattcaatttaatcttc

SEQ ID NO: 117612 - DNA, 3159 bp, Homo sapiens
gtatctcagatcagaaatatttgttttaattatgagatactgtactgtgttacctttctaagattaaaaaaaattatgaactataactggctctaagggtttcttttaagggaattatatattattttagaattcatgaatctttaaataatgtagctgttgtcttttaatttcatggtgaatactaagactggttttgtgatagttattctctttatgtaacttctacatatctctactgttaaaagctatctttttcttatggtaaaattggtttagagtggttgacagtttaaagagggatttgtgatgatatctgttcattttcatagggttggggagcagaatatcaccggcaggatgtaaccagcaccccatgttggattgagattatcttcatgggcctcttcagtggctggataaagtccttactcagatgggctcccctctgaaccccatatcttctgtttcataatgcagaagtattcttttcaattatattgttagtggacttgttttaattttagagaaactttgagtacagatactgtgagcttacattgaaaacagatattacagcttatttttttctacataattgtgaccaatacatttgtattttgtgatgaatctacatttgtttgtattcatgttcatgtgattaactcttagaagtgttgtaaaagatgcagagtaagtattatgccccagttcagaaatttggcattgatcttaaactggaacatgcttttactttattgccctaacaattttttattaaatttatttgaaaatgcatcacatgatgaaaaattatagtagcttataagagggcatatacagtgaagagtaagttttccctcctactctcgatcttccagaagctgtacttttaccagtttctttgtcccaccaacttaaaaaaaaaaagtacaattcattgttttgcaaaagtgtatggtaggggcttaaaagaaactataaagttttatttgaatgaacactatgcactgctgtaactggtagtgttcagtaaaagcaaaatgatagttttctagatgacataaaatttacatttaatacagataagtgttcttcagtgtaatgtgacttcatgctatatatcttttgtaagacatttccttttttaaaaaaatttttgcaaataactgatctcaagtatatgtcatttactcaaaatctgtcataagcattactttatagctagtgacagtgcatgcacagccttgttcaactatgtttgctgcttttggacaatgttgcaagaactctatttttgacatgcattaatcttttattttgcacttttatgggtgacagtttttagcataacctttgataaaatacactcaagtgacttggacttagatgcttatccttacgtccttggtaccttttttgtattaacaaacactgcaatttatagattacatttgtaggaagttatgcttttttctggtttttgttttactttcaacctaggttataagactgttattctatagctccaacttaaggtgcctttttaattccctacagttttatgggtgttatcagtgctggagaatcatgtagttaatcccattgctcttacaagtgtcagcttacttgtatcagcctccctacgcaaggacctatgcactggagccgtaggaggctcttcagttgggccccaaggataaggctactgatttgatactaaatgaatcagcagtggatgtagggatagctgattttaaaacactcggctgggcacagtggctcacacctgtaatcccagcactttgggaggctgaggcaggcagatcatgatgtcaggagtttgagaccagcctggccaatatggtgaaaccctgtctctacaaaaaatacaaaaattagctgggcatggtggtgcgtgcctgaagtcccagctactcgggaagctgaggcagaagaatcacttgaacctgggaggcggaggttgtggtgagccgagatcgcaccactgcactccagcctgggcgacagagcgagactctgcctcaaaaaacaaaacaaaacaaaacactcacccatcaacgaatatagactcttctctcatttatcgatgatcctctttttccattttttaagtacttatgtggaagctagtctcccaaaacacaatctttagagagaaaagacatgaacgaactccaaaatatccatttaatcaatcatgtttttggctttggataaagaactttgaaccagtttttttctcaggagctgtcaaatggacacttaattatgacatgagaatgaagaaattattttggaaaaaaaaaatgacctaatttacctatcagtgaaagctttattttctggtgccttttgaaagtatatggagtcatatcattcttctgtttaaaatgttagtttggtttgactttccactttgtcctttctgctcttgtgaagaaaaaaaaaagcattttcgaggaaagaattatgcaatttcttttgttttctgtgtcattatttattgctttttcaatgtgcagccagtggatggttttagttctttcagatgaactgccatttgtgtttcagctcacagttctttgctgggtaaaagaaatactttctgacagtcacctgagccttaaatgtaagtattacatgacatgcattctgtttcttccagagttctgtctgccacacgaaagagaatatttgcttacttgatagaactttggcattttcatcattcttttacttaaccaggcttatggcatgatctctggaacaaatttgtaggaaaaaattactccaattgaatgactgatgtatgtaatcaacttcattgggctgcagtaaactagtggaaattagagagttgttttattggtgttttctactgtgagttaattaaaaattgtttttatttggggtcattatgtcacagtcttgagttaacaagatcttacgtgattggccttttctttgttttctcttaggagttgtgtctcatgaatgacagtactaaagctattaacaactaagagtttgacagagaactataagcctgttgtatctcctaaaagttgtcaactccccacccttggactttaaatgaaaattttattcagtccagctattcttacagtccctaag

SEQ ID NO: 117613 - DNA, 2190 bp, Homo sapiens
ataaaattgcaaccagtttggtaatgcaaacagcagaatagaatgaaatctcagtaatgaattaaagcaacaaaaagatattgattggcaaaaagcaagatataagagattcatttgcttaacatttctacataatatttatggtctggtcagtattggtctggtcagtattgcctggctgacgtgaaatgtaaactagtaggcgtgttattgatctgctaaaactaaccctctttttaagaggagatttaaggaagacgtcaatcaaaatgtcaaatatgtgtgtcagaatataaataatttttcacattgtattgttgctatataaaaaaaataatagaattggttgggtttctgaggtgaaatccagagtaagagtactagacagttcaacaagccacatctaatggcacagatagaggatgtagctattttatacctttcataacatttgagagtaagatatccttcaggatgtgaagtgattattaagtactcatacctgaaatctgttgtcaagattagaactggggttcatgttaaaaaccttccatattacctgagggtacctgtggggaacagttccttcccctgtgtggtagtattttgttggaagagaatgtttatacaaaaaatgaaattcttccaacagcagagaaactctaaaaagtttgatagtacctatcaaagtgctgtacttctgtgatagagaacatctgatgtaccaatttagatctatttctttatactttttctaatcaattgcttaatagtactttggatgattatcacctttgccacttaaaatatataaatatcctttttacttcatgaggaaggaagaattttttgataattactgagttcagccttttgtgatgacttatattttggacttacattttaactttaaagaatgtcagatcccttctttgtcttactagttaaatcctcacctaatctcttgggtatgaatataaatgtgtgtcatcgttatattgttcagctagatgagcaagtatcttagggtagtaggtagcctggtggttttagaagtgtttggtgatttttatggagagagttttcctaagtggtggtttataggtggtatcagatattattagggcagctttttggggagtaatctcaggtctcccagagcagcagcatttttctcattgatataagtaagattcttaggagcttttcttatcacacaagatgcctgaatcgaatgtgagaattgaaggcatttcttctgcataaacaaagaattctacctgctggacagaaacctggaaagttctttggaattcgctgaattacagtttagtatgtcctgattacagagtgacaatatttatcaagcctttgttatattggattatcttctctcttaaaatacaactgtattataattgaaatgacagcccaaaattggatggtttaccaaaaccaatgaaagggatttcacacatcaatttttatttctgttttgaagagcacatgctatataataattgctagtagcaactgcagtaaaacaggtgataagttattttctctgaaaagatccagtcctagagcaggattcttcgatcattcatggcagagtgaaaaaggtttgtatggttcttgtccaaataactcagttcttaaaattcttaaaatgatcgtaaaccattatcctttaaaggtttatttgaagatgctgttaaagtacagaattttgtgtacaggtagatttttccgtccctcattaatagtgccttcttaattaatacagactggtgttagctataacaaaactccagtaaggccaaagaatcccaagttctttgtggaaaaaaaaaaaaaatcttttagggtcagattttcccttctaatatcattgaagatgatgttgcattgatttattcataaagtattttaactataggaactctagaagataatggttaggcaagtgattttttttttaaatatggttggcgtaagttgtattttgaaattcacttattttaaaatcgaagaggattgtaatcatggaaatagaatgtttgtatctacctgcccacattttcttaaaaagatatttcatatacagataatgaagaccaagctagtggctgcactgtaggtctgctgcttatttgtatttgttgtgcttctgtttatgttgtagaagct

SEQ ID NO: 117614 - DNA, 1073 bp, Homo sapiens
aggtgcctcacctgggtgagaagttggagaggtataccccatatcctcatccagattatcactgaagatattaggtagagaccacagataaaggatggggaaaatggaccccttaagagctgtgtctatctcagagttccccagctttttctaacattcttgaaaccttgctgggatacacaagacctggtatcccttgccctctcttcagtctcccctctcctcatctattctcctccctgcagtcattctccatctcccatcacctctcatcaccagctcagtcaggacacagtgacaagaaacaatgtgatgactacctaaggctgtctcctggatatgccaaaatatcccaaggtcctggttgggaaatggggctccaagatgctaacaccatttgctaaaatgtcaaaaacttcaaactagctatttaatatcatataaataaaaaagagacatggtttaattcagttttttactgaatttatataaaaatgttttatttgtccttacattttatctctatctctatcaccttcagtgccctatagaatgccactgcattctataactagcacatctgtctattgccaaaaataatctacagtccctatttttgtaagtaataaacattatacagaaatgttattgtaaaatatttgtgggcctattgtcagataaacatctctttatatttctgaagttattcctagtgtcatatgacaatatgcagatgaattctaacacaagcagggactcctaatgcttggatattttttaaaacctagatttttaaaaaagataaaaactaatactttattttaataaatgggttctatagcatcagaatcataataatgttatgctaataactacagtaattaaagtggatgattaacatactgaagcacattaaaagaacattatcaaaccatctgatttataaatgttgtgctgaacatatgtgactaggaaaattctacttagagaaggccctgtaattgatcttctgttgaaccaacagtctatctcctgggtaacatttcactctaggactcctgaatgaggcagaa

SEQ ID NO: 117615 - DNA, 1256 bp, Homo sapiens
gcggcatccttgcacgatactttgtgagacagtttggaattgaccgaaagtgctgaatgatctgaacaagggagtggttcctgaggttggaaaatccagaaaaagcttcagaaggagttgcaattgagtttggaggtggggaatgatttgttggtgaaagggataggtgtggaggaggtggtccacctggaccatctttctcctcggtgccctcattgacatttggcagctgatgcaggtggagctctggtgctttgtgctggctgagcaaaaatctactattcacgtgcacacatcttccctgcaggtcggggtctggaactcatttatcttggccctatgttctcttctgtactttgtcagaagtcagtacaggcttattccatgggagggagaggggcacaaggtgcgaagcaagagttcatctttctccaatttcaaaaggatcactaagtcaggcctcaggctcctgtggtcccttggctcacaaacagctcctcagagctgcactgtgaagttcataggggctcaacaggacactgcatttcattttgcagcagcctggaaagtgagcaacacacaggcatgagccaccactcagactctgcccatgcaagcaccctgaagtggatattttaatcaattaatatgcgaattctctttttgctccaggtttcttcacaatcaccccagaactttcaacaggcaatttgctcttaatcagaagtcactaccacatctcatgtgattctccaaataaatccacctcacctcttctaggtgccagatactgggctaggtgttgggaggagggtcatacaaaaacagcaaggcaggtgcacacacaggtgggcataatcagttcaactacaataagggaacagtgatgaggcacagcacgcttaattgccaagtgaattatgctgacaatcaatactctagggttcaaaagaggaaggcaagtgttgtcagagaaggatttacagagcatgcaagaactgaggagagatttggatcatgggaaagctttaaactactccaaaaggaagttagaggatgcactagacaggctgagcaaatactcagaggggcaatgtgcactccatgtttagcaggcaatgggcaaactggtttgacaagaaggggttactttttggtgggggaagattagagatcaaacatcgttaacaataacaacagtaatgatgatggacatttattgaacaccatccttgtcaaaccctgtacttagtgca

SEQ ID NO: 117616 - DNA, 1080 bp, Homo sapiens
aaccagtctttcaggttaaattttaaagtgccttggccaaggagggtgtccattcagatggttgtagggacactttgaattttatttttggtttacaaggatctggcctgagaccctgcctgaaaggaaccagatgtaggttagtcagtcccatgtctggggccaactcagacaatctgcagcaccagaggttcttacaagacacagcctcaggtatctgagggactttatggggaggtaggtactaagtgaggtctgagacaaactttccaagatacagttctccaaaacttgggttgagaggccaggatggcaaaagagccaagggcatgggctttgatgccagacacacctggatttacctcctgactatgacatttatcaaccatgtgatctggtgagttactttcctgagtctcagtttccctggctataggccagaaatgattttaaactgcctgccttttgaaactttggtgagaatagtgcttggcataaagtaagtgcaaattaaacagtacctaacatgatacagtcatctaacaaacacttatgtgattcttactatgtatcaggcacttttctaagcactttgcagatattacctcatttaatcttctaagcaaacttatgaggtaggtaattggattgtctttgttttctgtaggtagaaactgaggcacagagaggtgaaataatttgttcaagaaccccacagctagcaagtggattcaaacccaggcattctggctccatattagtctatgcagcctcatgatcataatgatgttctataaatgacaatggcaagggccgtgaggaggtataaatataatgcaaaaggccccacatccctagccaaaatgttgctagcatttactgtggcaagtcttgtgttcctttagggacagaattaatccacatttctgtgatcaaatacatgatcccctgcagacctagctacccctgcccctgatttctttttaagaaactatttttcttgaatggtggttcagaaaacagaacaccatgggcttggtttgtgcatttcaccttgttttcaaacttatttgcttgtgg

SEQ ID NO: 117617 - DNA, 1047 bp, Homo sapiens
tcaggattcagttctttcagagaatatagtgatttttttttctattctcattctatgctcttgtcagttggaattcagtgaaatcataactaatcactgaaactattttataaaaatttcttttcatctgaaactaagtgactgagcctattatacgctttattcttgattgactttattcttttctgttagaaattatatttaggtatgcatttctacaaattgattacaccgaatattgctcattttactacttaacttttagtttggatttaatttttaaattcaataatgttattttgctctatttgtactataggtttgtattatagtttgtctaatgacagtagtaatataatattttattcatgaatgcatgttaataaaaatgtatattatatacataagtatataatagtatgtgtgttgttcacacatggccccagttggtcatgtggataactgaggctttggaaacacggctctagttgagatatacttcattcaaggccaagatacatttttcttcctttaggaagccttccctgacaagtcaaaccagcatccagttctccttctttttaggactcttaattgtgtttatcttttttgtttatcagtcttaaaaagctcttggttttactcttttcgttaattgacagacacttcacttacagtgttgacctgtgtgccagtagcagggtggtggaagtggtctgctgtaggtgcaggcaataagaggtgcgttgactttagtgaatataaaaacatcagcaaaaccctctgggcatggtaataatgcgtatacctccaacactttgggaggccgaggcaagcagatcacctgaggtcaggggttcgagatcagcctggccgacatggtgaaaccccatctctactaaaaatacaaaaattagctggcatggtggcagaccagtagcctgtaatcccagctactcaggagactgaggcaggagaatcacttgaactcgggaggcagaggttgcagtgagcagagatcacgccactgcactccaggctgggcaa

SEQ ID NO: 117618 - DNA, 1033 bp, Homo sapiens
tagagagtcacagctccagtgctggaaagagtcacccgaattgcaaaaggaggcctcgctgcccatctcataacaaggatgcttcctagggccttctcaagtaaaataagagtggaaactggctttggatcaccttatgtggactgcagaagctcagctcagactagaaaatagtgctcctttggccacactgcttatttgttaatttttaaatttgtagattgcacaaagatctaaaactgttgtaattcactgtgctccattcacaatcattgtcttccttgcctacactcaaaactgtcaccattatctttgaagtacttcttcctctaactttgcccatccatcaacccagtttccaaaaggccattttatagaccaactcatcacaatcaactgagtagctttgtagatctactgatcccaggccctcatctggtaatcaaagagattcttattcaataactctgtggtggagctaaagaatattttaagaatattgccccacaatatcaaatgcattggcaaggtctcccgggagggaatcttggtgcctgggacaatggcgtagtggtgcaggggatccttttcactgcatacctttttcagtattttagatttgtatccagcgaatgttttacttatttctacaaaacagaattcacaatgaatgcataaataaacaaatgcataaaaacatgttcccttggtgattctgctgcacagccaggtttgagaatcactgcattaactcatcacaagggaaaaaaataaattcaaattgattagcccatttaccaatcttccagtgtagacatctgccttgtatccccagtgattaatacacggcctgcctggagggtaagcaataaatatttgttgaatttaaatcagtcttcatctgtcctttacaacagactgaggtgaacatcatctcttgaggttgagttctgtatgtatttttatatgccccctgcaaagctaggggccacagcaccatatcttgtgtgataaattccagtttctaagtgtc

SEQ ID NO: 117619 - DNA, 1049 bp, Homo sapiens
caaattatctagacatttcaaattaaaatcacaagtgtgttaccaaataaacagttaaaatcaaaataacaactctaatgggtcagatggacttaactgtttcatataccttaaatagatggttacttatcagtatgccccaagacttgacttgatactctcagcctttagggcaggcaagtggggcttgaggtggccagaatccatggggctcttggcatcctgccaagaacagcttcatatagggctccaaatccctctggagagtaaccctagtattcctttgtaatattatttattctatgacatggtaaatgttggcaagcactaccataaatgacaaacacacaaattgttatgattgcaaaaccttccaaagcaaaatttgttcataccttgggtgtggcttatgtattttaccagctgagggcttatttccaattttcccagggtacaaagacacttccccatataaggagagcagatttgccatttctggccaactgaggtcaccagtgtaagacctagggtactgatggatttggctacacgtccagaataattctacctgagccttagatttaaaagctgaggcttgttttatattcaggctgtggcttctttctcagctcttaaaaagactgtaatctgtctcacagttgtactgcctgattgttagttggctctattcaccctacctagatggtaactaaccctttcctgacactttgaaaattctttcattcccttggttttagttacctctctcgcacgcacaccatcattattctactgttctttatttatatatagcgttaggacagctttaatattacatttaagcccttgatgacgcgattattatctatcttcttcactagactgtgaattgcattagggccaagactgtgtctgcctttttctcaccatcttatccctaccatgcagtacaggatagctacatgataaatttaccagtgagcaaatgaagaatgaattattgcccagggaaggtgtggaatccactacaatagaaatcatatagataa

SEQ ID NO: 117620 - DNA, 1038 bp, Homo sapiens
gagagttctcccctaaagtatttctttattaatatattctgcttgtaaggcagcacagagccaggggacagatgaaagagaatacctccctaagggtaactgtttctcttctgtggctgagagggccaggaaagcttgggctcatttggatgttttcatgatggagaaagtaatgttgtcccactggtctcagcctctttttgagccttccttggtgagacccaagatagacgtttgaatttgccttctgtggaattcagctttctcagctgtagttggcttttcttggaaattgttgcatttctctctctctctctctctctctgtgtgtgtgtgtgtgtgtgtgtgtatgcttatgttttaaaatctaggagtgatttgtaatggagtggaatgaatggggtatgagcgtttatctatctggctctttataagctatgttgtcttttccagggcaaataaatgatgaagatttcaaatctaaatgtgatcatggtgacttcaggaatattgtgtttaaaggctctttaggaggtttaagtcaggatgtggaaggacgttgtaaaccatgaaacactgtgattacaaataatctccagttattattcttgatttctaaaaagctaatctcattgcagttaggcctgattcatttagttataaatgcagtaagaaaagttaactaatatacataagcctctttgtagtctggtcagaaaatctaaagccatgtggtgttaagcaactacgtagcccagaaaattaacttctgtctggagatttcttaaaaatcttaggaaatttcagaagcctctcttattctaggtatattgtttattgcttttattctgaggctagacattgccatgttgccagccgggtgtggtggctcacacctgtaatcccagcactttgggagaccaaggtgagtggatagctggaggtcaggagttcaaggccagcctggccaacatgacgaaaacccatctctaccaaaaatacaaaaatcagtcaggtgtggtggctggtgcctgtaat

SEQ ID NO: 117621 - DNA, 1007 bp, Homo sapiens
acaggcaacacaacaagaaaatagtttattgtgtgggtgaggttggttgggattcactttgaggaataggaggtgtgaaagatgaggaggggtgaggactttacgttttcagtggcttagtgatataattcattggtttgcagtgcgtggccctcagacagctgtgtggtctttacctgagaacttgttagaaatgcaaattctccatcctcacctcagaccctgctgcattagagactttgggtgtgggggccagcaatctatgttgaaacaagccctctggttgattctgatgcaagctcaagtttaagaaaatgctggtaaggtggaaagaagctgagactccgctttctggtgttgctatgccatcagctggtgtgtagggtatgtcccagacttctctgggtctgtagaataggagtgttgctacctaacttgctgaattggtggaagaatcagtgagctaatacaggcaagtgtgatttgtacagttttagcccaagtaatccagcttggaacatttgtttgctctgatcttcgtggactagtaaatatccctggtactccctcttatgatgtgcctttgaggctactttcatttacttcctttctccgtagcataatacagcctgttcctgaatactgaagccatccgtgtgtcctcttgaggctctcttggaaagattcagcttcccaagcctctgcacacaggggcaagcagctcgtgttggcaggcagtggggaggatgtagctgagggagcattcagggaggctgtgcagtggggcttcccccacttctatgaacggactcagacatgccattgactgttaaaaaaaatcctgatttcaatgttaaaatgtgagaagtaatattaaaaaactagtacgtgctgagcatttcatacatcattactttcaagcttcataactgctctgtggagttgaggctatctattattgtacctatcttacaggaaaggaaatggaggctcaattaagtcagttt

SEQ ID NO: 117622 - DNA, 1050 bp, Homo sapiens
cagacactctcatttgtttatacacaattttcctgagcttgttaagcatctttatggtggctattttgaattgtttatgagataattcatataactctttttctttaggaccaatttctggatatttattttgtaactttgactgggctgtgtttccccattactttgtgagccttataattttgtgttgggatttgcacatttgaaaacacaaccactttccccagtccttatggtttttcttatagggaaagaccttcagcaatcagcccagctagagattccaagcgtctcttaaccttttggggagagaaatcttttctaggcttgtgtgtgtaatttcccatttagagagatttgctggtctctttttcaggcgcttgtagcctcttgctccctctggtgtctgtatgaggtatttcaggttttctggcgctttttctggcattgagctcttttctgttctctggctcccaggtatccaaagttttctaagtctgtcagcactctaagtcaggcaaaacagaaaccactccttctagcagcccttgaaaagccagaacacaatatatacattccacccttcctttccctcccagtggagaagccatgagttgggtgctttctgaaaattgtggcaagctgtgctggtgtctctgtgtgatactacaagttctctggtgctgccacaagcttctgagctctcttttgttctctgtggataccaggcatccaaggtatgtcagtttcccatcagcactctgaatcaggcaggacagaaaccagtcccttgggcagtttcctgaaaagctggaacattggaagtgtttcaatttcttcaatttccctcccaagggagaatccacaagttggactcttctttttgatcatgagctgtgctggcttgggagaaggattgatgcagttggaataaaatagctttttgttacccatttcaatgtagctgttcttgattttgagttgcctggggtactgtgacttcctaactgaattctggagttctcataaaggctttttggatcatgtgtt

SEQ ID NO: 117623 - DNA, 1044 bp, Homo sapiens
agtgcagcagtgccatcttggctcactgcaaccttcacctcctaggttctaagtgatcctcttgcctcagcctcccaagtagctaacaggcccgtgccaccacacccggctaattttttgtatttttagtggagatggggtttcaccatgttggccaggctggtcttgaactcctgacctcaggtgatctgcctcccaaagtgctgggattacaggcatgagccaccatgtccggcctaagaggctgttttagttgatactggaaggacaaagaagcatgaaccaggtggagactggtggttgtgtgagatctcacattccaggcagtgtgcttaaactctgacgcgtgagaaattacaccctgttagaggaattacaatctttgagctcagagcactgggggcaacatgggcggcagagaggggcttcaggtcccaaaacaagaagtttgaactttccccaggtggtcacaaggagccactgaggcatttaaacattatttgatttgaaaacatgattggattgaagaaaaatcacttcagctacgatgtgggtgatggcttggtgcaagggagggtggagggctacccaggatacagaggacaggcctggaccaaggtaatgacgctgcaggggaggtaagtggtgcctttgagacatgtttaggaggcagaactggaaggaccctggaggtaacagagaagggagaggcccattaggaggtgccgttggctggtatcctgcaggaggtctgagtaactttttctgactctcacattctggagtctgccccactaggcatacaccatgtagatttggggtatttctcagttcccttctttatcagatcatcagttttttgaagacagggctcacgtattgcacgtttttgtttgacttaaagtgtctaacactgggcctggcacacagtgctatcaggagttgtctttctgagctgcaaactcctttttgggagaacgttggtagaaggaggcaagcctcggaggagaattgtctggaaaaccatgtttccctgtttgtttc

SEQ ID NO: 117624 - DNA, 1059 bp, Homo sapiens
tagcagaggacagacaggtaaagtccacaatttgacccagtgttggcaaggaaaaggagacagttgtgaggagcgagaggacaatgaataaacctgacatccagggctgcctctatgagaggagaggagcttatggtgaagagaaggacagacttgatctctgtccttaagatttttaaggagtttatgatccagttaggaaggtaaagctggaaagctctgtttgatagaaataaaaactacgatcacatgtacagcccagatgttgatctctaggagatgacagcaagcggtccatcaccactggcatccacacatacccagtcctcaaacatcgaggaggagtgtgcgtggctccactcacttcttggaccagcccttgctaggtgggatgccattgctgttctagagggtcatccatggagctccctgcatcccacttctggatgagttctttggtaaggctctgactctttggcctgacatcatggtgggatcatggagcagggtgttgagcttttggaccaagaatctggaagtctcagttctgatcctgcctcaattgctcacttactgagtgaccttgggcaacttgctcaacatctctgggccctgtttcaagtaataccacaaggtacacaggtgttgatggttgcaaaagtttttttaagcattcaaagtataaacgcgtaaggctctttggagagcgagttcttagtgttatattttttaagggggatagatggcccctgagacaccctctcttgggtggcagtgaattggttcagccacatgtcaaggccagataagtcactcaatgcacatgagattaataagtatactactttggacaactacttaatgtatctgggttttttctcctggctataaaatgaggaggctgagttttacctcatagggttattaggaaaattaagtgagacagtgcataaatggcttctgaaacagagtagataaccagagaatgttcattgccttcccctaatcacaacctagatgtgtgctcataggtagctgcaggtgcagcaggtgcactag

SEQ ID NO: 117625 - DNA, 1037 bp, Homo sapiens
ttctaatccatactggcactgcttccactttatatcattctgatccaacccattcgtgtctattttctctttgatcttcctctgaaaaatttataaggacctctgcaggtatctgtgtatgtgtgggtttctgctcaaaaccagccatatgtgaaactccttcttcttgatagtgaagcctcatcttagctagtgatttatctatctgatgagttgctttcaaatttcaatttattctctactgaatatcaagctaaactgagagccccagaccattaagtaggataactattggaaaacatgagttggccaaacaacttgcagacttacttcagatttactgaatagtttcttgaaacaaaggttaatatacccactagcagaggtatagtagttggtagtgtgtattaacaatgaatttcttctgtaggtgtcaagctatcttgtattgaagtagtctgtttggtatcatgattatagtttcatagataaaatttatataaatttcccattggttctaggtgactagttattgtttcagtctaccacggtatccattacagacttctgtcatagtccctatagacaatcattttactggttatgggttctttccttcatcattcattattacctccttgaggacaaagactttctcctttcatatacattcccagtggtgataattgtgacagaacataatatcgtttagtaagtgttcattgactgaataaatacatcaaaaattctaattaagctgatgggtcaaaaacacccttgggtcgttggatataaatatacaatctgggatcaggaattaccaagattctttagcatttaatatagttagagaattagaagttataaagggcacatttcttctcagtttgccaagaggagagaagaaatcattgtatttataagtattaaaagtatgtacaaacagctccatgaattatgacacatgagttattggttatgttagttttgtaataatacagaatcctgtttctcctcctgtccaaaggaaagctgtg

SEQ ID NO: 117626 - DNA, 1043 bp, Homo sapiens
ttttatgtcccaatacactatttttttttgtttttgtttttggagcggttttagacattaaactaatatttttagcagcatatatttaaaaaatgataatttaatccagcatgccattaaaacatctaaaaatgttcaaaaaaatcccaaacttcttcattcatcacccattttatgtgctgtatggagtcacctgacactaacagtggctcagacataatttaatgtcattaacctctttaaagtgttgtggaactcagaccagacactcttttagggcaagtccctggaataatcacaaagcctgagcctgggaacagagggtaagaatttgctttctacagaaacctactattcagtggacaatcgataaagcctcagctaatcttgcagttgctcagccagcctaatcattttcattgagccaagccttgcttgaggttgacaaagcctcagcttctttgctgtttctttgttttgttgaagctactgataactttgaaaggctgtgtcccacaattattgttatgatgcatgtcaatttttggaactcattgtgaaagaaaacttcttgccttcctcctgacttgtctctttgttggacttgggggagagattcagatgtgatttttgaaacttggaaactgaaaactaagggctgctcttagagagttgattgtagcccttgggtgttgttacagggtcaactttgaaatgaatatgacagtggggtgcgtgttccatatcccttgactactgggtgtgctgtgacattgccagaggtgacctggcaacctctacttatcattttgaaaagtgtcctattgctctagatgtataaatacttcctatccccttctttttagaagtaaagcctttagaacaactccatggcttattccctggagttacagatccaggacaaatagaacaatgctcagatgattgctcctaaatgtatttgtggtctgttagttttgtcattcttcttttataaacactagcaattgggaagttttggccagatggaggcctggactttt

SEQ ID NO: 117627 - DNA, 1052 bp, Homo sapiens
aagagctgcttagtcaggtttttaaaaaattttgactttggtgagtgcagaactgaggacgatgtgtttctttcttttagatgggtcaattgagaggaccctggggcagaaaacaaagccaggctcgatgatgatagaagaaaaacatttttatatttgataatacagcagtagttctggtagcagagtataggtttgagcctgagaatctttctaacttaaaataattgcagattttcaaatactagtagtattcttggtgtctgtccatcaagaaagcacatgtgaccaaaaaatctactgagtaagtaatcctgttaaatagatttgcatttggtgatatttatttagtctacagctagtgtgactcctccccctgttcccacagaagagaccatcccattgcattttaagactaaattttaaacccaaaatgtttgaatttctgctttgggatagctcaaatgccaaatttttcctcctgtgtccaacctcactctcagccctcagcccccagccccaggcagaaatgatgctcttgggtagcagcttaatggtattttaatttaaaagtaaatgacggcacctcagggctcttgtgcatggctcagagatcacagggtagtctgcagaaaaattccagccaccctggcccacaatgtacaaagaacactccattcacacactctacctgccaaggttgtggaaggggtagagacaatggctaagacaggttttgggttctcattgaataataattttccatatttacttcatctgctatgtcaagcctttagccagaaagatggtctgcctgcctatagctgggggccttctagctttccatctatctggtgctggtgtcttgttctagagaaaatttaacctaattcatcagcaagattatgttgagccccagtggtgccaggccatagctttgtgctgggtatttgcgggtacttatttagaaagacgttaagtgtttgcttctaaggagctcatggcttaagagcaagtagaatatgtgaagaaatgtgaaggatgctttgctt

SEQ ID NO: 117628 - DNA, 1812 bp, Homo sapiens
tggggttctctaccattgctgcctcttgagacagacctgtgacctcactctactgtaagtgcaggggtgcaggcacccactagggtcacacacaagggaaagcattggtctctgtggtcacaggtctccctggacccaggccttgagttagaaggtatttcatgccaacaaactacaaggagaccttccagatcagaactaggaatcagaccagctaacactttggagctgagtaatcctgagcctattttcttctctctatcatgggagtagcgcatcctatcctgtttccaggatgatctggggaacagggggaatggggaggagagcattctatggaagtagacaccacaggcgctgtgctgtggagcctccctgccagcctcatcatctgcagtgagggagcttcacagttgggtccaggcaggagacacaggaatcctcaggtcactgctgctgcagaccacatgcacttttggggaggaaggatttccaggacttctggttttgttttctctttatctagatgtatagtgcaggcaggtatgtcctgtccagcctcccctactcttcccagtttctggctagctttgctttgccttcacttgtctgtagattccagtttagctgctgaattctgtttcttttccttctctaaaaagctttctttttctgttgttattgttgttgttgttattattgctattttaataaaaactcatccctgactattacagaaaaagcacatgggtggaaagaattataccacaatcctacccagagagaactgctggcagcaccttgatgtatatccttccaaatctttttcattgtatatgtatgctttccagcttaaaaaacattttagccaggtacagtagcaggtgcctatagtcccagctacttgggaggttgaggttgatagctcaagcattcatgtgtagcttgagccacggaatttgaatccagcctgggtaacataacaagacaccccatctcttaaaaaaacattcttagcagtatattctgaatttctttccatgttagcagatacatttctagaccattgtttgaaacatttaggtaatatattcaataaaagcaatttatactcatgaccaaaaaatgcaagcagtacatagaggtataaaatgcaaagccagtcttctcccagcctgtctctctgaagtggggagatccttggtatccttacagaatttatatattatgctttttaacttacacaacagaaagcactctgtactcgttgtacttttgtttgacaatacaaatcttgcaattatttccacacccttgtgtatggctatatcttattcttttagtctgctgcatctcatggatggagtataatttatttaaccagtcttctgttgatggacattaatgtttccagtttttttatttaaaatgcttccatgagaattcttgtacataatattttggagtacacttgctagtatacctgtagggtacaatcttagtagcatagttgttggatcaaagagaatgtacattaaaaagttgtttgatagattttgccaacttgctgtctaaacaaatgtgactttattttaaagccagtcttgccttctgataggtcctcggcttttccagcgagagcacaactttgtgggggctgaagcatcatctctatgtccagctgcctatttggtttcctgtttggaagggccctgtctcttcctgctgtggcagtccctcctgcttcctctggattcagtttccccctcagggaagttccccagatctttgctatgatatatgttattctgg

SEQ ID NO: 117629 - DNA, 1050 bp, Homo sapiens
ttagaaagccagtacactttaaatgttgagttttgtaatgtcaggttgaatgctggcaagacccagggaagagcaagtgttgagcaacctagccttttttctgttcccagcggcaagtcacttagtcctcccccaaccttagaagtcagggatagaaaattctgtaaaaagttttgggcatcactgctgcctgaagcagatgtgcacgcatttcaaccatgataattgaaaccaaatttttccattttggaaatactttttgacaaagtaaggttttcaactgcaaaaacaaagtcagggaaagaaacctcttgatatccctgcacccagatttggatttttaggattttgcttgctaagttttgaactggtaaaacagatctggacaagataatttttgtgtaagttttcctaaagcaagtgctttatttgatgaaatttgccatcatcaaactgacctatttttttttttcaatttctggatgaatgttcaaactaggttaaacggaatagagcactaataaaccatgtaaaaaatagcttgaacatgtgttggtagatttttttttctgttaaataagttcaatgcctctcaggtcagagatctaactttttatcatttatgaggattttcagagtcttagcacaactttcctggacttttcattttcacttatgaaagtatatcatagccactatcaaaaccacacacatacaagggctcagctctcctattcaaaccaaacataagcttggcttccaaaatgccacataatgaggagcatgttttcttttagtctttctctcttcttgtctaattctatctgtctgtgtaaaatgttttacatttttacacagcccacttaagagttttccccttgagttttaaagaaagcagtttgtgacttggggttttaggaatgtgattagtaacatacctgttcttgagcttgtttatgaaggagcatgttacaagaatgacagcatctgctggtcatctttggtgaatcatgattggcttgtgtgaaggccccagtgtggaaactccaa

SEQ ID NO: 117630 - DNA, 1061 bp, Homo sapiens
caaatagttgtacactttccatacatttctgtcttattttttaattctagtgatacacaaattacatgtgggctacttcatttggtaatttggtccagctttttggtggctgtagagtggcctctaggatacagaaaatgattctctgaaatttttcgttgtaattgttaaatactactctgcttgacttactcagttttggtgggaagatctgggtcaattggaatagtacacctttctcagggttttcagtttaataaggttgtcatattattcccaacatgggaatatagtggcttctaaagtttgcaaatgaattatgtaaaaggattttctgtgtattaggaaggcaacctgttctgttcatggtatattaacacttcattgtcatgtgtctacccttaaaattgctatttgtagtgaagaaaaaagcatagtggtatttagtcacttctgggttcctcttgtcagtttatatgcaaacattttggcatgtgggacttggggaggagggacaattggttgtatgttttgaccacttccacctatgaaaattatctgaacattattcagatttaagagttcatgggagcaggtggtacagaacctagtgttgaatataatttttgtgccatgcttgaatgtattttgacggattagcaaaataaaagtgaacctcctatttttcatcttaatgtgaagatctttggcatttacattcttttaaaagtataaattcagtagtcattagttgaaagtggtttgaaaggctgttagagatgatacaggttgagtattccttatctgaaattcttgggcccagaagtgttttgagttttagatttttttcaatttttgaatatttccattatgtttaccagctgagcagctctcatacaaaaatgtaaaatccaaactgcttcaatgagcatttcctttgaatgtcatgtctgcactcaaaaaatttcggattttggagcattttagattttttgattggaatatctgtagtgtttttcaggtcatttaaaaagctctcattggtactgatttactgtatc

SEQ ID NO: 117631 - DNA, 3401 bp, Homo sapiens
tgaaagtgggctggcagaagcggaagcgggagcggcacaggccgcgggcttgaatagaccgcggagggcggggagtccgtgatctagagcggcgctgcggcgcggtaggcgggattaaggggagcgaggcggggattggctggtagccctaggctgccgtacgtcggcggtgacgcacgcctcggggagggtgcgcgcgcgttcagcggcctctttgtgtggtgcccagataggggagcggaggtggcggcggcggcggtagcggtggccttggttgtcttccagtctcctcggctcgccctttagccggcaccgctccccttccctcccccttcctctcttccttccttccctccccttccctttttcccttccccgtcggtgagcggcgggggtggctccagcaacggctgggcccaagctgtgtagaggccttaaccaacgataacggcggcgacggcgaaacctcggagctcgcagggcgggggcaaggcccgggccttggagatggagaattctcagttgtgtaagctgttcatcggcggcctcaatgtgcagacgagtgagtcgggcctgcgcggccactttgaggcctttgggactctgacggactgcgtggtggtggtgaatccccagaccaagcgctcccgttgctttggcttcgtgacctactccaatgtggaggaggcggacgccgccatggccgcctcgccccatgccgtggacggcaacactgtggagctgaagcgggcggtgtcccgggaggattcggcgcggcccggtgcccacgccaaggttaagaagctctttgtcggaggccttaaaggagacgtggctgagggcgacctgatcgagcacttctcgcagtttggcaccgtggaaaaggccgagattattgccgacaagcagtccggcaagaagcgtggattcggcttcgtgtatttccagaatcacgacgcggcagacaaggccgcggtggtcaagttccatccgattcagggccatcgcgtggaggtgaagaaagcagtccccaaggaggatatctactccggtgggggtggaggcggctcccgatcctcccggggcggccgaggcggccgggggcgcggcggtggtcgagaccagaacggcctttccaagggcggcggcggcggttacaacagctacggtggttacggcggcggcggaggcggcggctacaatgcctacggaggcggcggcggcggttcgtcctacggtgggagcgactacggtaacggcttcggcggcttcggcagctacagccagcatcagtcctcctatgggcccatgaagagcggcggcggcggcggcggtggaggcagtagctggggcggtcgcagtaatagtggaccttacagaggcggctatggcggtgggggtggctatggaggcagctccttctaaaagaaaatttaaaatgcctgggagtggctataggggtagctctttccaacagcccaagtggggtcaactcctaagccccaccccctcacacacaccgccttccctgttttgcccttgggggagccacttctaaggctgcttacccttgggggtgttcctctatttgcctgccacctctcttgtctctccctctgaagatggactcggccccacatacacatttttgtgttacagtcattgatggactctatttttttattattacttggaccttggtcgtttttatactagcaaaatgtcttgttttaatttgtgttttttggggggagggagggagtgaacttgctgattctgtagcaaaacctgggtgggggttggggtggggggtagtttactttgttgtaaggacttgataacctggctacagcgttttctatgaaatctacttggatcccatgcctgaaatttggaagcatatgtacaaaaatcatttttacgttttatttttaataaatcattgtgtttgaccgtacatgtctaacattttttttctaggatccattccgtaccgttttttaagggatatttgtttaagactttacgtgttaattctttattcttgatgtgtacttagagaaacttaagaggtcctgtggtttttttcccctctcctgttgccctgctagttgcgtgttgaattatatcccttacaggcaaaacttttgaagtggtggatgtggctttttaaactcttaagtttctgtgcatccatctcttgtactaagcgaattgtttatcatcttgacatggttggtcatttctatgacaatttacttcaaactgtgtactgtgtagttctatatagtttgtgttaagcatgtcattcatataaactgtttaaaatttttcagatggcctagtttcatccctcttactggtttgtctgtaatgaatggttaaaaataagggttatattttaccctcaaatgcgtttttgtactttcagagcaggtttaaacgttttttttttttttttcctatatccgaactgttggcctcatggaaatccctttcccgatctttgtagcaccatctactggcagaatggcagagtagctgcgaaacaatttgtttaaaaacttgcttaagacaattgcatcagatttggaagttttgccatcaaaattctttgcagaattggaagttaacacatttgcttgtaactgagatgggcttcacaggaatgtagttgccagttcatatcacaatagccctttctatatgaggtttgaaaatgtaaactgctatgcatagcttgggcaatagccctaaattgctatgacaactaatgaaccagctacgtatactggtattttaggtgcaagttgtaaagcaaaatatctgtgtattctgcttggttaacaaatgtatatttgtagccctttcctgcaatagcattcaagttgttgtttataagagaagaacaaaagtgataataggtgaaaattgcctttctggatagaaatagagaatagcaacgtttatggatatcacaaataaagaattcaattctttacatgattgagtgagagtatgtataacctggtgggtgggttcagagtaccttttaatctagtatgcttaacttgatgttaatatttaacttaaatatttgacttacatgttgacgttgaaggctcaaagctatactaagaagctttctgaaagattgggctttaaaataaaataatattttaatattgaaccattttttaacttcttgtcactgttcaattcctaaggtctagttcttgccagttttttttttttttttcctgattggcagggcttttaaagaagtaagaagaaaggttaagattattaggctaggttatagctgctcagtagtcattttgacaaagggtagcggatggttggtacaaatagtgttatatcctctatgacaaacggggtgg

SEQ ID NO: 117632 - DNA, 2691 bp, Homo sapiens
gcggtgcctcacgcctgtaatcccagcactttgggaggccgaggtgggtggatcacctgaggtcaggagttcgagaccagcctggccaacatgatgaaaccccatctctactaaaaatacacaaagaaattagcaggttgtggtggcacatgcctgtaatccagctactccagaggctgaggcagaagaattgcttgaacctgggagacggaggttgcggtgagccaggattgcaccattgcactcaagcctgggcaacagagcgagacctcgtctcaaaaaaaaaaaagaaatttttttttgtagaaaaattgttttggtagaaatcgtgtctcactatgttgcccaggctgggctcaaactcatggccttaattgctgagattataggtgtgaaccacagcaccaagccctttcttttagttttaagttttatgttagaataaatattcccctacctgctacaactttatgcaaatgtattatctttggtttaagactgattcaagcttgaggttgaaatcacagtatttgacagactacactcagctatcctctactgaatgtgtgtaatctaaagttatatttgttatagcaagatgttatccagtgaatttttttttaatcttcaattttactctcatgagagaccagggtggtattaatgagtcctgggaataagtagagagattatttggtctagtgttaaaggatattctgtggaacacacattcaggtgttaatagttgatcctatagaacgaaggggacaagtttgttttaattagtagagtatgcgagacttaccatatttatttgtctatggagcttgtttgtggacaaatgaatttgggaagcattgcttactctgctaattagactactaaaagctgtgagaagagtattgcagtataaagaatgtgccaactcagatgaagggaaatggaggtaatagagaagtatgaggtcacaaatggacattgttgagctttttccaggatctttccactatactgcttccagattttcttaatggtttagaataaatattgtattataaaacctatgtgtgtatgcacatgcgcatgcatgcccactcatcttaatgccaataaaatgccaacaacattaaatgaaatagcaagcagttatgtatgtttactctgtgctaggtaggcagtgttgcaaatactttacatagaactcataaatagtcctctttagagccctttaaggtagaacgaagtattcccattttacagatgaggatgttgaatacaaagaggttaggtaatttacccaagccatattcataatctattcagataaaatgtaaagccatcaaaggggttggtacctacttattataagagcaaattgtacaggagactgaaaattttgcctgcaaatctgcaagcaaaggcctgggctagactgttgatcgtctgccctttctacctaattatttacattgtgggagtgaggagaatattaatggtgccagtggagtttttttgtttttgtttttttttttttgtattttgttattttttttgtttaattccagaaaatgaccaaagatcatttggtagaagagaaagcttctcttcagaaaagtcttctttactatgaaagtcaacatggaaggccggtaatatctctcttgctaaaaagatttgattttatgtcttaaaaaagaacatgaatcaattttgtggcctacattcttcagggctgttttttgagcattatttcctacaattgggggattgcctatgtatttaatataaaatttgaaattgggcgaataagtcattgtttaatgttttggacattttagatttgtgatgactagacaatttcttttttttcttgcttcaggtgaccaaggaagaaaggcacattgttaaacctctctatgatagatacaggcttgtaaaacaaatgctgacaagagctagcatcactcctgtccttgtaagtaaaataagcaataattctctggttcattttatcaagatgtactcttcccaaaaaaaattattattgtggtatattggagaaatacacagccaagacagaaataattgtcactgtaaggtgagattactgattttaaaataggaaactaataatgtctgctagtatatcccagacacttgtgtaagcatttttatgtatgcttatgtcattaaatcctgacaagtaaaatcacagcaggtagaatatgatagcatcatttcacaggtgatgaaactgaggcttaggcagtgagtgatgtgcctaatctactttgtaagtgacagaagcagaatgggaaactcattcagactccttgtctagtttctttccatttaaattcatgtcgttgaaaatgcatcagttttgtggtggccatgatgatgtccttttatttgcataatgatataagctgacttttaaaataagttaatctttttaatgagaagaagtcacttaaaataatgcttattggtatttgtgtgcatttttaaagaaaaatgaaaactttagtgtttaaatgcatattaagtgctgtccccaaattaacctttagatagtatgactgtagatagattggtcttgggttcaaatagaaaacagcatgtagcccattttacattatttcctatgaattaattcactgaaccttctggtttgctgtggctttcagg

SEQ ID NO: 117633 - DNA, 1093 bp, Homo sapiens
ggcatcccaaagtgctgtgattataggcgtgagccaccacacccagccttggctaatttaaaaaattttttgtagagatggggtctcactctgttgtccaggctagtctcaaactcctgggctcaagcagtccttctgcttcagcctctcaaagttctgggattacaggtgtgagccaccacacccagcctagaatagctgtcttgctgttttttgcttcttaaatgttttatttggctttgaaatatctaagtctgtgtgctgttaatgtatactttcttgttgtgtattttgcttattctttgacccggtcaaagctaaaaccaattattactgatctgtccttatttctgacatgtagatgcaaaacacaaaaattctgatggagaatttgtacctcagacacgtccacgtagtaacacacttccaaaaagctttggctcttctctagaccatgaagatgaagagaatgaagatgaacccaaggtcattcagaaggagaaaaaaccatctaaagaagcaacccttgaacttattcttaaaagactgaaagaaaaacgtattgagaggtgtcttccagaagatatcaaggtaatcttgagctatgatttttgcccagattagcctttagaattcctgaaacaaaataattactatagcagggtagagatgtctaggtagtctgattttcctgaatctgctccccatctttgcagattcagaaacatgatttaatcagcataacagaagtgccaaatacttcaagaattgaatcataataaaactgaaaaaactagaatgctgatgagttcatttatgttggagtcagttggcaagatgagtgtataaagagcatgaaacaggtagctcatgcctcaattccagcaatttcagaggtcgaggcaggaggattgcctgagcccaggagttcgagaccagcctgagcaacaaagtgagaccctgtctctacaaataaaatttaaaaattagctggatgtggtagtatgcacctgtagttccagttacttggaaggctgaggtgggaggatcaatggagcccgggagattaggactgcagtgagctgtgcctcca

SEQ ID NO: 117634 - DNA, 3377 bp, Homo sapiens
gtgtgaggaaaaagaaaacatcactcttgaattttgacactgtcaagccctctttgcattcattttcgctattgctaatagccaatagcatcaaaatttttaagtgtagttacttaaaaaaaagctgccgggcgtggtggctcacgcttgtaatcctagcactttgggaggccgaggcaggcggatcacttgaggtcaggagttcgtaaccagcctggccaacatggtgaaaccccatctcaactaaaaatacaaatattagccaaacatggtagcaggcgcctgtaacaccagctccttgggaggctgaggcaggagaatcgcttgaacccaggaggcagaggttgcagtgagtcaagatcgtgccactgcactccagcctgggtgacagagcaagactccatctctaaaaaaataaataaataaataaaaagctaatgtgtagatgggaattttttctttccctcctgtgcttaatgttgtatttggggtatatttgtggattgtgtgtatgatctgtatgtgttctatatgtaatcaaacattatatttgcaaagacatcaaatgtattaacatagctttcatttgagggcatacaggataactgcagtaaagtaaatgtgcttaagaaggcctagtgctattaagttttgtcttagtaacactgttgggtattattaaaatatatattatacataggaatcctgtagcagaagataaccatcacagtttaatgttagaggccaggtgctgtcaggtgaattagctcctcctttgggaatattagaattcttctaaagtcagagaactccatttggtgagtgttccatgtaacatggggaacagctcccactttttcttaatatagctatttgacagtgagggacaggtcatacacctgacatcatttggcttttaaattaaatttctaagaaagaactgttcagttcttgctgtttctggttttcccctacttgaaaactaacatttgtaaataaaacatcttttgaaaagttcagaattatattaaataacatctttagaattaaattgagttttaaagagcttgacaatgtcctttcttgctttgccactgggttcagaaatttaaatttatatggaaatagaactctgggctgggcacagtggctcatgcctgtaatccctgcacactgagaggctgagatgggaggatcacttgagcctagcagttcaagaccagcctggccaacatagtgagacctcgtctctaccaacaacaaaaaaaagaaaattagtcaggcgtagtggcaagcgcctgtagtcccagctactcgggaggctaaggtgggaggattgcttgagcctagaaggtcgaggctgcagtgagccaccatcatgacactgaattccagagcctgggcagcagagcgagaccttatctcaaaaaaaaaaaattgaactctggactaaaaagtgaagcttgaataattttaaactatagtaggctttatgaagattatatatatatatatatacacacacacatgtatgtgtgtgtgtgtgtgtgtatgtgtgtatgtatatatgaaccactacataatgatatgatttaaggaacacatagctgatattttgtgacttttttcccacgtggaatcaagagacccatggtactattctttgtgtttgttttatagagccatttcctgcttttaagtcttggcaggaggactctgagtctggagaagctcagctgtctccacaagctggaagaatgaatcatcaccccttggaagaggactgtcctccagtattatcacaccgcagtttagattttggtcaaagccagcgtttcctacatgatccagaaaagttggattcctcatctaaagcactgtcttttactaggtatatgatttttatgtacttacaagaggcaattcctattatgtacccaagtcttttgagagatttagtcttccagcctgggcttcaatagtgaaactccatctcaaaaaaaaaaaaaaaaaaagagagagattgagtcttctagacatagaattcagagctttctcactgattttatagagcacatttttgtaagttttggttttttttgaccctgctgagttcagtgaggtgtagcgtttgaagtttgctctcaaatagacattttctcgtggtgtattattcatttatttatgtattcatcgctgaaatacagagctctgtaaaggaagcagcaaatggtgctgagcagttcctaatctttttttatcaaagctttaaatggatctgaatgtcaaaaactttgttatgcagtttgaacagttacaagagctctgagctgctaggtatctttgtttctttgctgcctttgtccaaaccagttttaaatgattccaaactgttttcatcaccacttgtattagctaaatttgtggtctgtaacattacagtgtttctttatactacctgtcctttagtgttagggacttatttttacctttaagatttacttattgctaatagtgccatgtcagggcaataagagatacagtgttggtacttgaaaatttaacagtgttggccttttgttttaattcagaattcgaagatcatcctttagttcaaaagatgaaaagagagaggacagaacaccttatcagctggtcaagaaacttcagaagaaaatcagacaatttgaggaacagtttgaaagggaaagaaatagcaaggtaggtttgtagcattccccagagtgagcttaatctaatattagaactgagaggatagtttttcaaaagcattagtttagatctgtgtgagaaaggtaacaaatctgagatacccggaggaacagtgatcatgtagatctgagattatataactccttggtctcctgacttccaggccagtattcttgccatttgcaccgtggcatctttatatttccactggcaaagcagcttttagaatttttaaagcaaatactttacattgacaaatcatgttactgctatttctgctctatcaaaaactacaagtaccaagtggggaggagagggagtttgtgagggatggagtggaggaggggaaagagaattttaatagttagaacatatgaagtggaaagagtcctgtacttggagtcagaagacccatattcaaatctggcttctgccagttacgagaccttaccttgggagaacttgacttaatatcctgccctatctaattaaaataagatgaaatgagaattgagcagtctttgctgtgggaattgtaaaatactatttggacataaattaatgtaactattgcttatcacaagtgtcagtgattctgctccataatttttcagccctcctacagtgatattgctgccaatcca

SEQ ID NO: 117635 - DNA, 1031 bp, Homo sapiens
gtacatagtttctgttttgttttttcctcaaaggataagaaaaatagcagaatgcagtagtagttagcaagcaggtagcacatgactgtcaccagtatgaatttgtagcagctgtttgcaaagttttgacttttaatggaagtggataccatcttcagattctctcctgctaactctggaatgaaatgcagtaggattttttcaaagagcaaactaagggagatattttcctttaaaatcatttacactgaaaagcttcaaacagtacctgcttaagaatttccatttcttcagttttatgtttgagttttaataaaatagcacgactttgagttttccccccccttttttgcattgcttgctgaaatggaaatgttatgtttgtgtttgttaaaatctagttagtagtgatttcttttaataacgtttttgaacagaatgcctaactggttttagggaaatgtttttggtatctttggctttgtgttatgtgtatggtttgttctgactgtgctgtgtgttcactttagtattttttgccattttttccattttattagcgtcatgccctatcacttttcccctcattgatttcaaaacaatgcatctgcagagagatggggagggtaagtatggttcaccatagtttagtttttttgccttttatggttcactttgtttgtctttttattaagcccttctcctgctgtccccatatcttaggaaaactgttctgggttcaaagtgaacccagaaaaaattgctattacttttgtcttttcttaaaataggatatttctcataaaatgtttactaccagttacttatttgctggggcacaggtacaagggttgctttgaaaatcactttattgttgggtttattgtgggattgcacgctttgtacccaatttttaattctcagattgatctgggcttcaaaaacaaactaaattatgttcttattattttgaaaggaaaggtaatgctttaaattgctaatgcataaagttaaactaaattactaaagca

SEQ ID NO: 117636 - DNA, 2019 bp, Homo sapiens
gggaagaatatttgttatttgacagtgataaattgtcacacttgattctggtaagaactatttttttgtcttagtctttaaaaacttgcctaggtttaaactgttatgtctggtctttaatgtgggttagctaggtttaaagatttaaatataaatactcttaccaaatattttacagttaaacagcaacttaatttgccacttttggttacaagagacttggttgtgaaaacactttcctgaatttgggatccaaacttgtcttccaataagacatattctaaaactgcatgtttatatttgaaaatagtttgcacagtgggagtgggacagttggctgtataggcacagtaaactaatgaagactacacttggatatgtgctggatgtgtttaagctgggtgtgaaaagcttccgtagttgtgaaatatattctttattttaaaatacaggattctagtagcaagatatgtgatttgaatgccaacactgaatcagaagtaccaggaggtcagagtgttggtgttcaaggggaagcagcgtgtgtcagtattccacatttagatctgaagaatgtttctgatggtgataaatgggaaggtaattttacccacacgcattattttcctgataatgttacttgtaaccgaaattaccctaagcaatgataagactacagcccttttctggataaccttattcatcttgatcttctgttctccctttcatgtaagatgaacaagtgggtgtttttagtgaaacacactgagattttggggcagcatctcatatgaactagaagttcttgtctgatccatcaacagctttgaaaatggatgttagaactgatttttttaaaaagtcacccagcatacgtttttgttaatatttaaatcaggtgctatctcctagtctttggaagcccagtatgttaaggcttagggatctcaccagtttaagcagagcgtgtataattaccttgtccttagtatcatcagtagtacttttttgaaaaatgaccttcaagggtacttctaaacaaatattgtaccatattcctgtatttctgtcttaggttatgaaggtatggtgcaggggactctaaaaatttgcacaaaggagagaagttaaaatttaacaagcaaacaacatgggtatatgcatttctcaaaactcagcaaatacatagatttttgtgtttctttgtatataaagttctctttttacttcaagaggataaaaaactgtaaacaaatgctgaacttcagtggatgatttgcatgctggagtgtttatggggaaatttactgatacctgcagtttactctgaaatccatgaaaaaaataagatggttaatgggatggataaatgttataaagcaagtatagtagaatgttaatggtagattgtgattggtatatggatattcagtgtaaagttctttcaattttgctatgtatttgtaaactttcaaataaaatgttgagtgggggtgggaatcaagcaataaatttggatctaggagtttttctggatcatacactttggtaaagagacaatgagataactcaagaatcttaaggatagttacatattcattcacttggatgaagatccctgggttgtctcacctttggcaagtatctgttgacatacactggcaataacaggaattctaatgccagtgccacggactccttttggcactgtttaagtgtactcacctgatcgcaaatggagtgtgtgtgggtcttgtttttttttttaaggtctaggcatttttttttaagagccccaaccaagtcattgtctgtgccaatttttattgccatctcctccccaccctcctttttatataggtctagatgtttggcatgcccagtggcatattatctgttttaacttagactaaattagaaagttgtctttaatttgctttgttctgggttattcaggacatctggaatttatgaagatgcttcccagtgttgggggatatgttagcatactggtggcag

SEQ ID NO: 117637 - DNA, 2181 bp, Homo sapiens
attggcaacttctcttatctgagtattgggagctccattaatacatggtagtgttctttttgtcagtctgtaggtatattgttagagccatgcagtgaccgtggtgatagtgaagatggctgtcttgagaggtaagcattttttcttgttgctaattaatcattttgagaattggagctcttcacagatttttgaggtgatttttttagatgaatgtccattataaatatatagtttagataatcttaaacagccttcttgttataatggtaggcataaaggatattaaatacccataaatgtttggatttgtacaggttcagacagtagttataacttggaaaacattcagagggaaaaacagcctttttggagacatttaaatctttcagttgattgtggaacaattgggaatttactgatattctgagtatacctgtcagtgagttaattcatgatcttgtaactgtgtataactaactgagagatactgtatttgattcaacaaatatgtataggatgtttttcttcctctttgaatttatccttggtgtgtctcagtacactcttaggcagctggtgcttttttaacctctttggctggctgtaatggtagagaaatactggaggcaatgagtatttcgactaatgtagagtctcaatagatagcctctttgaatagaagctttctagaatgttttaaatcacagagtaagatttgggttcttgttaccctttgcatcagtcttcaagatgctgccaaaaagtataactttcttaggaaggtgatttgagattctgaaaacacttcagtaatgaagttgcaggctagattgtaaatattgagagatcccagacagtatactaatttgctgacagcctgttggccaggacatatttgtattctattgtttcttttaattataagtaggaagcctgttctttaagggtaagcaaattctttggagccacgtctctggagcctccccatactctgaaggtccacagatttccttatagcagttccttgtccttcctttcaggaggcaggaatcatcctcttccagcccaggaagtattggagctatgggctgaagatataaaattaacaacattaacaggcacccccagaatagtgacatctggatttggtagaacaataaggacccatttagtgaggactcttctgttgttgttgttgttgttgttgttgttgttgtttttggaaaaagctctctcctcttcaacttcaactgtgtataagttagcaaactggtttttagatccagagtaccttggttaggtggattacattttgtatgtttaacattcatgcttctcaaatgtaggtgattaggtcttttaggctgctaaggtagtaattactcatcctaccatttgctcctactctaagcaaaggaatgcctttaagcttaacagagcatttagttcatttcttattctcagcaagaataaggtaattatctgtatgagaagatgacttgcaatatttagatcaaggcatgtctcctgagtgcatactctgttatggccggttagaagtgacatctcgatgtgtcattgtaaattgccactgtgtctttggggaaaagaactttcccccagtaggcatattgataatctactgtataatagcaggtgctctcttgactggtaaaataggtacagatcacttacgacagcttgctataacacttgttctaaataagggttagtttttctggggaagtaaaaggtggactgaaattttttaaaatttccttttagtatgttactgttatattttgaggagggaaaggtttggaagtagtaaccttctctgattggaagtagtatccttgtgatagaatacagtcaagtttaaagtaaaagacatagtgatacctttttaaaaagttttctttgaaagtctcaagaatggagagaatagagctgtttatttggttaaaacatttattttataaaatctttattatacattcattcttttgggtttctacttactgtggattttagttttcattttataaaggtttttcttttttgctgtggtttgtggggtggagtagggattgttacttgatttttctaaacccgaagtgattctgtggatcttttcagtattgtgtgatttttcagatatagggctccaaagaatgg

SEQ ID NO: 117638 - DNA, 1028 bp, Homo sapiens
aaaagggctaactagaatagctatcaaatataaaatgaaaaatgtaaatggatgtgaaaaccagtgctgggaatgtttatttttggaataccatatagtacaattgcaagcgtgccatggatggcactgccagccagtgcagctctatttgatggccttggtttgtgtactttgaaggcatgattagaatgcatacaactgggaaaaggcgggagagggaaagaaaagagaaagaaaaacattaaaaaaaaaagcatgtatacaactggatctattgggagtatttgggcagaatgtgaaggaaaaaatcagtatctaagtgttagaaatagtgggaaaatgtttcaaaggatgtaagcagatttcttggagtttgtccttagcttagctagggatcctgtaaacctatacccattgctcaggtgatagtcttattttcaccactggggaacacatgttctattgagggtagtggtatcatctttgaaacaaaaactgcagtgttttggatattctaaactgtaagatgacaactctgcagtaggaagctatttctgttttacttgataaggtgttggacactgtagtgtctagtactggacttgtatttgatcaggacagatgtgtcattattatgtgagagtgtgcatttacaagggaaatgattatttcggcccataaattattttaaaagctatttattcgcttatgaacatttttagaggggataacatggtccctcacaacatcccgaggagacaaaaacatagcagatttaataatctaatttagcaagataaaagtgtggatttttgtgaaaggtacacattttctttaacaagtaaaagtttcagatcattattgatatttacttattttaaagtaaaggcattacacactcaacatttggcctgatctgatttttaaacttcatccctaggattgatattgctgatgatattattaatgccagtgaaagtaacagagactgttcaaaacctgtggctagcactaatttagacaatgaa

SEQ ID NO: 117639 - DNA, 1133 bp, Homo sapiens
acttagaagttagctgacattttctaaaatgtagctaacatcttaaggcaacattttttttgcgcttcttttttcacacttactatattaaaatgacttgtttaaggcacctggaaaatcagatcaattaaaagtctgttgtaagtgttacatttacgaaactagttagaaaattaagttttcttaatgttaactataccttacaggcttacttatattcctagatatactaattttgcaatatactaatatactaatttgcaactagtgatacactaatcctgcttcaaaatgttacatttgtctggttgcaattttattttgatatgaaaaagttgacagttacttactccataagagagattggtcctaggaaatgaggaaataaaaatgagttgtttgtgtttaaaattttcatagaatagtatgtcttagatgtgttaacggtttcattacattttaattctgaatttctttttatttatataggttaatgaactttctgaggaagaagaggaagatgaaaagctggaacatattgaagaacttccagaagagggtgcagaaaaatcaaatgacatgccagaggtggtacaattaaggatgactgaaaacatcctggaatcaaatagtgttacggcaacaaggtaatagctcagttgaatgaactttagcttttgagtatttcattctaagtgtaaactcactccagcattcagaaacacaaactgtaactatatgtgaaagtttggcatttgtgtgtgaaaaagagcaagaagtaaaatttaaagatgcagtcttgctaaggaattttcagttattagtgttaataccttttttcaaaaacataacttcttacaaatatttcttgttaaagttggttttgtattagcttattaattgggctggataaaatttcagaacctctggaagtagcatcgttagagaaggatacagtgactgaattgacttgtatatcccgtttccaggctacaattagttgtaactaggctgtaaggatggaactctgatccattaagatagtgctttccaattcttttcatgtacaaaatgataatatttacatggcatgctgggtaaattcgataaatgtggtaggctgaagaccctat

SEQ ID NO: 117640 - DNA, 1054 bp, Homo sapiens
agcagaaaccaacatgaatttagaggagaaaaacagacgagaaatgaaagaccttttaatttagttatactgatattgctgaagttaattgtttattttaggacgccaggagaagaaaatcacactgttacctttttctttccttctttttactttcatctaagctgaaaggtatcactgatactattagcccctcaaattgcatctctgctttgctcactagtggtttgtattgtctggcatggccagtgcattttgacttcttatagttggcactagtgtggaaacacaggtacagtcatgctggagacagtaggatgagaattaaaaaaaaaaaaaaaaaaaaaagagaattggggccaatgagtaatagatgaggaaaacatcctccagcaattaagggattgagttccttttttccagctcctcttctccacctcttctccatttcataagtgaaatacaaagccctaaggcatttggccccagtagaggaagtgaagaggttttgaattgttgtattaaaaaggtgatgtgggtggagtaatgtgaacctggcaaaatatcagagctttgctttttcctttattgaaaaaaacctgttattattgttttatagattataataatgaagatgaatttggaagaaagttgaggttcctcttgcaacagcttccacctgttaattatagtttgttaaagtttctgtgtagatttttagccaatgtagcatcacatcatgaagaaatttggtccgcaaattctttggctgctgtctttggtccagatgtcttccagtaagttgtttaaaaaatttttgtttaatttttaaaaattagatatgtgaggccgggcacggtggctcatgcctgtaatcccagcactttgggaggctgatgcgggcggatcacaaggtcaggagattgagaccatcctggctaacacggtgaaaccccgtctctactaaaaataaaaaaactagctgggcatggtggcgggtgcctgtagtcccagctgctcgggaggctgagacaggagaatggcgtgaacccgg

SEQ ID NO: 117641 - DNA, 1047 bp, Homo sapiens
gaagttgatgtagaagaaaaaggagtgtgttttattctgggctcaactgcgcccctttttaaggtcacgtgagatgagtggttgcggacttccttaaatcgctcagagaatatagccaaaattgggctgttggtgcactggggccttgtctagaatgcgctctgcataggccaggctggagggggacactttgtatagcattagggttcgcgtggcacgcctggtttcctagatgaggttgtaggaatcggttggcacatttgcgcagtgggaaactgttaagccctttttgtttgtaatcagttaaaatcaaactgacttttagaaagacggtggattatttcatttggttccccgtttcgccttctaatcagtgaaaaaagttgggcatttactttgaaggatctgataatctaaaatggtagccagaatcattaccagtagtaatgcagactattaacattaactggggtgcacctgtttagagagacagacattaaagggtggttttgaattatttgtctttttagagctgggttagtgtgaggctattttcaaccttccttttttggtaaccttgaaatgcttgttggcctggttttctcacaggtactgtgcatttactaagtgcttgttgatggaattgaatggactgataattatttgtatatccattgggagcgccttcttacttttttttttttttccttgagacagtttcgctctgtcgtacaggctggagtgcagtggagcgatctcggttcactgcaacctcctcctcccggattcaagcgattctcctgcctcagcctcctgagtagctgggactacaggcgcccgccaccacgcctgactaatttttgtatttttggtagagatcagatttcactaagttggccaggctggtcttgaactgacctcaagtgatccgcctgcctcagcctcccagagttctgggattacaggcgtgagtcaccgtgccttgcccccttcttacttttttaatccgtgctgcttttaaaattggagtaatagtttctccagttt

SEQ ID NO: 117642 - DNA, 1050 bp, Homo sapiens
tgctccatagtcccacagctccatcacctcacagccttgaaggaagtggtagggatggcgcactcactggtttaggtaaatgagtaggaagcagccccagatggagttgctttatgattattaacaccttggggaggatggcaggacagagagtgggctctcactgacagatgaggacactgtagctccaagaataggtgacctgccttcagggttaaggacccagcctgctctggcctacatgattctgagaaatgggccaaagaagcaggaagagacaaaattgacatatagaagaaagaaatctcacgtataggagaaaagcagcctccttctcattctgggagggaagaagggctggaggggctgggcagggcggggcttttggcgaaaactgagtccctcctcccagatcccccactgggccggtggctcctgcagccctgccagttaggaacaaatgagaagagctgctgatttcctcccttggacattcagaattttctcacataaatactgaggaagaccctgccctctcctcacttctctggacttggccctgagctggacctggtccactggggtaggcagggcgatggggaacctgtttatgctctgggcagctctgggcatatgctgtgctgcattcagtgcctctgcctggtaagtcctttcccaaccctcactccttgccaaggaggcccccattgtctcatccccattcacctctgcctcactttttctctttttggtaggtcagtgaacaatttcctgataacaggtcccaaggtaggatgatctccagcttctgtttttacccactgagggccctaaggggactcttctggagaaaagaggggcggggacagtgccagagcccctcacccagaggaacccatggttgattcttaatggagagctggcccatctgagtcctgcctgctcccccaaccacagatgacccataccgggcagaagctcacagcccttttccctttgccaggcctatctgacctacacgactagtgtggccttgggtgcccagagtgg

SEQ ID NO: 117643 - DNA, 1034 bp, Homo sapiens
gccgagatcatgccactgcaccccagcctgggcaacagagtgagactctgtctcaaaacaaaaacaaaaacaaaaaaatgaccagccacagtggttcacgcctgtaatcccagcactttgggaggccaaggagggcagatcatgtggtcaagagatcgagaccatcctggtcaacaaggtgaaaccccatctctactagaaatacaaaaattagctgggcatggtggcacgcacctgtagtcccagccagctactcaggaggctggggcaggagaattgcttgaacctgggaggcagaggttgcagtgagccaagatcatgccactgcactccagcctggtgacagagcgagtctcaaaaaaaaaaaaaaaaaaaaaaaaagaaagaaaagcatcctcttaaacccaaaggaagtgggggataagggagataaacagtattatttttccaaagcctctgctttgggtaatcagggtccaggtttccagtcagttccctctctctctccaaagctaccagagagacttccttcatacatgctatcagctctgctggagtcatgtacatcatcaccaagaactgtagcatgggtgacttcgaaaactgtggctgtgatgggtcaaacaatggaaaaacaggtaagttgagctttctaatgggggtgggaagaggtgaggggctacagagctgagtgcagactaaagtcttccagagaaaggctgagggacacagctcccttaaacctcaagactccagcaactccttcaattgtaggatctcctagccttacactctcagagttgagcctgggtccatgagtctaggtgttagcaagtagctctaaaagcaacaaggcaattagaaatgagaaagccgaagagacttaaagctagccctggtatttcaggcttggaatggttcatccataatctagagctactcagcaatttacagattacctaagacacttactcagatttatcactaatgaaggaggtagtagcctttacgagatgattgtagaataatggtgc

SEQ ID NO: 117644 - DNA, 1127 bp, Homo sapiens
ctcccaggttcacgccattctcctgcctcagcctcccgagtagctgggactacaggtgcccgccaccacactcggctaattttttgtatttttagtagagatggggtttcaccgtgttagccaggatggtcttgatctcctgacctcgtgatccgcctgccttggcctcccaaagtgctgggattacagacgtgagccaccacgcctggccaagctgcagtgaacctttgagagcatctgttagcccccagtgtacctacttttactgtgggtatagaagactaattgcttatggctgggaagtgtctgaagggtgggcagttggctttggcaacaggactcccacccaccccaagcacctccatttccctgtctcaccttcagccatagctttacactctagggctcttgggggtggtttggcgggtgactgggactgagcatggagctacacggagaacttattctgtccttgtatataggaggccatggctggatctggggaggctgcagcgacaatgtggaatttggggaaaggatctccaaactctttgtggacagtttggagaaggggaaggatgccagagccctgatgaatcttcacaacaacagggccggcagactggtgggtataggcattgtggccagtatttctacagcttcacatctgcccggcccttcacaatttaccaagagctgtcttatacgttctttcctcatactacccagccagattgagatggctacccgcattctctggatgacaaaaccaattaaatctgagccaagtggcttgtccaaggcaactaataagtgtcagagacaggcagtgaactcagatcttctcactgagtcctcttgtcattgtatgttctgctctgcccctccacacgcgggcttctgagaacacagaaccgaggccttgcttctatgacttaaatttttatcacttcaactgcatgttctagtaaattaacagggccttgttgtccagccttgtgtcctaaagtctgtctgggctgtggggaattgggattgatctaggcttctctggagtgtcaaactctcccccaagacttctagtggggtggcagtctctggagtattctgaacacaaatctggaaac

SEQ ID NO: 117645 - DNA, 1013 bp, Homo sapiens
accagcctagtcaacatggtgaaaccccgtctctataaatatacaaaaattagccgggcatggtggtgggcacctgtaatctcagctactcaggaggctgaggcaggagaattgcttgaacccaggaagcagaggttgcagtgagccgagattgggccattgtgctccagcctgggcaacaagagtgaaagttcgttcaaaaaaaaaaaaaaaaaaaaagaaaagaaaagaaaatggtgatggggataaggaaattgggaagaagcagtgattttggagataaaggaaatgtgatttttattttagaaatgttacagcaggtggtagagcatctaaagggaattgacttttggatgcatggagaaatgacaccagaattcatataagaagtaaaggtagagagatttgggagccacctgaatagaggtcaaagttgaaacctcaaagtatatatacatttttttaaaatacattaataagaaagcagaggaccaagcatgaacatagaaggtagggatttattgaaagttgtaaaagggagaggacaaagaaagatataaaaaaaccaagatagtggtgtaatgagagcaagggaagatatattttaagcttaatgtttctcaacatcaatttggatatgaccagaaggatgccaaaggcaatcctaaagtgtgttttgaaggtttaatggttcataggttaaaaatgtttatacactgaggaaaatatcccctgccccctcaatttgtttgccttacggtttagttatggatgatttgggctagaggaaaataattgagctagctatgctccagttctttcccttcttttggtgtgaatatgaggaattccaagtaaaaataattattaggtaatattaatgtctctattatactgtattgtatggtgcaatatctctgttatactgacatggggctttctttattcccaaagacaaatataatttcatctcatgtctcccttcagcaagattttaattcttcctaatgatg

SEQ ID NO: 117646 - DNA, 1358 bp, Homo sapiens
gggtgacagagcgagaccttgtctcaaaagaaaaaaaaaaacaatctcagtaataatgaccactgtggctgggtgtggtggctcacacctgtagtcccagcactttgggaggctgaggtgggcagatcacctgaggtcgggagttcgagaccagcctgaccaacatgtaaaaaccccgtctctactaaaaaaaaaaaaaaaaattagccgggtgtggtggcatacgcctgtaatcccagctactcgggaggctaaggcaggagaatcgcttgaacccaggaggcggaggttgccgtgagctgagattgcaccattgcactccagcctgggcaacaagagtgaaactctgtctcaaacaaaaaaaagaaaaaaaaaagtgaccactgcatcaatagtggctgctggaattacagataagcttaggagagctagcctaaagacttttattactttcctccataaattaactggctctgactctgtgttgttcattatgggacagtgaggtatgatgtaatggaagggcatcaggctagaaaactacatggtcttaaggtcattggataatctcttggggcattgttttccttggtgtgtgataaagctaatataatgaggtacttgtccagcctacctcacagggatgttgtgaggataaaatgagataatagatatgaaactggcttggaaaaaaaagaaaagcattatacacatgcaaggttaccacctttttattttcactgttgcctcatgggcaacttatgttcatggactctaaaaattttagagtccttgcatattagaaatgtaaaaatggcctggcccagcaaaggtttcagtaattcatcttgcctacaggctgtaccacagacagaacattataatctccgttctttcttattggcctacaacagtgactctggatcccccaagcaaagcatttggctggctattgcaaggctggttaataggatcttttatctattgaagacagcaaaatattgcacaagaggaaggagctgggctgcagggagagagcagcagatggaaagaagccttctaattgtcctgatctcatggaaaaccactgtcaggaggtgctagggaactagtgccagggtcagtctgcaggaaaggcctttcttatagggaccaacagttggacaggtatgttagtcaagaacctcactacccattgcccattctgactctcctacctttcttttactctcctgctcctttgcacatgatttgggcctgggtgggatgactaatagttattctgtgggaccctaggtgaattccaaggacctctgtagtgggcatgagcaagatattccatcctacatttcctctca

SEQ ID NO: 117647 - DNA, 1253 bp, Homo sapiens
gccacgcagttgattatgcaaacatccgagtctgggatcagtgctaaaagtcttcgagggagagattctacccgcaaacaggatgcttcagagaaggtgaggcgatcaggaaggaacctgtgtgccagtgttccagtagtagaagtctgaagcatccaaggacccttatgttactacttggtattgggcttctagattccaatgatatacagacacatagatcttagaatgatggtggtttgcacccatctaaacgttgaataagcctattgtaaccgaaaggcccagtcacatgggagaaatcatgagtaggggaattattaattcctctgggagagtgctctcaaggcgggggaaatggcttagcctgcagcagttggggaccatcagtttctgtgctagaggcgtaatggacagattgcttttggatctctttcctcttgttcttgagttttaaaattttgtccttgtgtgtgtggtgcttgtgtctctgtcctgaggtttggggtgcttgtggctgagagtttctgtggaacctgatcagtgtttgtttgtcctctaacaggacagtgtcccaatgggctctcctgccttccttctctctctctttgtaagtattgaatggctgcaaggggtggtgttgccacaaagattctcagctcttaatgggggtgggtggcagagggaaatccaacatgcagactgtggcagtgtcttgaacttctgtttattcaggtcattgaataagaaactcttttcttctgcattcctgtctttctgcatgtgtgtgtgtgtgtgggctgggtagggactgtttttgagatcactgggctgaaatgtattctaggggtgaaggatctaggatgtacctgctcgtcatttcctgacttcaccttttaccaattcttttcttaacaaatttaaaattggtcagagcaggagctgctagctggctttttaacagtgtttctcataatggcagtactcagcaaatagtttttctcttgtctcctaaaattaagttgcaagactaatgtaacaaacagtaaaatttaagctaaagaactcagtataggctgggtgtggtggtttacgtctataattccaacactttgggaggctgaggtggaaggattgcttgagcccaggagtttgagaccagcctgggcaacgtagggagaccctgtctctacaaaatttaaaaacggcaacaacaacaaaaaaccctactagctgtgcagcggagtggtgcg

SEQ ID NO: 117648 - DNA, 1218 bp, Homo sapiens
atacatgaactggtggacatcagggagcccagtgcagagatcaaggtggaacctgcagaaccagagccagtcatttcaggagccgaaatagtagctggagttgttccagccacaagtatggagccaccagaactcaggagtcaggacttagatgaggaactgggaagtactgcagctggagagattgttgaagcagatgttgccattgggaaaggcgatgagactccacttacaaatgtgaagacagaggtacttaagaaagatcggggctggggagatggaggtttataccttagataagaagtgacagcttaggctttttggttttccagttgcattcctgagttctgacatgtttgatgtgtccaaagcccataggctgtgattagtgttatatatacttattcctgttaaggtgaccattggagtcacattacatgagtaggacttagaatttcttctatggtctcattatcactgaagaataaagttgtgtgagctatagcgatttatcagtacttagggtgttttttcttttctggttttcaggcatcccctgaaagcatgttgtctccatcacatggctcaaatcccattgaagatcctttagaggcagagactcagcacaagtttgaaatgtcaggtaaataaagtcctctttcactgacttgaaatcatttgctttggcttctgaggggttgtgggttgtgggcaagtagaggaggtagaacaggtcagcatgtaaaggagagctgcaggggattatggtccataggaaggggaaggctaaggtggaaaaatcttcaggtagtctttctctcctctgcagactcattgaaagaagaatcagggactatttttggaagccagataaaggtatttcagacttttctttattcctcttgccatgtgattagatttccctatagcactactttttaatgaatttcagtaaagtcacatctttattctctgataagagactggtatggagttgcatggggaaaagctgcagtagacaggcataatgggagtactatagcaacaggtgcctcccatatgaaacagcatgtgaatatcacacagtccttaagaaggcttgatacacttagagtgatttgtagtgaataaggatacctgagccaaggagaacatacaggaatcaagtttattaattagactatccaaagagaatcatccagagttttctttttagaa

SEQ ID NO: 117649 - DNA, 1300 bp, Homo sapiens
actgttgccagtgagcctccagttaaacttgtgccaccccctgtagagtctgtgtcccaagctaccattgtcatgatgcctgcgctgccagcaccatcctctgctccggctgtctccactactgaaagtgtagctccaggtgcgtccctgagcagccactagatctaaaatttcattttgagctttagttagagaaaaatgaccaagagcatcagctccgattcagatgcttcttctctgttctacatagacatgtgccatctttatccttagaaataaatatccttagaaatagatgtgagaagaggtgggtgggcatttatgtattgcaggaagaggctaagtatacagatatgagcaggcttgaaaatatgttctcacctttctagataaaactggggagaagaaaacataggcacatgttgatgactctttctgaccttaagtgtttggatatttgacatctgtctgtagcgcttatgtgatctcaaggtggtcgctttgtacccaataagcttctgagatgcttttctctttctgttactcagtgagtcaacccgacaactgtgttcccatggaggctgtgggggatccacatactgtgactgtttccatggacagcagtgaaatatccatgatcatcaattctatcaaagaagagtgttttcgatcaggggtagcagaggctcctgttggatcaaaggctcccagcatagatgggaaggaagaattagatctggctgagaagatggatattgctgtgtcttacacaggtgaagagctggattttgagactgttggagacatcattgccatcattgaggacaaggtaactattcagcgaagccccagagaatctcatgggtcctacataggcttctcttttcagcctcactttggtgctgctgctgcttttttttttttttttttggagacagagtcttgctctttcatccaggctgaagtgcagtggcacgatcttggcttactgttacctctgcctcccagcctcaagtaattcttgtgcctcagcctcctgagtagctgggactacaggcacatgccaccacgcctcactaattttttgtatttttagtagagatgagttttaccatgttggccaggctggtctcaaactcctggcctcaagtgatccacccacctcggcctcccaaagtgctgagattacaggcatgagccaccatactcggctgctttgcttcttacagtaagaattacttaaacaactctcctacttctgcccatctccatctttgtagccctttggtgctaacatact

SEQ ID NO: 117650 - DNA, 1034 bp, Homo sapiens
gacattgactgacctcagtttcactgttactaagcagttgtcagtgctagatttaaagcccaactttttctaacttttttttggagctactttacctggtaaacaatgtagtctccatattataaagccatctatcttcaagatagtgatagccctgattgaccacagcatggatattgagagtaatattgaactgctttcttagggcttgcaaaatcaaggtgctagagatacctaagattatagaatagtggaataagatttggaaccagagaattgggcttgaatctcaggcctgccacacattggttttgtgaccttggataggtaacttagcttttgagcctcagtttccttttttattgtaacatatatacttcacaaggatgtgatgagaatttaatgaggtagaaagtataaagcagggaaataaaaaaagctccatagaataccatacaaaccttattggtatttgaatggtgttgaacttgggtggtttacaatatgctgaacttcagcagaagcgacagatttattcataccagtttttcgtttcttggtgattaattttcctctgaggaaaaattaccaccctttgttgttgttgttgttgttttttttgagacagagccttgctctgtcgcccaagctggagtgtggtggcacaatcttggctcactgcaatctccacctcctgcgttcaagcagttctcctgcctcagcctcctgaatagctgggattacagcacccaccaccacgcctagctaattttttttttttttttttttttttttttgtatttttagtagaggcagggtttcgctatgttgcccaggctggtctcaaactcttgacctcaagtgacccacctgcctcggcctcccaaagtgctagcattacaggcgtgagccactgcacctagccttaccacccattttttatatatgttgtgtgttctagtgctttggttcattcctaacttggaggaagatcttaagtaaggttagagtaaggatatagatgatgaacttat

SEQ ID NO: 117651 - DNA, 1832 bp, Homo sapiens
acaggcggctgccaccacacctagctaatttttgtatttttagtagagatggggtttcgcaggctggtctcaaactcctgacctcaggtgatccacctgccttggcctcccaaagtgctgggattacagccgtgagccactgcacctggccttcctgttcttaaaagcagaatattagtaagttgctaaagagaatattaaaggatgtttaaactactttcccactccaaggacctttgggataattaagtagtttgagattgttaaaggagtttcttagtgtgagaattgcccttaggaaaaattaggctaaaaagttatccatctctagaagtgttaaagctttctaatccaaacttattatgctgctttagtaatgcaacatacctatttgtcctttattgtataatagcagactagtgtcaagtttcatttatttaatcttgaagatttggacattgttctcttttatgttctagctcgtcaagcagtaaaaacacccccccggaggttacccactgtgatggttcgctctcctatagattctgcctccccaggaggtgattatccacttggggacttgactccaaccactatggaagaggctacctctggggtgagtatatttccatctgtgggaattgatcagtgaaggggcaataagccggcagagctgagcgatgaggaaaccacttttggcctagaggcaacttcctctcttgatctgaatgctaaagacttaatttaccatgttctgtgctctgagataagaacggacctaaaagcattgaggcttttgacctttttgagagataggtaaaaaactattttaagaaattgtttcatactagtcttatgaaattcctgctgaaataagggacaaaatccttgtaaatgtaatattggtagtgggtaaggagttcataaaaggcaggttgggtgggatggttgagtcactgtgggtttgagtggatgaaagagaagattgtggggaagaaaagtatggctaagagcaggagggatagagggtttctgggcaattccactcaggactaataaaataatagttagacacactaacccatacagattagtagggaaccttccatagtttgagaagtcagataaaggttctctgttgtctcttaggtaacccccgggactttgccgagtaccccagtcacctcgtttcctgggattcctgacacccttcctccaggctctgcacccttagaagcccccatgaccccagtaacagatgattcaccccagaaaaagatgcttggacagaaagcaactccacccccctcccctctgctgtcagagctcttgaagaagggcagcctcctgcctactagccccagactggtatggagacttctgtgggtgtttgagagctgtggtgatttagtacttggaagggagtgcctgggacctaaaatgtgacatggggaataaaagttcaaaagaggaaaagatctcctaattaaatgttaattttttaaaaatacagtaagttgatagtacccatgggtcctgaggtatctgaatcacaattattttggttctcttctccagagaactcttgtcaaataagttttgaacattatagtttagagtttcccttgggtcttaaattattctctgtggatattagctattagttttcatgaagtttgatcaactgctggagctttgttgggaaatggtagtgaaggaaagcttgagtgtagccttcacctctattcttccctggtaggtcaatgagagtgaaatggctgtggcttctggccacctgaacagtacaggtgtcctcctggaggtaggcgggg

SEQ ID NO: 117652 - DNA, 1006 bp, Homo sapiens
agtactcggagcttttagagaccactgagacaccaaagtgagtacaaagccaggtacttcagccatatttctttagtggagagtatttactgaggaattctggtttatacttagttatgatactggatgattaaaaaatagcagaagttatctatgattaagtggtaaaagcaagtaggagaggggataaatgttatgttatttgaatatgaatttttttttttcaattttccacagacggaaacgaggtgaaaagggagaagtggtggaaactgttgaagatgttattgttcggaaattgactgctgagcgagttgaagaactaaagaaagtgataaaggaaacccaggagagatataggtacttatcagagagaatgccaaaaaattgagaaagacataagggactgtcttctggtactggtcagaacttttaaaatagcagattaaaaaacccagtctacctacctctctttcttcctatagacggctaaagagagatgcagaactaattcaagctggacacatggacagcagactggatgagctttgcaatgacattgcaacgtgggttatattatattgttcttctgtgcttctttctttttaccctcttttcccctcaagtaatctggcttatttcctccaattgccgtccctttagacttgagacagattctggaaggggaaagctgcaaagtggtttggtggctgggaggggggagtgagtcctagaaggtaatataatgggacatttcagtatgaaaacataacttagttctaacttaagagtggctatagtttgcctgggtgaagaactgggagttaggcagtataccccaattcactgttttgctggttagaattcctgtttaggcctttcttccagaaagtgctggcctggcaaaaaaaattactttgtaagggttctgtgaactctggggaggagccagagctgtctagcatctaacccttaattccctgtttaggaaaaagaaattggaaga

SEQ ID NO: 117653 - DNA, 1057 bp, Homo sapiens
gcttgctttgtcttaaggggaaaaacgacatttcccaggaggcaccgcgaaccaacgccggtacactatttcccagaattccagggtttcggcccttccagaccgtctctcctcagggttggagacttcggggccaagatggcgacgggaacgggcagtgagtatctgagcaggttttgcgtgaaaggcctttgtagatccgaggctaggcaccatatttttgttacacgcttagggagtgggagaagtgggttgcttgagagcccagggttttcagagacctgcgctctacagcatcgtgaagaccaacgtttgggggcccagaaatctggggtcttgtttctcagggagagagcggaggtgtgagagaagcagcttagtgaatcctagtgtgttaggaactctgcgggttaaccgtaaaagcactctagaaacttgggcgtgcagacgaaaagatgttatgagccagacggagtaaccggcacctcaaagagccattcatttttttgtctgacgtttgtgaggcagtggaagtggggtcttttaaccatgagcttttcttgccactcaggaaattgcatctcggggatttcagccatttttctttttttggactgaaaagctcttttacccccgacatttggagtagaggatctgagagaagtaaacaagtttatgctaagagggaggcggggtagtaggaggggctggccgctcgggttcctgggaaataagccctgaataagttcaaactggaataaagtccagtattcttaaaactgggcttttagggagaactgcctaatctgacattccctgtttcttaataaagcggagcttcaagccatggcgttttaagaaataaaatgttaataattcacatgcaacgaataggtaccccggtcactggtgatatttcacttggagaggtgaaaatcaagatttggttatagtagctcactttgtcctaacaagttgggatgttttgtattaggcttttagtcctctttttggggattttggagcttagcactacagtctcagtggttgtttccaa

SEQ ID NO: 117654 - DNA, 1392 bp, Homo sapiens
acccggacccacattagaactcagaggtcaagcagaagcgaacgactggaattccagtcaggcccgccccctttccttacgcggattggtagctgcaggcttccctatctgattggccgaacgaacgcagcgcgtaatttaaaatattgtatctgtaacaaagctgcacctcgtgggcggagttgtgctctgcggctgcgaaagtccagcttcggcgactaggtgtgagtaagccagtatcccaggaggagcaagtggcacgtcttcgggtgagtgtgcggctgtgctggagcccgggttaccagctcttgcccgcgcggaataggctttaagaaatcggagctgcagccatctgtttttctcttaatgctgcatctctgttctcacggtggtccttggggtgaggttagagaaggagccgagggatcctgacaccacctccacagcaccggcgggcgaggtgccctactttaggcgtagccttctgcttttggagccagatgtctgtggacttctgttcgcgttcagaaatgccgcctcaaacttctctcaattgttcattaagtgaacttctctcattcccttcccctttgccgataattggaggggaaaagaagtaggaagcgggacacggtgtcctggggcaagggacttattacctaaaattcgcggccccttctgtccctaaaggttcttctccctgcccactttttggtctctttttagacctaggctgcccctgccgtcatgtcgcaagggatcctttctccgccagcgggcttgctgtccgatgacgatgtcgtagtttctcccatgtttgagtccacagctgcagatttggggtctgtggtacgcaagaacctgctatcagactgctctgtcgtctctacctccctagaggacaagcagcaggtaaaggaactggggagtggctggggcggaaagtgatatcctcaggccaataattgtccatacagggtagtatgaggtcaaagactagcaatcctaaaggtctgagatcaattcaaaattaagggcatttaggacaaaatggctatgaaaagaaaaaaagaaaaaaaaattaagggcatgacaagtaaaaaaaaaattgagttgtgtgtccagaagaactataatttgcattgcattaatgaaatagcctcaaatgcatgctcttagttaatctttcagggaataatagttatctctctttgccttgaggcccagttgtgctaaataatttgcacaaggtcatataggcattatgtaagtggaatgtatgttcaggttttaatagtatcaccatagcttcaatttgttgtaggtttcctgctaggccagggtttctcagttacagcattattgacatttggggctagacagttcttgtag

SEQ ID NO: 117655 - DNA, 3314 bp, Homo sapiens
cccccaggctggtgtgcagtggcacaatctctgctcactgcaacctccgcctcccgggttcaagcagttctccctgcctcagcctcctgagtagctggaattacaggcacctaccaccaagcccagctaatttttgtatttttagtagagatggggttttgctgtgttggccagactggtctggaactcctgacctcaggtgatccaccctctttggcctcccaaagtgccgggattataggcgtgagcccctgcacccagcctctaagtatctgttgaatgaatgacataggtgctattattaaccccattctgcagatgaggaaactgaggccaagaatttcaagaactcataattcaaggtctcatagttactaagtcatggaattgggactcaaattcaagtgtttgcctctgctttgctttaatatcacatactaattttcataccagtcaataaattcgaactcagatcatcggtgtggcaagccacatttgcaggataatgacgagacagggaagggtgacaaagtagtaaaaatgtccatgtgggttggaatgattgtggaaccaaagagtagctgcacagagacatttgaggtgaaatggggtagtgttatcatagttcctagaaactactgtttgcccatttgctcagaggtaactgctgaaattaatctgtggttctgggctgggattctgccacaggttccatctgaggacagtatggagaaggtgaaagtatacttgagggttaggcccttgttaccttcagagttggaacgacaggaagatcaggtaagtgtctgagaagggaggattcaaggtgaaatgatgcagtacaaaagattcccaggaatgccttctgtgacaactgtattttctcccttctcagggttgtgtccgtattgagaatgtggagacccttgttctacaagcacccaaggactcttttgccctgaagagcaatgaacggggaattggccaagccacacacaggttcaccttttcccaggtatggagggtactggtttgtgaacaaaagaccaacatgtaagggcaactttattccctctttagagggaaagcttctcttcctgactgtgagttccttgtatatgcacacctacaattttgagggccctagttatgtgttagtcaatgtgtcaagtaacatatgtatatcagttctgaaaaattctattgttattatcattatttccttattttcctcacaaggatagtgtggctcaatgaatgtaatattgctgaagccatgtagctagtcactagtagagttaggacctgagtctagatccatgtatctccaaagcccatacttgtgggccattatattgccccattgtgtgtgcagcatcaggcctagggcatagcattccttaagtgtttgttgatttggtggaaagatggactagcagagagtgcttgagtcctcagtgtttagggaacagccagcagcattgcaggaagaagctgcttgagtggtctccagagccaaccactcaggaaggaatatatctgctggctctgcacaggaggcaagtgggagatgaaggagaggcctctaaaaaactgggtctctctctagatctttgggccagaagtgggacaggcatccttcttcaacctaactgtgaaggagatggtaaaggatgtactcaaagggcagaactggctcatctatacatatggagtcactaactcagggaaaacccacacgattcaaggtgagtagtaagccttcacgggattcctgattggctggtaatggtgttgtttttaccttttgagactctgagttagggggagaagggcacttgcctcagctgtccatctttcatatgcctccaggtaccatcaaggatggagggattctcccccggtccctggcgctgatcttcaatagcctccaaggccaacttcatccaacacctgatctgaagcccttgctctccaatgaggtaatctggctagacagcaagcagatccgacaggaggaaatgaagaagctgtccctgctaaatggaggcctccaagaggtaaagcattggtatccatggcagtgggggtagggggtacaaatctcggggaagttttgtgcttaccttctccctgtgcccctccaggaggagctgtccacttccttgaagaggagtgtctacatcgaaagtcggataggtaccagcaccagcttcgacagtggcattgctgggctctcttctatcagtcagtgtaccagcagtagccagctggatggtatgtaccgtgactgggctctgccaaaaaatagtaggaactcactccctgttcctaatagctgccaggagtacagaccagaggttgcaatctaaggtctgccttccaaggcccctgcaggccaaaagagaggtgaactgctctaggttgatgccctatacattggcttcttctccagaaacaagtcatcgatgggcacagccagacactgccccactacctgtcccggcaaacattcgcttctccatctggatctcattctttgagatctacaacgaactgctttatgacctattagaaccgcctagccaacagcgcaagaggcagactttgcggctatgcgaggatcaaaatggcaatccctatgtgaaaggtaaaggaacatggggaaagctggcatgaaccctggagggcaactggggagagactggcaaaagagttggatgttcccatcttacacccctctcctttggccccagatctcaactggattcatgtgcaagatgctgaggaggcctggaagctcctaaaagtgggtcgtaagaaccagagctttgccagcacccacctcaaccagaactccagccgcaggtgagtagattgtaagaataaactcttcactgtgttccaggaaacattagtcctctgcctggtcatggaaaatgtgcaatgactttttgtttttcttaacttccagtcacagcatcttctcaatcaggatcctacaccttcagggggaaggagatatagtccccaagatcagcgagtaagtttatccatttagaaatttgggcttcttggccataaatgatagttgggaaagcatggaggaggtcctcaggggaactatgtgttctccttctttgggtacagagattcttagtgggccgtcccctctccagaattatacaaagggccagaaggctcataacatgtgaggcccttatgtcagatcctgtgcatcattctaggctgtcactctgtgatctggctggctcagagcgctgcaaagatcagaagagtggtgaacggttgaa

SEQ ID NO: 117656 - DNA, 1055 bp, Homo sapiens
gaattatagtcaaaagctcaccggttctgctggttttgacgaagggcagcaatacagcggcccagggtgtgtagagaggtgttaatgtttcctgcttccttcaaccgttcaccactcttctgatctttgcagcgctctgagccagccagatcacagagtgacagcctagaatgatgcacaggatctgacataagggcctcacatgttatgagccttctggccctttgtataattctggagaggggacggcccactaagaatctctgtacccaaagaaggagaacacatagttcccctgaggacctcctccatgctttcccaactatcatttatggccaagaagcccaaatttctaaatggataaacttactcgctgatcttggggactatatctccttccccctgaaggtgtaggatcctgattgagaagatgctgtgactggaagttaagaaaaacaaaaagtcattgcacattttccatgaccaggcagaggactaatgtttcctggaacacagtgaagagtttattcttacaatctactcacctgcggctggagttctggttgaggtgggtgctggcaaagctctggttcttacgacccacttttaggagcttccaggcctcctcagcatcttgcacatgaatccagttgagatctggggccaaaggagaggggtgtaagatgggaacatccaactcttttgccagtctctccccagttgccctccagggttcatgccagctttccccatgttcctttacctttcacatagggattgccattttgatcctcgcatagccgcaaagtctgcctcttgcgctgttggctaggcggttctaataggtcataaagcagttcgttgtagatctcaaagaatgagatccagatggagaagcgaatgtttgccgggacaggtagtggggcagtgtctggctgtgcccatcgatgacttgtttctggagaagaagccaatgtatagggcatcaacctagagcagttcacctctcttttggcctgcaggggccttggaaggcagaccttagattgcaacct

SEQ ID NO: 117657 - DNA, 1647 bp, Homo sapiens
gccaagttctcagccattgctagccaggtgagaagctagaggtgtgatgggtgtgcgcacttggaactggtaactctaagaaagctcctagggactacttatggagtcaagtaagatattttttttccctctagcttgtgcatgccccacctatgcaactgggattcccatccctgcactcgttcatcaaggaacatagtcttcaggtatcccccagcttagagaaaggggctaaggcagacacaggccttgatgatgatattgaaaatgaagctgacatctccatgtatggcaaagaggtgagaatacaagaaagctttagtgtagcagcttagtagctacacatttttccatggtgccttccaggtgggcttgtgccttctgagggcatgagcatctgatgacctctgacatgtgtgtctctcctaggagctcctacaagttgtggaagccatgaagacactgcttttgaaggaacgacaggaaaagctacagctggagatgcatctccgagatgaaatttgcaatgagatggtagaacagatgcaacagcgggaacagtggtgcaggtactagctgagtgacccctcttgctctgtcacctgagacagagggtgggaagtaaggagttaggtggagttgtgcctcaagatctgttccccaagttcactcctcagaaccttcacttacctctcttttctcctctgtttctgacagtgaacatttggacacccaaaaggaactattggaggaaatgtatgaagaaaaactaaatatcctcaaggagtcactgacaagtttttaccaagaagagattcaggtgagttgccctgagccagctccaattagctgctcagatttccatcactagcttgcctgaagtaaagagattttataaactactccagtaagggcaggaatatataactcccttttctctattccccatagtgctttgggttcaatctatgtttggtgaattgattaagggtttagttggccaggaaatcgtattaagtgctaacaacaggttttcaagggatcagtgtcacaagtgctttgtttgttcagtcatctgtcttagcaatatttttctggctctgcaaagaattgtgctctctgcttccctcttaggagcgggatgaaaagattgaagagctagaagctctcttgcaggaagccagacaacagtcagtggcccatcagcaatcagggtctgaattggccctacggcggtcacaaaggttggcagcttctgcctccacccagcagcttcaggaggttaaagctaaattacagcagtgcaaagcagagctaaactctaccactgaaggtgaggaaagagacaggcaggaaacataacagtggttcagggaagagctgttacttaaacccaggccttctaactcctgctctaacataatttcctaaactgcaagctacatccccctgacatttcaatctaggatacacatagcctcactttttatatttgctgcaagctactgttacctcagttaaagaggttagtccaaggctaaaaaaaccccacatattttaagtttcctgtttccttccctcagagttgcataagtatcagaaaatgttagaaccaccaccctcagccaagcccttcaccattgatgt

SEQ ID NO: 117658 - DNA, 1018 bp, Homo sapiens
ttaaaattgtgtatcttaaactaaactcaacatttaatttgacatttagagactgaggcacttagaaattaaatttactcaagctcatactaccttatgtgttagaagatgtcctattcagcactgcttatgttttgttctcagaaaatgtccccttattcagttataagctccgaccttaaagagttttaatctttgaagaaacagttgttagtaactagtaatggatggtatgtattacccttagccctctcgtttctctaatataccagacaaaagtgttttctataactttattgatcttccttaggaccagactctggctgaactgcagaacaacatggtgctagtgaaactggaccttcggaagaaggcagcatgtattgctgagcagtatcatactgtgttgaaactccaaggccaggtttctgccaaaaagcgccttggtaccaaccaggaaaatcagcaaccaaaccaacaaccaccagggaagaaaccattccttcgaaatttacttccccgaacaccaacctgccaaagctcaacagactgcagcccttatgcccggatcctacgctcacggcgttcccctttactcaaatctgggccttttggcaaaaagtactaaggctgtggggaaagagaagagcagtcatggccctgaggtgggtcagctactctcctgaagaaataggtctcttttatgctttaccatatatcaggaattatatccaggatgcaatactcagacactagcttttttctcacttttgtattataaccacctatgtaatctcatgttgttgtttttttttatttacttatatgatttctatgcacacaaaaacagttatattaaagatattattgttcacattttttattgaattccaaatgtagcaaaatcattaaaacaaattataaaagggacagaaaaattaagaatcaaacatcattctggaccatgggaaccttgaaaaggcatggcagtggagaccagtaactagtatacagcttg

SEQ ID NO: 117659 - DNA, 1034 bp, Homo sapiens
tgtgtccaggagttcaagaccagcctggacaaaaaagggagagcttgtctctacaaaaattaaattttgccaggtttggtggtgcatgcctgtggtcccagctactcaggaggctgaggtgagaggatcacttgatcctctgcagtgaggtcgaggctgcagtgagccttgatcacaccactgcactgtagcctgggtgacacagtgagactccatctcaaaaaaaaaaaacaagcaagcctcccgcctccttgatctgtggaacttgtttaacagcatcttaataacttgttttcgagactagctttggacatgttttgaaacatttccctgactttgttgcagacccgggaagaaggtaaggccttactccggcaaatcctacagcttcggaaccaaggcgagactcctaccaccgaggtgcctgctccctttttcctacctgcttcactctctgctaacaatacccccacacgcagagtttctccactcaacttgtcttctgtcacgccatagttggctactctcaagccagcacattgttagacccatcttaattaagccttacctccatgtaaagaacagcacgtctgttccaaggacctcagctcttcttgtttctacagatggcaacagctccatagggacagcttgtataattaccttcagaggccaactgacagaatcctggcaggaacagacattatcttgccagttagaagtacttctgtctcacttatgtccaaagagtggctatagatcttggccttcttccctgaatgctttttttttttggcccccaagaaagtcccttttatagcactttagcacaggcaatgctacaggaacaaagtttcaatgctgctgagagtgaaagaaaggaggaaagtctgccactctaccctgagctggcagtagggcactgagtaccctaggaagaagtcagagcaatggatacaaatgaccttgctcttggatttgctgagcatgatccctattctgatgtcagagattaggtttaaatggaatagagc

SEQ ID NO: 117660 - DNA, 1018 bp, Homo sapiens
agtataattatgaacacaaagtaatctattatatggagcatcaggttaaagaccagttgttgcatagatttgaaatagtggtgtactggttcctcaaaagagaacttcagtttctgtaaagtctttgctcagactgcctgttcttctttctcagacccaatgattctcgcatgctggttgctttaggagaatgttacgagaaactcaatcaactagtggaagccaaaaaggtaccttaaattgggtcctgaagaatttgagtggaaatctgctgtttagatgaaggttgggctatctgtgctctaatttttcccttattctgatctaggtgcataggaaagtctgaatatttatagatacatagtctgaaagcaaagctgggccaaggtcatcagtgggaatgtcagtgtgtagcctagacctatcagaactagtaaaaatgtcttgcattctataaatctgaacttctgggaggcttgcagggtcttaaccttcatatgatttagttgtgacacatgggacaatggtcaaaatgaccagtttatttttttgacagtgttattggagagcttacgccgtgggagatgtggagaaaatggctctggtgaaactggcaaagtgagtgaaaggagtgaaatgctattgatatttctgttggcttctctgggatggtgggtcctgcatggtctagagcctcccatacacccatcattctacataggtgtagggatgtagcagggtgtgtgaatgctggtttgtgaatgtagccatcttgttcctagagaatgccacttctggccaggtgcagtggctcatgcctgtaattctagcactttgggcggctgagggaggtggatgacctgaggtcaggagttcaagacctgggaggtggaggttgcagtgagccgagatcgcgccattgcactccagcctgggcaacaagagcaaaactccatctcaaaataaaaaaaataaaaagagaatgctacttctcttgaaggagggccgttgctttcct

SEQ ID NO: 117661 - DNA, 1052 bp, Homo sapiens
tatgaaaatgagctgggtacagtggctcacacctataatcccagcactttgggagtctgaggcggaaggatcacttgagcccaggagtttgagaccagcctagggaacatagcgagaccctgtctctagaaaaataaataaataaataaaataagaaaatgaaaaccagcatcctaaccttagaacagagactctgtttctttcctaggccccctggaaaaaggacaagtgaaaaatgaggcgcttagagaattgagagtggagctcagcaaaaaacaccaagctcgagaacttgatggatttggactttatctgtaagtgttacagtaatttggaactttctgtaacatattctcctgagtagaaagcagctattaaatagcattaacttctgtgattgtttcttttttttcccaggtatggtgtggtgcttcgaaaactggacttggttaaagaggccattgatgtgtttgtggaagctactcatgttttgcccttgcattggggagcctggttagaactctgtaacctgatcacagacaaagagatggtaaattgtgatgagctatgtgaaaaaccctctgcttcaagccttttgtaattctgtagtaatataggggtggggaaagttttggcagggctttggttatagttctccctttgctgcgcctctggtgtcttttcgctgttttggaagtaagtctttgtttgaaagactgatgactagctctttttcagtagttgctgttggatttgtatccagttatactagaatatttttttcatattcatgttttcacatttcagttctattgtgacttgtttttgtttttgtttgagacggagtcttgctctttcatctaggctggagtgcagtggtgcgatcttggctcacggcaacctctgcctcccaggttcaagcaattcttctgcctcagcctcccaagtagctgggactacaggcacgcacaaccatccccagctaatttttgtatttttagtagagatggggtttcaccatgtcggccaggctggcttcgaactcctgacct

SEQ ID NO: 117662 - DNA, 1042 bp, Homo sapiens
ttatgagtgttcgtttagttttttaaagttttcttttttctccatttttttattttgaaaaaattagaaagaaaaacttggccgggtgcggtcgctcatacctgtaattccagcactttgggaagccgaggcaggcagatcacttgaggccctgagtttgagaccagcctggccaacatggcgaaaccccatcactactaaaaatacaaaaattagctggaagtggtggcgcacacctgtaatcccagctactctggcagctgaggcacaataatcgcttgaacctgggaggcagaggttgcagtgagctgagattgcgccactgcactccagcctgggtgacagagtgaggctctgtctcaaaaaaaaaaaaaaaaaaagagttctatgggcttacttggtaataaaataaatatataaaattatatatatatgcatctacatattctaggtttttaggaggaagaaaacaatcctttttcttttacatcttgaaattaacgaatatactttttagatttgaagttttgttgtcctattcccaaccacttacataagcttgtttcttttttaggaagatgcccaggatatggatgcctataccctggccaaggcctactttgacgttaaagagtatgatcgggcagcacatttcctgcatggctgcaatagcaagaaagcctattttctgtatatgtattccagatatctggtgagggccattttaaaatgtcattctgcctttagtgaaacatccatatttagaaccaatggaaaagttaaatcttttaaatagcttagcagtgggccactgaatgaatgtactttatacatagcaataataaaaaaaagatatcataaataaagttaaaaaggatggtagagaagaaaatattcttaggaatgactaacaggataagtaacaacctgattatttatttactttaggttatataaggttcttcatgcctgtgaattaatattattgtgtaagaattaagttaaaaagcctgggctgacttttaaatttataaattcattt

SEQ ID NO: 117663 - DNA, 1311 bp, Homo sapiens
acttactattcatgaacattcctcgcagtgatctctatacttccagtggttcaggtctataaacatttattgaccatctacaagctctatgccaggcgttcagggtatatacagagatatacttagacccctgccctaaaggtgcttatagtccagcttttctggtccacattatcccaggttggcgtctcagtcatttctaagtattggcactgtctataagcccctgaggaaatacttactaaaattcttcttctacagggagccttaaacttatatagtcaggaagaactgtttaacttctttctgaagaagcccatcgtccctttggacacccagaagagaataatcatcgtgttccactgtgaattctcctcagagaggggcccccgaatgtgagtgtctaaatggggtctggcgggtgatggaaatggattttgagttggacttcccacaccagttcagacagagactgactggattctacagtttgaagaatgttagggaggttgaaggaagacgtttctaaaattgaaaagtttgaaacaataaaggaaaagggattgagaatgaggctgcagtggaggaaaggaggaagggtggtactacttggacctttttttgcaaacacagggagattggaaagtcctttttgaggttggcaatagtctactcctctcccccctccccagtgaatggcccctgggatcctgaccttgtttctttccaccccacccatctctgggttctctctaaaggtgccgctgtctgcgtgaagaggacaggtctctgaaccagtatcctgcattgtactacccagagctatatatccttaaaggcggctacagagacttctttccagaatatatggtaaagggtggggcatgcggggagccaaactttaacaactcaactcccagggcctgcaaagccttcagagaagaaactgctgctcctccttagccactgccagcagcagcatctctattatccttcataggtagagttcaggagtctagagaatcccttactctgttccttacctttcaggaactgtgtgaaccacagagctactgccctatgcatcatcaggaccacaagactgagttgctgaggtgtcgaagccagagcaaagtgcaggaaggggagcggcagctgcgggagcagattgcccttctggtgaaggacatgagcccatgataacattccagccactggctgctaacaagtcaccaaaagacactgcagaaaccctgagcagaaagaggccttctggatggccaaacccaagattattaaaagatgtctctg

SEQ ID NO: 117664 - DNA, 1052 bp, Homo sapiens
tgacagagccagattccgtctcaaaaaaaaaaaattagccccaatacactgtgctggaaaattagtaaattgtaaattgtataaaactcgttcatctttggaacatgttatatggttatgcaggcaaaatgagggtcttatccccaggatgtcacttgagtcttgatatttaccacagagaataccctatgtattgttgttggaagagacatatcaactaggaatagggctcctagaatgaaatagaaaaatgttgggatgcaccaatccactgaagaataatcaaacagtatttgggactaacctgacaggcagtttgttttaatctgcaggaatcatgaccagcacctaatgaaatgtagcccagtgagtagcctctctttttttgggttttgttttgcttttcaggtgggaggcagagggtttccattgcacctgtggcttgaggatgctggacgttctcagcaaactctcttttttaggcacagcttctttgtagcactccgaatggtttggaccgtggccatagaaagagagatgcaatgtgtagttcatctgcaaataaagaaaatgtgagtgtttaatggaaacctagatatattggcagttttattttttgagtgaagaaacttggtatcataatgagacatagaactgtttatacctcgtatgctagacaaggaaactgtattactataggggagaaaatttctttgtttttgttttttcttattaaagtttggccctaggacagacacccagctccaaatcttccacagtaggtcatcattatttctcatgttcagttgatcattttgaggacaaaaattacccttactgtagtgtaagggatttaggagttttttgtttgtttgtttgtttgttttaacaggtagggataacttgcataacttgttcatggatttttttttaccactttacatgcaagtgtagattaatttcttatttcccccttagtctagcttttaagcccttattccgaggaggccatggtactttttatctaaaccttaggccatccgtcgttccaa

SEQ ID NO: 117665 - DNA, 1047 bp, Homo sapiens
aatattccaaaaggaatgtttcataagttaaccttccagaattctaatttcagattttctgagtgataacctttcttttctacccataagaaaaaaaaaaactccataggtagcatagtgtagtgtttcccaacacttgatttcttttagtgacacatataaattcttacgtttctgtgaaattgtaccttgtaccatgaaatgggtaccaatcgagaggctttgtattcaaaagctcagtccttgaaattaatacggcttactggtaatgaagaaaatctgaaggaaaaacaggatgcatggacaagaataactccttttactgattctttatatttgattgcaggtcacctggattcttcaggacttcaggaagtgcatttagctgggatgtaagttctgttgttaaatgaaccccacacaaaagccttttagcactggtcatagagattttatcctgtgcagactctgcagagtacaaaacctttcatactgggtataagtgggctttgaggcctagttccttaccttgaacagtttctaagttttccacatctaaatagtgttgtgaaaatgaaggctattcattttaaccatcataatcagaagtatctataaggaaatgaaggaaaatggtatactacacttatgtataggcttttatttgtatgtgaaaggtgctgtatcttagtaattgaaagtacagagtggccggacacggtggcttacatctgtaatcccagcactttgggaggccaaggcaggcggatcagttgaggtcagcagttcaagaccagcctgcccaacatggtgaaaccccgtctctactaaaaatacaaaaattagctggatgtggtggcacatgcctgtaatcgcagctacttcggaggttgaggtaggagaattacttgagcccaggaggcggaggttgcagtgagccaagactgcgccactgccctccagcctgggcgacagagcgagactccgtctcagaaaaaaaaaaaaaaagaaagtacagagtataagctctggaatcagtgtgtggat

SEQ ID NO: 117666 - DNA, 1059 bp, Homo sapiens
tggcctacccagtcggaaggcagagctgcaatctagttaactacctcctttcccctagatttcctttcattctgctcaagtcttcgcctgtgtccgatccctatctactttctctcctcttgtaggcaagcctcagactccaggcttgaggtaagtccgcagccgtctccgccacggaatcacggagaccccattgtcccccttagggtccagtcgggcccccacagacagaggttgggagggccgaatggggactatcgcgagttacgagacccgggttctttctagtcaggagtctcgagctgtgtggcgtggaacaagtcaaaatcctctcttcattccatctttaaggtcctaaggttgcctctcgtcggtgaattcaggttctaaccttaagccaggctgtgaatcacccttcggggttgcccctcttccagtgttgattcgcctggctggaaagggtggaggagtttaggaaagctgagggaactgtgatgtaccgatttagatgacgttttcctcctagctaggttttgtttttctcctggtgagaattcgaagaccatgtctacggaactcttctcatccacaagagaggaaggaagctctggctcaggacccagttttaggtctaatcaaaggaaaatgttaaacctgctcctggagagagacacttcctttaccgtctgtccagatgtccctagaactccagtgggcaaatttcttggtgattctgcaaacctaagcattttgtctgggtaaatatacttttatttttacactgtattgcctttgctatttccaaacagttgggtttgtttgttggtttgttttcaattatcccggctcaaaggtcaggctttaagtctcaactctgcccttgactgtgtaacccttttgagtctcaccttcttttctgtgacaagaaataatctcagccaggcgaggtggctcatgcctgtaatctccgcactttgggaggccaaggagggcggatcgcctgagtctaggagttcaagaccagcctgggcaacatggcaagacgccgtctctacaaaa

SEQ ID NO: 117667 - DNA, 2568 bp, Homo sapiens
ctgagcaagaatatcaacagccgcaggcgttgaccattcaaaccttccgccagcccagtaacctatccccgctcgcctctaagctgcgtcagccaatctccgcgcgcgcgcccagggcctcatggcctatcgttgggctcgcagatcacctgggggcgtgtgcttgctctggaaatggtaagacttgccccgccccatagccagagcaggatagtgtttggcccaccagcgttaggcaggctgcggggtaagctccgcctcacggggagcctggcgcatcattggctctccctctcaccaatctccacaccctttctgttttcctcgttccctcagccccacgaaccccgggagatttaaaccgcgccttactagtgatgtccattcactagggtaatactaggagagattattttgggtggagggtgttgtaagcgtttcattttcttcgcttctttctcgtgccgttttcgcggacgttttcttctaagttttgctggccttccacgggagatggagcgtttgctgccggcgtggcaagtgttggggcgagacgggtgtgtgtgtttatgctgagaggcattagccccttccaagagctttgtttggtgtttcttttagtgtgcagcatctcagagactctagctcacgtgggtaaaaagaaattccgttgcagggaaagtggaggaattaaatcatcttggtataatccttatcgcaatccagaggacctcaaagattggttattaatgaaaatttgaacattgacgaggtgatatttataaattattggccggacgcgttggcccacacctgtaatcccagcactttgggaggccgaggcgggcagattacatgaggtcaggggttcaaaaccagcctggccaacatgatgaaaccccgtctctactaaaaatacaaaatttagccggttgtggtggcacacacctgtaatcccagctacttgggaggctgaggcatgagaactgcttgaactcgggagacagaggttgcgccactgcactccagcctgggcattagagtgaaacaaacaaaaagacattcctaatgttagggatttgcttttaaataatcctgtgctgggggaaggtattgatgatacaagattgaccctgactgttgagtgatgggggcaggagggtccatcatatctgtgcttctcaaggtttaatttgcacactaaccacctgaggacctgctaaatgcagattctgattcgggatgtctgggttgcggttgcggcccaagattctgcccttctaacaagcccccagctgatggtgaggtagctggtcctacgaccatactttgcgtggtaaggtattaccccatacttcttacttcaatgtatatttgaaaatttccataataaaaatgttcaaaataaccttggaagctctttaagatgtaggctccaaaaacgataattcgataggtctaaagtggggtcattatcaaggcccccaggtgctacccatgcagacggcttgcagatcatgctttgagaaacaaaagtcaaaatgcaacttgtgtctgttgtcaggatcttggtggtggtagtggctgagaggcacagtgtagccagctggtttttatcctaatacccttttcatctgcagaacctgcttccccagaaaggagatgtgtgaagattctttgtcctctaggatacagacagtgagtgtaggagttagcacagaaccttgctatgccaggtgagtttgaaaatcaggctggggattaagggagtgtgggatgagttgttatctgctttgacgactacagtataatcacactttgtgggaaattgtatacttccctgcaggtgggaagtagagacaaagttattctctattggtggcaaaagcagatagattatggcaagtgcacacctggctaccagtgctttctgcaccaggtcctcaagtaagtgcagttgtgggtggtcacaacaaaggtgtcagccaagtggctttagttcaatgtcaggtgatggaaatatactaaaatctgagcactctgacaaagttgcagcattcctaaaacaaattctccaaaaatctagccccaaaaataagtttctgagatttctcaaatggaacttatacacctagctcttaagagtattttttttttttttaagatggagtctcgctctctcccgggctagagtacagtggcgcaatcttggcccactgcaacctctgcctcctgggttcaagttattctcctgcctcagcctcccgagtagctgggactacaggtgcccgccaccacgcctggctgatttttgtatttttaatagaggtggggtttcaccatattgtccaggctgttctggaactcctgacctcaaatgatccacccacctcggcctcccaaagtgctgggattacaggcatgagccactgcgcccggccgcccttaagactttttacagatgcagtggtgcgcctgtagtcccagctacttgggaggatcacttgagcccaggagtttgaggccagcctgggcaacatagtgagactgtctcctaaaaacaacaac

SEQ ID NO: 117668 - DNA, 1026 bp, Homo sapiens
agcagaaagtcttgcctacaaccactgttcttccttgttctcttattactatttctgtagtttaggagaagggtacctcttttcacttctgactggaagataaaatactgggctgatcttgatggaaataatcatttgggcatccctctctctcacttgagcagctgttttctaagtggtgctggtattccagttagaaacaacagagcatgaaccagtttaagggtagcaaataagtttcaacttgattgccaactctattttatttcatatctggactgccaagttcataatttctgaagctgtgtttaggcttagctggaaagagctgtgatcaattgatgtctgccagaggcctggcttaggggtgctgtggtatgtgtgccatgcattttccatctctggaccaggtgcatctctaatatcacttggggctggtccctctaattggcagactcagcaggcatgactggagagggaagtcccaatggtgctagaatggtgctgcagtggcagaagacggctcacaagtgaggtctggaagaacaacagggaagacatccatcatttgctccaaagtgtgcaagtcaaatcctggggagaatcatgataaccctgatcactgagcagctacagaagcagactctggatgagctgaaatgcacacgcttcagcatcagtctggtaaaagaccagtcttcctgcttctccacgaccccctcccccttttttctgaggctgattgttgctattactttactcttgtcctgtgctgtatgaatcatggtacttaacctggaagagcccactaatggctcaaaacccagcccaaaaggaagggggcagggatttttccaccgatagagaagggacagcaaaacttgggtggagaagggtttgagatgttggaagatgtggattgtttgacttactaactttgggaagacaagaggaagaacacttaatgtccctaacatccctgtagctcatgaatcgcagaggagaactgaagagggcttcctagaa

SEQ ID NO: 117669 - DNA, 1400 bp, Homo sapiens
ccaagcccaggtttcactgtcaaaggccttccccaccctgtttgccctccctaggaataaaagtgatctcttacctgcctgattacctcttacttcttggcagtcctaactcctgacttggtgctgttgacacatgagaggaggaaaggccgagaaagaagagcataggcctgcttttcagcatccagggcaagcgtgggggaggggcgagggagagatgagcaggacactcacaaacgtgtttgtttctcttgacttcttttacctttgagagggagtggcaggcagtagatgaaatgtttttgattccaggtagttggtcacaatggaggcaatagagcatagtggtttaaaaacctagccttcgcatcagacagacctggatttgaatcctcctttggtcttttgagtgctatgtgattttgggaaagttattgaatttctcttatctgtgaaatggggataatgataacgatactacctacctcataaggtttttggaaattttcacataaaatgctccatacattatgtggcaaatggtaagttcttaaaaaatgtaagctatcattaatattattcttattataaatgccttccagaaggtgcttcctggaggggcctgccccactgttcctgtgctgagttccaggacagcctcaacttcagctaccatccctcaggcctgagcctgcacctcagaccacccagtcggggaaactcccccaaggagcagcccttctcccaagtcctaagacctgagcccccagatccagagaagcttcctgtgccccctgcccctccatccaagaggcactgccgctcactctcagtgcccgtggacctgtctcgctggcagccggtgtggcggcccgccccctccaagctgtggactcccataaagcaccggggcagtggtggagggggtgggccgcaggtgcctcaccagagccccccaaagcgggtctccagcctcaggttcctccaagctcccagtgcctcttctcaatgtgccccagctcacagaccctacagccctcctttcttcagcctggccctggcccaagattcctctcgaccctgcgccgcctcccctcaaagtggctcctgggagagtgatgctgagtccttgtcaccttgcccacctcagcgccgcttctccctgtcacccagtctgggcccgcaggcaagccgcttcttgccctctgcccggagctctcccgcatcctccccagagctgccctggcgacctcgaggtctccgcaaccttccccgaagccgctcacagccttgtgatctggatgcccgcaaaactggggtcaagcggcgccacgaggaagacccccggcgtctgcggccttcgttggactttgacaagatgaatcaggtgggaccagcaa

SEQ ID NO: 117670 - DNA, 1088 bp, Homo sapiens
gctatgtcttcttaagcctctggccctcagaggctcctccctatctcctggctagttaccactaggctaccaggtctctaggggcctgagagaggccctctagagaatccagggaaactgtgagcccaggagttgcccatctatggtttcattcctcccctggctcttctccctcttcaggccataatttccctggtgccaatttcttttcctcctggggcatcctcatcccagggctctctgctgtagattggctgtgccagcttccaacaggttactggcaatgccagtgagtttctgtaggccctaagctgaagaagtgaggcagtgattctgcctccatcctggtttccccaaagccccagggcaccatccttaggggagaaggtctacagttatcattattttaattccattactttcagtctggaaaactaagctagtcagaactgtcatcttgcttcccaatctaagaacctgtggccctggaacacttttcaagaattggttcattttgctttacacagtagatctgttccaacagttctgtgtaaaccaaatgctatttttcaatgcatttggactgctgaccatttaaaagcagcctatgattgcttctttttgtaaagcaagcaacctccctccactttagctgttttgactatttgaattttcacatattgggcttacccagagtggagcacacctccagggcatgtggctgacactgggtcaatgtctgcatctgtgctgtgtgtgtagtgtggttggccagtaggtgagtatccctgtgtgtgtgagtgaagccactccccaggctggtgctctcctcctgtgcccagtgactgcccagtggcagctcagctgcccttcactcccacctgctgccaaagtccctgtgctaatgggattacaaatacaaaaagtggaaaaaaattttcgtaaactttgttttatattaaaagaaaaatccataagtctgtgtgtgttaaacatgaggttctgcctctgtggctgtgtttgaaaaaataaagttttattagaataatccattttcccaagcaaccttgtgtactacagtgtcttct

SEQ ID NO: 117671 - DNA, 1040 bp, Homo sapiens
cttgccggcatggcttccgcgtcggggtgtgcgccccggtttcccccggggggcggccagggcgtccggagctgctgcttgcagccagcaggccccgcctcctgggcgacccttttctcggcgttccccccaacacgccttcggagcaggctctcgaatcttgagctcccgggagcctcagagttcggccagtgttgccgctgccctctcgaagacgcggacctgtggtccccagcctctcccaggagacctgcgccctgttccttttctcccagagccccaagtggggcgggaatgtgggcagttatgggaggcacggaggctgcagttggagctggtcggggcttttttatctggcagttacttcctcatctgagctgggctcggcctggcggtctccagaaaggccagctctcggcactgtctcgagctctcctctcctttccttaacgcttctgggtgacaggagctgcagttgtggctgtttttgttaagtttgagatctttcttagtggccgaacggggctgctgggtagtgctttttgctcccagctcagctactcccccaaccttgggagaggttttgttttgaaactttgtgtttgggcttggccctttttgaatgccttggtgtgttttgtgattaaagttgttcagtcatacaacttaactagcattcgggatcatgatgtgttattctcgttaatgtggcggtaaaatatagtgtttgagttttggcaagccactttatttcctcattttgataggggccctagcttctctggtgagataaggctatgaaaaatggtgtgtgtgcgtgttggggcagggggtggtcttttggaatgtaatagatcagcaagcagaaagtaaattttcttgatgaacttgcttttgcagatataaacgggaacgcagtttgtgagatttggaagtaatgttgtaggcttccgatgttcatttttcttcctattgatcaacggtgttagactgtcctttttcactaatatacaagctttatggattttttttgtggatgg

SEQ ID NO: 117672 - DNA, 1362 bp, Homo sapiens
gtcggcttgctgcaacctccacctcccgggttcaagtgattctcctgcctcagcctcttgagtagctgggattacaggcaagtaactcggattacaggtgcctgccaccacacctggctaatttttgtagttttaatagagacagggttttaccatgttggccaggctggtctcgaactcctgaccgcaagtgatctgtctgccttggcctcccaaagtgctgggattacaggcgtgagccaccacgcccggccattaatttccatttgtttctaagggacttgcttcactaactccccacctgccaagggttcattcccttttttttaaatacacagcttcctgggtctcttctccaacttgtagtttatttatttagttccccttccaccagcagactcaaaatggtgggtaagaaacatggcattttccattgtgattttctttgcaacagctggggtgggttctatataggctttgcttccacaaggcctgggggatgcaacacctgttgatgcttctcagttttccactgcctttgacaggttggtggtttttaagccctttccactgtaccatccctactgcccctggtgcgaaagcatcatcttttgctcttgatctctaggtgggtaaaacctgcctgattagtagtgattcagatagtgtgacctccttcagttttctaagggctgaaactcctttttttttttttccttttttcatgacttcagaggtaatcaggctctaggggactgattctctctaaccaaactctggagactgaattgtaaatccacatgcaaggttattaatttacagtgggaggtatacctatccagagatctgcatagagccccttcctgctctgctctagagaccaaattactataagaagggtccttgatgtgcaaagaattggacaagggaaattgggtgttgccaaaaggctgtttaaagcaagcagccttgattttggtgatccttcacttttctagtattttctggcttccgttgctttgttccttctttaaacttttcttttaatgctgtcatccattgaaatcctatacagagaaaagaaagcctgctcatccttcaggcccatgcatcctaggagctacaaaccctataaagcctttctgattccccagcatgttgtttttattctttgttcctttagcactttgtggataccactttttggaatatttattgtagtttttcttgttatagatatgtgtagcaagatgtatagcttgtgaagaagttcaggaaacgccaccccaaaatatgctgcattggatctcaaactgaaggcacttggggagcagcagatggagggctgtctctgaacttact

SEQ ID NO: 117673 - DNA, 1092 bp, Homo sapiens
gagaagctcttgtataataagtgcatgtgaggtctcttcatgacttttttataggctatttatttatgaaatggtaatatgaattaaccatgcatatttatgctgttaattattttataaatttcacaaagatttcaagagttctgagatgataacagtataactctttattctgggaatttactataatttagctcccttgaagcctaataagattagcctgatccctaggcagaattaggagaatttctgattcctcttgtcctttttagccaataagagtattgagctgactttctgcattagttagcttcccatgactatttgaggggtagatgctaggttgggaatgtttccaaggacttatgctttagcttatctgtatttactgggatgaaagatataataattatttctttgaagttagagatttgtttgaattgctgtttttttattcccaagttctaatcaatttcttgtcattgtacttcacagacttttactccccttgtagataaactgggtttgggttctgtggttccagtggaatatcttctggatcgagagcttcggttcctgtcagatgccaatgggttgcatctgtttcaggtatttaacacttgctttagtcttgagcctattatttttttcgctgctaatttctttgttgatataaacataggtgtttctccttttactgggtgggaacatattagcatttcttttattacttcctccaataaatatgctgtgccttttttattttattttattttatttatttatttatttttttttgagacagagtctcgatatgtcccccaagctggagtgcagtggtgcgatctcaactcactgcaacctccgcctccccggttcactccattctcctgcctcagcctcccgagtagctgggactacaggcgcctgccacaaagcccggcttatttttttgtatttttggtagagatggggtttcaccatgttagccaggatggtcttgatctcctgacctcgtgatccgcccgcctcggcctcccaaagtgctgggattacaggcgtgagccaccacgcccagcctattttattttt

SEQ ID NO: 117674 - DNA, 1035 bp, Homo sapiens
ggctggatgacttataggtgggatgtttgtttttgtttttttctttttttttttgagatggagtcttgctctgtcacccatgctggagtgcagtggggtgatcttggctcactgcaacctccgcctcccgggttcaagtgattcttctgtctcagcctcctgagtagctgggactacaggcgcacaccaccatgcccagctaatttttgtatttttagtagagacagggtttcaccatattgaccaggctggtgtcaaactcctgacctcgtgatccgcccaccttggcctcccaaagttctgggtttacaggcgcgaacgaaccaccacgcctggtgatctttggtttttagcagcagatgttgggtcttccttttttggtattaacatgatattactgttttctttgctagcagagtccaattattttttatagttctgccaagttttatagtaaccctttttagagatccatgatcacctcatctcctttaagtatgggtgaatgaacaagaaagaacagagttcactgattgtgatctgcaacagtgaaaactgggtggtgatagagattgagaaagaatttaaaagcttttaaaaatcaaaagaggccgaggcaggtggatcacctgaggtcagagtttgagaacagcctggccaacatgatgaaaccctgtctctactaaaaaacacaaaaattagctgggcgtagtggcgggcacctgtaatcccagctacttgggaggctgaggcaagaaaatcgcttgaacacaggaggcggaggttgcagtgagctgagattgtgctattgcactccagcctgggtggcaagagcaaaactccgtctcaaaaaaaaagaagaaaaaaatcaaggccaggcgcggtggctcacgcctgtaatcccaacactttgggaggccgaggcggctggatcacgaggtcaggagatcgagaccatggtgaagccccatctctactaaaaatacaaaaaaaattagccgggcgcggtggcgggcacctgtagtcccagctact

SEQ ID NO: 117675 - DNA, 2007 bp, Homo sapiens
gttagagaagatgtcctatttcagtacttaaaatgcaagtttctttcaagcaaggaggtaaatatgtaataaagtgagttatttcatcaaggggtaaatgagctcccaccctagctttagcactctattttgtaaaagaaactcaacaaattgttaaaaccctcaaagaagtccatttaaggcagtgtaatgttttatttaagagaaagtttgccaagtgagttaacctctagtaactattatcttgaatgtgtgtgtataaattgagtcacacaaagattagagcttttaacaaaggggatgttttagaactggcattggaacttggcagtctatgcctgctttgtctgcttctagagatgggaaagagctaatggtgtgtggtattcacaggatgaaagtttccttgtaatcttttttgaattttgttttgtaggggggtacgttaaaagcagtaaaatcttccaaaggaaagaagaagagagaaagcatagaggggaaagatggccggaggaggaaaagtgcttcggactctgggtgtgaccctgcatcaaagaaattaaaaggagacaggggtgaagtagacagtaatgggagcgatggaggtgaggcaagccgagggccctggaaaggagggaatgccagtggagagccagggctggatcagagagccaagcagccaccgtctacatttgtcccccagataaaccgcaacattcgctttgccacttacaccaaagaaaacggcaggactctggtggtgcaggatgagcctgtaggtggggacacacctgcatctttcactccatattctacagccacaggtcagacacctttggccccagaggtgggtggagccgaaaacaaagaggcaggaaaaacactggaacaagttggccagggcatagtggcttccgcagctgtggtcactaccgccagctccaccccaaacacagtgaggatctcagacactggccttgcagcagggactgtgccagaaaaacagaaaggcagccggtcgcaggcctcgggagaggtgagttacttcaggggcagatttgcaagatttgggtttactctttcgccctcctttattgctaacattaaaaaacattcaagtgccccagggaaggagtatttctgagatgtgcttaaattatactctgtggaaggcctttactgctcactgggcaaatgtgtatagtttaataactttatcagctcttaaaaggcaccagaacagttgggtgaatcaaaaactgatgatacaacctaatttaaagacatgttaaagtagatctggtggggaatgttttaaattctattatctatttagttcacgtagtgatcaagcctctgctaggcctataagaggtgaggttaatgaattacagtattggtaatagtgaatactataattaaggctatgtgtgcaagctaccattaccctgttttcaattcatcattttctatgatattttcccttgaggctgagttaatttccatcatttgatatggccatggaaggttttttctccctatcttcacctttttaagccttacctgaaaatttgatggatttcatcacaacagtatctgatttcctttgttctttatctgatatgcatatattgttgctaaaatggaacctctgttaaatgtaagttaacatcaagttgtctccctaatccaaaatatcaaaatcagtataatatattctttttgactaattttggtcaccaaaatatgatttatggtgctagtcatcttttttttccccaaacagctattaactcaagctaaaatatgaaatacagagatgaaatgcttaatgatttttaaaaattatatataggaaactactgtgtgctgagtactgtatattatatataaggaattgaaactcctatttgaaggagctcacatcctaaaacggaatcatttcagaaaaaacaatgccagacaaaacatgacaaacgtgacttctttccctccccaacaagtgca

SEQ ID NO: 117676 - DNA, 2255 bp, Homo sapiens
ggttgacttgaacccataaatagatgccgaaatccaaaagggtccatgttgtggactttcagattaataaggaaaacacttttctttaacgtgcagtaggcttgtcctaggattaaagccactttttgtaaaatgggcaattttacagtagcctaaataaatcaaaactttaacaatagctcccaaggtcattgagatatattaatattacaggggtcactgtaaaagctgatgtctattcaggaacccttttctccagttccttagaggagctcttcacttccaaatagataccaaaaagcctacaaggccttctagcactgtgacgaccaattggataacaaccaagggaattgcaggatgaatgacatcctgctatctctggttcaccttgctaaagatgccctcagtgtagtctgtggcagatttcttccccactgctggtgaactccagttacaagagcagatccatggaattgtaaaagagaaaagttgatggacccccaagaaatgttgatctggtgatagtgaggtccaagaaagagatcattagattgtcatgagaagccagcatcactaattcaggctatcttcctttcagaattcaagaaattctattctggcctcttctggatttggagcacctctccctagttcatcgcaacctttgacttttggaagtggaaggagccagtccaatggtgttctagccacagagaacaaacctttgggcttctcttttggctgtagctctgcacaagaggcacagaaagacactgatctctccaaaaacttgttttttcaatgcatgtcccaaactttacctaccagtaactacttcactactgtttcagagagtttggctgatgattcttctagtcgggactcattcaaacaaagccttgagagcctgagctcaggcctgtgtaaaggcagatccgttcttggaacagacactaagccaggctctaaggctggcagctctgtggaccggaaagtgcctgcagagtccatgcccaccctcactccagccttcccacggagcctcctaaatgcccgtaccccagagaatcatgaaaatctatttttacagccccccaaattgtcccgagaagagccttctaatcctttcctggcatttgtggagaaagttgaacacagccctttcagtagttttgcatctcaggcatcaggtagctcctcttctgctaccactgtcacctccaaggtggcacccagctggcccgagtctcactcctctgcagattcggcatctttagcaaagaagaaacccctcttcattacaactgactcctccaagctagtatctggtgttctgggctcagctcttaccagtgggggcccaagcctctctgccatggggaatggccgctccagctcgcccaccagcagcctcactcagcccattgagatgccaactctctcctctagccccacagaggagaggccaactgtggggcctgggcagcaggacaatcccctcctcaaaacctttagtaacgtctttggcaggcactcaggcggctttctgtcctccccggcagatttttcacaggagaacaaagctccttttgaagctgtgaaaaggttctcactggatgaacgaagcttggcttgcagacaagactcggactccagcaccaacagtgacctgtcagatttgagtgactctgaggagcagctgcaggctaagacaggcctgaagggaattccagagcacctgatggggaagctgggccccaatggggagcgcagtgctgagctgttgctgggcaaaagcaaagggaagcaggcccccaagggccggcctcggactgcccccctgaaaggtgatcctgctggggctatatttgggctttgctctggcactgggctcaaatgcctgtcgtgttcttgtgcagcagaggcactcactttgatggagagttctgtaatctcatagaattacagagccaagaggacctggcagaggcccctcgtcaggcctggttcagggcaggattgcatctaaaccggcactgtaggaggagtatctgtcccaaataatgataatcccccaaaggaggactcttgatcttccttggcggtcagttatttttggtcaggaactatttctttgcatttgtctcatccctttttacttcactttggcccatcctctttacttcagaggggttactgggaactggtatccattcccacatagcagacatttgtagacttgatgaagcaga

SEQ ID NO: 117677 - DNA, 1387 bp, Homo sapiens
agaatcacccctcagtttgctcctctctgaaacctacataaggattttaacagctctatcaaaatccattaacttgtgtggtgtgaggttatggtccagaagcgggtaaaacaaagtctcatggtaaaagcagctgttctcaataggaattgctatgttgtgggagctcaagaggtcctgatgaacagaatagccatatcgtgagagactagaggcaggtgatggctacattctggcttcttatgtttttcacatccatattcaaagttgttttgccatagtggggcacttcccacaagttctgcatggttcttagctcccaatggaagcttctttgctccttgctttcccttcctgtcaaggatggacataatgggtacatgcccaagcagggaaaggagtagcaacccaggtcagaacaaatgtctgtccccaaaagaatcatgctattggttcctgtttacacctcatgacaaacttttcttctctcccccttgccacagttggccagtcagtgctgaaagatgtaagcaaagtgaagaagctgaagcaatctggagagcccttcctgcaggatgggtcatgcatcaatgtggcacctcatctgcacaagtgtcgtgaatgccgcctggagcggtaccggaagtttaaggaacaggagcaagatgattctactgtagcctgccgtttctttcacttccggaggtacccaaactcctgttttcctcctttgctagttttcattagtgacacataacttccactctttctctgagtctataaacatgtttcatcatcttggtctttgctttcctcaactcctttgctctcagcgtctgtgaagaggctctggcatagtagtcacttagttgtttggattgtaaaatgacatgtgattttgtccttggagaattaaaattgagcagtgttagctgcagctctgtgctattccctgagtaattcctaacttgggttggttctatttgaaaccactattataagcagaaggactgcatttcatattatggatctacctgactgcttattcctcctcagtgctagagtaacttgagtcatgttaaaaagacggggaggtaagatttggagataatgtgaagcatctttgaaatagatataactgatggaaatgtgggaatatcgtctgcttttaccaaacaatatctctttagttacttttcttctgcttgataaacttagaaggggagtttcttctgagtgacctttcaagaatctttaatttttaaagtaaatccaaatggtttaccaatatggtgtggattcacttagcaaatgtttattgagcatttaatgtgtgccaacccttgttctggccattgaatattcagcagtgaacaacaaaaaaatc

SEQ ID NO: 117678 - DNA, 1474 bp, Homo sapiens
ggcattgtggcgtgcgcctatagtcccagctactcaagaggctgaggcaggagaattaattgaacgcaggaggtggaggttgcagtgagccgagatcatgccacggcactccagcctgggtgacagagcaagactctgtcttaaaaaaaaaaaaaaaattggaaagtaggtctgtgtttttatctggtcacattcagcagtatgggtgcaggtgtagaacaggtgaatggaaaaactaagaggaactctgggacagctttttaaagaatctagacctactaaatgttatgttaacaagctttactattagcagagaatgcatactgttttggtcgactggtgaaaattcttagtctgattcctgttgtctcattttacttctgtttaggtcccaggagtttaggtgtgtgttagtttgcgttgctcctgcgatttaccatgtatttgatcatgtctcaggttgatcttcactcgaaaaggggtactccgtgtggaggggtttttaagcccccagcaaagtgaccctgatgccatgaacctgtggattccctcttcctccctagcagaagggatagatctagagacctcaaaatacatcctggccaatgttggggaccagttctgccagctcgtaatgtctgagaaggaggccatgatgatggtggagccacaccgtaagtcaccttctcacttgtcttccaggtgctcctagtgaaaaacttttattttctttcacttaacgggaagattggggacagtggcagatggcattttctgtgaatgaattaagaccgataagacttctctttgtagcaacctgtcgttgagaccttaactatatccagcagacctcattctttcagtctttggcaattaacaaaccaaatactccttctctgcttgcctttgtttttgtagcacagcagccataacatccatttaaattcccatttgggtttgcctcactctgaatattttcagtttgctttgaaccaatttgtattaataagctctgtggtttgtaaatagatggtgtgctactaggtgccatgtttcatacctagaacccacattattcatacatttcaaatatttccatgtctgtaagatactatgccctattttccagactaagaaaaattatactgtgaaattatatcctaaatttctttttttttttttttttttgagacggagtctcgctctgtcgcccaggctggagtgcagtggcacaatctcggctcactgcaacctccacctcccaggttcacaccattctcctgcctcaccctcctgagtagctgggactacaggcgcccaccaccaagcccggctaattttttgtgtttttagtagggacagcgtttcgccgtgttagccaggatggtctcgatctcctgacctcgtgatctgcccgcctcagccttccaaagtgctggggttacatgtgtgagccaccgcgcccggccctgta

SEQ ID NO: 117679 - DNA, 1179 bp, Homo sapiens
gtaatcccagcactttgggaggcagaggcaggcagatcacgaggtcaggagttcaagaccagcctggccaatatggtgaaaccccatctctactaaaaatacaaaaattagctgggcttggtggcgggtgcctgtaatcccagctactcgggaggctgaggcaggtgaatggtatgaacccgggaggcggagcttgcagtgagccaagatcgcgccactgcactccagcctggatgacaaagcgagaccccatctcaaaaaaatatatatatatatttttttacaattccttaagtgacaacatgtggcagtaattcctttttgacaataggttatatcctggtattaccatgagcccttgaaataccattatattataaataagttatatagtctctttgttcagaaatactagaaattattgtattttgtttctcctacaattatagaaacacagactttatgaatctttgagttttattgctgaacaaaatagcttgagtagggatcagtgggtctggggtcttttgttattggtcaggatgatcaatgccaattctgtttcctctttccaccagagaaagtggcatggaagcgagctgtgcgtggtgtacgggagatgtgtgatgtgtgtgaaacaactctcttcaacatccactgggtttgtcgcaaatgtggatttggggtctgccttgactgttaccggctcaggaaaagccggccacgcagtggtaagtaaacattgtcctgtgtagctcgaaaggtaacgtggaggtatgtccaagatgttgtgggatttgaaaattgaggcaggaatgggcttatgcctctctttagctgcttggcttcattcaactttgttgtattttaagaccttaaaatggcaaatatttagcctaggaaggctgaaacaagacaagaaggattattcttaatttttccttggttttttttttgtttttgttttttttaaggcagattctcgctctgttgcccaggttggagcgcagcggcacaatcatggcttactgcacccttgacctaggctcaagtgatcctcctcgacctctcagagtgctgggaatcataggcatgagccaccgtacctgtgtttttttttaaataacatctttattgagatgtaattcacatgccataaaattcaccccttttaatgtg

SEQ ID NO: 117680 - DNA, 2020 bp, Homo sapiens
gtcataaaaatagaatcagccaggcgccatggctcacgcctgtaatcccagcactttgggaggccaaggcgggcagatcacaaggtcaggagttcgagaccagcctggccaatatggtgaaaccctgtctctactaaaaatacaaaaattagccgggcatggtggcgcatacctgtaatcccagctactcaagaggctgaggcaggagaatcgcttgaacccgggagacggaggttgcagtgagctgagatcacgccactgtactccaacctgggcaacagagcaagacttcatctcaaaaaaaaaaaaaaaaccaaaacatacactattgtgtctagtctagtgcatagctaagtaacttgctaaacagtttgattcttccaaggcttgctttacactttgttatgccttctgtgactagcccttttcacttagtgtaatgttttaaagtttcatctgtgttttagcacatgtgaaccattcattcctttgcattgccaaataatactccttttttggatatacttcattttgtttattcaccagttgatggacttttgggttgcctccgcatttggctattatgaatagtgctactgtgaacatttgtgtacagtttttttgtgtgaacgtatggttgcatttctcttgagtatatatatacatgtaggagtggaattggctagggcatatgacaattctacttttaaccttttgaggaactgccagactatattctaaagtagctgcactatgttacaatcccaccagtaatgtatgagggaattttccacattcttgccaacacttgtcctttgtcttttttgttatagccatcacagtggctgtgacgtagtatctgattgtgtcgttttgatttgctttcccctggtgactaacgatgttgagtatctttccatgtgcttttttttaacttttcttttttctttcttttttttttgttgttgtttttaagaaagggtctcgctttgtcactcaggctggagtgcagtggcatcatcatggctcattgcagcctcaaccgcctgggcccaagcagttctcccacctaagcctcctgcatagctgggactgcaggcatgtgctaccgtgcccagctaattttttttggtagagatggagtctcgctacattgcccagtctggttgctaattcccaggctcaagtgatcctcctgccttggcctcccaaactgctggaattataggtgtgaatcactgtgcccagccatttgtttattttcttaggaaaaatgtctattcaaattatttgctgcctttggttcttcctttatcttattacgtgccagaaaccctccttgccccttgactttttcattcttccctcttcggaggtataatataaccattgtacagtggtttagagtttaggctactgtgatgtggcacctatttctacctcttattgtaccaactattgtatcttgggctagttacttaatcctgcagagcctcagttttcttgtctgtaaaacaaagatatcagtacttccctcacaactttgttgttttgaatgagatgttgtatgtaacatggttagaataggacctgacacccaccaggtattccataaatgttagctgctagagtattctgcacctgcccatgaaagattaactgtcacaggaattgccctcctgccataaacaatgagaaaactagataaaatatatgaaaccacagtttttgacattgaacaacaggcaacatgggactgttatctctaagagaagggaaaaaaccaaggtgatccctacagttgccctggcttactgcttaggcacagtttctaggctacagcaagggaaagagaaccaaaactgaaactggcaaccttactgactagagacagagatgacagtctgagaagagtaaggcaaagtgctgaaaaggctggaactctctacagagacagccccttggttttttgtatatatagtaatctgtgcatgaatgagatgaagttcctcaaagccca

SEQ ID NO: 117681 - DNA, 1057 bp, Homo sapiens
caaagtgctgggattataggcgtgagccaccattcccagccatatacaagacttttaacaagcttctgagatggttctgttatgcagccagggttgagagctagacttagagcagaagttttcactgggcacaagaatcatctggggaatggttaaaaatgcagattcctgtgtcccgcccagaactatgaaatcagaatctctgggggtaaagatctccatttttaacaagcactccaagtgacttcagtacaggtatcctgaagatacacttgaaacactgtcttaggaagtgagggagatgaaagatggatgacaacaaaagggagtttgaaattcagatctggtaaagaagtagtaggagagtttctccttggctgtgagacctcctataattatagcttgtaaggcttgacccaaacaaaccatacacagtttggggggtgcaagggaaaggagagaatctttcctccttcccatgtgactgatttttaggagtcagttgtgtgctgattattcctttttgtacctaatgctgttcctggttatgttcttacagaagcagggtccctgaggtcggtgctcaataaagagtctcattcaccctttgggctggactcgttcaactccactgcaaaggtctctccgctgactccaaagctttttaacagtctgttgctgggtcccactgcctccaacaacaaaaccgaagggtctagccttcgagacctccttcactccgggccgggaaaacttcctcaaacccccttggacacaggcataccctttcccccggtcttctctacatcctcagcagtaagtgtcctctgcaactgtagccttttcagcttttccatgaaagaaccatcagagatcagataattgggttagagggtacatgggtgatttgtgttctctacattgtcaagctgacaaggtctctctttaaagttttgggaatctttttaagtagtgaaccttttgtaccatgttaggaagtctgtaaaagttgagattttgaaatgtttcggtcatcagcagaaaagttaatacattg

SEQ ID NO: 117682 - DNA, 1372 bp, Homo sapiens
taccttcagttctgtgaccttaggtatgtcactttcatctctgggcctgagctttcccatcagctgaaacaggtgagtgattctcagtgggatggtagtgaggaaaaaattggagagtaggagactgctttcagaatgtacttcctcttggacactctgctacacccttcattgaggtactccctggtagaaaaccattgccttgataagtcacttcagttacttaattgaagtattgtatcccttgggcatgctggttaggaaaaatttagaaccctcaaactgagtgacctttttacactcagttacagcatttgatgatccctacagtctacatgcatgtgtgctttgtatactgaatggctgatgccaaaggtatttcttaggtctcagatctctcgaggcaaaagggatctttctatacttttctttcctaaatgttaaggtaaaatatgaaggataaaagaatttaagatgttgacttattatcccccttccagttgtaaaagacattttaataatttttgtagaatttaatcagacaggtcagaactccttgtgaatacaattgtgagacagttttttgaatgccgttctcatggtgcctcagtcaagcttacctggtggatttgtgtctggcagggagtgaagagcaaggccagcctacccaactttcttgaccacatcattgcctcagtggtagaaaataagaaaacctcagatgcttcaaagcgggcctgcaacttgactgatacccagaaggaagtgaaggagatggtgatggggttaaatgtgctagatccccatacttctcactcctggctttgtgatgggaggcttctgtgtctccatgaccccagcaacaaaaacaattggaagatcttccgggagtgttggaagcaaggtcaggtaagcaagaataagtcgttccaagggccaattctctgcctgcctaccacagatacctggacaattccaggtctctctttttgccagggagatttagacatagtgaggttattgtaatagccttgctacttcgagttgtcttggatttttaaaagcaaggagatggccaggcactatagctcacgcctgtaatctcagcactttgggaggccaaggcaggcgcatcatctgaggtcaggagtttggccaacatggtgaaatcctgtctctactaaaaatacaaaaaaaattagctgggcatggtggtgggtgcctgtaatcccagctgcttgagagggtgaggcaggagaatcactttacccgggaagcagagggtgcggtgagccaagatcataccactacattccagcctgggctacagagcaagattccacctcaaaaataaataaataataaataaata

SEQ ID NO: 117683 - DNA, 1875 bp, Homo sapiens
aaaataaatgaataaaaaattaaaaacagacagccgggcgtggttgctcgctcctgtaatttcagtctttttggaggctgatgtgtggatcacttggggtcaggagttcaagaccagcctggccaacttagcgaaaccccacctctactaaaaatacaaaaattagctgggtatggtggtgtgtgcctataatcccagctactcaggaggctgaggcaggacagtcacttgaacccaggaggcagaggttgcagtgagccaagatggcaccactgctctccagcctcggtgatggagtgagactgtctcaaaaataaataaataaataaatccaaattatacccacttggtgggggaacattctgccctggtgccaactgtgtagcttacatggcaatcacatgactcccagagcatgcctggacttaatcatgtgattccatgggctatgcagagcactttcactctgaggaatggggatagaatccccgtaagatggaaaaataagacacacactaaagtagcaagtgaggaaaacaaagcccaccttgtccattatgggggtttacaagtctgaaataaaaggttaatctcccagggccaggcacggtggctcacacctgtaatcccagcactttgggaggccgaggcgggtggatcacaaggtaaggagatcgagaccatcctggctaacatggtgaaaccctgtctctactaaaaatacaaaaaaattagccgggcatggtggcagacacctatagtcccagctactcggcaggctgagccaggagaatggcatgaacctgggaggcggagcttgcagtgagccaagattgggccactgcactccagcctgggcaacagagcgagactccatctcaaaaaaaaaaaaaaaaaaaaagattagtctcctaggctgggcgcagtgccttacgcctgtaatcccagcactttgggaggccaaggcaggcagatcatctgaggtcaggagtttgagaccagcctggccaacatggcaaaaccccgtctctactaaaaatacaaaaattagccaggcgtggtggtggttgcctgtaatcccagctactcagggagaatcgcttgaacccgggaggccaagatcatgccactgcactgcagcccgggtgacagagcaagactctgtctcaaaaaaaaaaaaaaaaaagaaaaaaaagagattagtctcccaaaagttactgttgaaaatcggacaccagccaaaccagcagatgtttgtgggagtattctctgtcttccagaacgactacggtcagaagatgggcagccaatggtgctcaaactcaaggactggcctcctggggaagattttcgagacatgatgccaaccaggttagtgacctgcagtggtgtcatcttcagaagccatcacaaagtaatcacagaaaagtgaaatttgtctattggctttcttcccctataacaagctaagtcatctttcctgcacttttataggtttgaagatctgatggagaaccttcctctgccagaatataccaaacgagatggcaggctcaatctggcctctaggctacctagctactttgtaaggcctgatctgggccccaagatgtacaacgcctatggtatgagggagaggctaaaattgctcttttgggggactgttgttcttatttcaactatagaaggatatctgtggtcaatgtcaggtatagagatgattgcaggcaagtgctggagaagtgaatagtatccaaggtggtcttgaatatgtttgcttttgtcatattggttttcataacatccatgtgggcccagaccataagcttacatgtctccagtagtgaggaagtttcctgttaagaactctaccca

SEQ ID NO: 117684 - DNA, 1679 bp, Homo sapiens
ctttgctggagcagaggcccttcacccagagccagtgtggtcagtattccaaactctccagccactctcttctacgctgcctcaacactgaaggttgacacaggaaagtcgtactgttcacacacacagtttgagactccaagccaagagtgccacatccctatcctgtggccttttggaaatccaaattgcctgaacatggcggggctttcctgcacattctcctgatttgagattcacgggcacacctttcttttcttttcctcttgtgcctagttaagtggaaatgtgtttggagataggggaaatcacataactggtacaagtatggggtaattgcttaaacatgcctggtggaagtctgatagcgtctctgcacgtgacctctgacaaagcccatcccaggagacggggtgaagctattccccacactctcctgtgaacactggagtcttgcaagacccagggagaacccactgcttttcccaggaggctccaggattaggaaatgtgtgtatttagtgaaaaataggtttgtagtgaaatagttactatttcatgaaagtagatatttttagaatttttgaaataccacagttgttttcctggattataaggaaaggcacattacatttagtcttcctttcgatataaaactctttgaagaaatatgatttttagaaatcagctacccattatagcacaaaatcagccaaagcagaatttttaaaaattggcttttttaggattctttttctccccctcccatcttagtcttaccttgagggaacagtcatatgagaaggaactttgtcacatctaagctgtggtgtgttccccatgtgtgtgtacaacactggtgactccaggaaccattttcacctattaccagtgttccctggggactcctcttaatgtttccaaatgggaaggacagttgatttccaacatgaggttttttgttttttatccagaaatattttcagcaaaactttccaactgagtggagtctgattaaggatttatttgaaaatggtgggattcattggcccataggtacattggaaaatgtatatctctccagctgtactgtagtgccctgcaggctgtttatatgttcacagttacttttttttttttttttaaataaaagtcatttaatgtagaatacttttaatttcactttctgtattttaattttgttgaagggctgattgggatttccatgttcttattaaaaatctaacaaatctgtttggagtggactaaattattcgtgtaccaacccttctaaaatcaacatcagattgggagttgggttggaggtgggggattcatttccaggtcttcatgactgtgctacacccagatatttttctttgcttgttgagactgtgccatgttagaaaaaaggaaagtgccagggtgaggtcagtatggtttggggaattgggggtaaggggaaggggccacatgaattagagggtagaaagagagacatgtttccccatactttatgctttgtgaatggagtgggaaagttggggtcctcccttcctgtggcagagtctggggggaagggtcatggtgtgtggcctcagcaaagttggacagtctgtggtgggattcttaagcaggcagcctggctgcctacatgaaacgtgtggccatagatccac

SEQ ID NO: 117685 - DNA, 1146 bp, Homo sapiens
tggccactcttctggaaggggcttggaaaagaggaaggaggcccagctgtgggggttgagggtagagggtggaccagaggctgaggactgagccacccaaggaggtggggactgctcggcctccaccgctgttccgctgcagccccgccctgccccacccacccagtgccttgctgaagcccatagcaatccgcttctcagaggtcctgtcgtgtttccactgctcgccttggtttgggagcagggagggggaagtcctagcccagatggaccaaggacgggcctgaaggcacatgggggaaagggagcacacggggaggacgttggggaccctgggtggggcctccaggtgcagctgtggatggaagacagggattggcctgtgcttcagcgaccaggatggccaggccagagctgcagctgggggctcttttcctggtcattgggtggggctgagtgccacatgttcccacattaaaaaggggggtccagggctgtgtgagtgtgtctttctgggtctagggctcggggtagtttgggtcaaggactgtccctccagcagtcgcctcctcccaccctgagccccacagtcatctggccctttccctgctcaaccctccatcctaggctctgagcctcagaggacccagcccatgagagaacggggatctggggggcctctcacctgctcctatgaccttgctcccttttaggtcaccccattgccaccgtgcccctgggctggactcccgtgctcctcagggcccacccctgctctgtctggtacaggcccctgctgagtgggcccctctcctctgcccctggggtccatcccctcttgcccagggtccccatcctgtaccaagcagactgggccctaagacccctggcagaacccagcctctgctcacacccgccccagcttctgccacggcttcagtcagggccaggaggaacacgtgaaggagaaagagaaatgcaggagccgcggggctcccggttccttgggaagagggtgcccattggacctttggcactggatgagccaataaaccaaactctggcacctcatttattttggcctctgtgctttgttcttgccacaccagctgacaggtgggaaggacctcaagtgagaagcagggt

SEQ ID NO: 117686 - DNA, 1003 bp, Homo sapiens
ccaggagagagggtggggtctggatgcatcagcaccggctatcacaggggctcctgcaggggcctcctaggtagagacagaaagacagccagaaaagctgacacccacaccgactgacaagctgcccagcccaaaggagcatccatctccccgggtacagtggcagcagggtggttgggaggctgatggaagggccctgtcattcttccttcctccaaccatcttcctatcaactccctccatatgggaaccctgttttaagccaaagtcaacatgcgtgagtgagaaggaagctggcgcccagcacaggagagagagagcgcttccatccacgatcatgctgacaaatagccataagggcaggagggtctgctcctgtccctaggaacatcctcagaaaggtctcagctatactcccggcagaggcagcacttctcttcctaaaagcaggcacaggaaggggtctagaacttacaggatccagtttccctctggtccagttgcagagagggctgttgtggcaggacacaactgtattttttttttttttgagacagagtctcgctctgtcgtctaagctggagtgcaacggcgcaatcttggctcactgtaagctccacctcccaggttcacgctattctcctgcctcagcctcctaagtagctgggactacaggcatgtgccaccacgccgggcttattttgtatttttagtagagacggggtttctccatgttgggcaggctggtctcaaactcccgacctcaggtgatccgcccaccttggccttccaaagtgttgggattacaggcgtgagccacagtgcctggcctaaaattttaattattaatgtttatattttattgtaaaatacacaaaaatttacaatttgaaccattttaagtgtacaattcagtggcattaagtacattcacactgttgtacaactatcaccactgtccttttcagaactttctcatcatcccaaacagaaactctgcacc

SEQ ID NO: 117687 - DNA, 1332 bp, Homo sapiens
gagtagatgagacggctcacacttcagcactccaggacgatcctccctctctctcccttgtcttcctcatgctgccccctctcacccaccccctcagggcaccttctgtcccatctcatgcctggcctcctcaggtttcttctcacccctcaaagccctccctggggtaggagcagaactgccccagacccattcaaagcccatcagccttcggctggaaagtcagtcggaaagtgtgacaggtgccccagacaaaccccaagagagtcacttcctgaggcccgggctggccacgtgcaaaccacggcctgaacagtgcacttgggtgctgacgtagcccagggctggggaggaggaagcagcaatggaaaaaggggcttgttttcctctgagagctgcagccggctcagccctgggtcgagtgttggagatgggatggttccactggctttctcctggagcctcagcggccttgggcaagctcaattctctctcccctctgcctcttcctcctctcctgtttgcaaggaaaggtctaagtgcagatatcagctgagggcctcttaccttttccccggcttctggtatcagtcacttggccagaaaggtctgagagccccaggtcatccctaagcacccttgaggcccagtaggcccctagaccagggtgcagagtgactcggagccttccttacctccaacatggtttcctgcaggccccaggctggttgtttcatctgggctgttggtcacaagtggggtgctcactagccccaactgagatttggctcctcgggaggggccaattttttcaccatctcctccctttcctgtccccccaatgacagcaaacagaagtgtgccattggccaaaatataagaccagaggggagtgaggtggctcagatgccccagccttgtgactgagaagccaggtcagcggcataaccctatctagggaggtgactttcagcccttttcatgacaggctaaggcctgggcagcatgcacggttctgagctcagctcctcccaccgttcctaggtggaagctgccttccaggggctcacaccacaggggctgggcagggttgggaagggccaccttctcctctctatgagctgtgaggacagaacaagggagagagggggtggactggtacatttggctctgcacaattcttgctgtccacaccttcacctgaggccccagaaagatcacagccagactcccttccctcctgaggcctttgcaaggctggccctctgcctgcaatgctctccccaccacacccctctatgcagtcagtttcctctcctcttttttatcttt

SEQ ID NO: 117688 - DNA, 1068 bp, Homo sapiens
ggcgctgtcggatggggggcttcacgtcactccgggtcctcccggccggtcctgccatattagggcttcctgcttcccatatatggccatgtacgtcacgacggaggcggacccgtgccgttccagacccttcaaatagaggcggatccggggagtcgcgagagatcccagcgcgcagaacttggggagccgccgccgccatccgccgccgcagccagcttccgccgccgcaggaccggcccctgccccagcctccgcagccgcggcgcgtccacgcccgcccgcgcccagggcgagtcggggtcgccgcctgcacgcttctcagtgttccccgcgccccgcatgtaacccggccaggcccccgcaactgtgtcccctgcagctccagccccgggctgcacccccccgccccgacaccagctctccagcctgctcgtccaggatggccgcggccaaggccgagatgcagctgatgtccccgctgcagatctctgacccgttcggatcctttcctcactcgcccaccatggacaactaccctaagctggaggagatgatgctgctgagcaacggggctccccagttcctcggcgccgccggggccccagagggcagcggcagcaacagcagcagcagcagcagcgggggcggtggaggcggcgggggcggcagcaacagcagcagcagcagcagcaccttcaaccctcaggcggacacgggcgagcagccctacgagcacctgaccgcaggtaagcagtggcctacgccgagggggaaccctttcgccaccatcctggcgtcctgtccttcaccgcaggagtgctcctggatcttagaatgagagccgggtttccctttcattcctcgcatccccagagtcatgtgttagagggatgccaaggaaccccacacagcccaccccctgccctcatccctagcggagcgcagaggaccgagcttttgttttggatggagagctctggagctgcgtgggtgggtggagggggagggcttgttttgatgagcggggctgcgccccccacctccagtaagacttgccttgccttg

SEQ ID NO: 117689 - DNA, 3401 bp, Homo sapiens
tccttggccgtggatgtcccggcagcccgggtttgggggcgcgcactagccgcggccatgggggtgctggcgggaatccctcgcccgcacagccgccgctgcggagcgctgcgagctgcagtggagggggattctccgtatttgcgtcagctgttgttgaaatgggctctgccactggtgcgggtccaggaacattgcaatgtgctgctatcaattattaactacctcgggagtcaatggtagccggcccggtctcttgcctggcagctcgggtcgtcctcgtcctccagtgattgctttccagtaaccaggcctcccgcttctctctctcctgccagagtcttttcctgacatctctctgaacaacgagaaggtgctggtggagaccagttaccccagccaaaccactcgactgccccccatcacctatactggccgcttttccctggagcctgcacccaacagtggcaacaccttgtggcccgagcccctcttcagcttggtcagtggcctagtgagcatgaccaacccaccggcctcctcgtcctcagcaccatctccagcggcctcctccgcctccgcctcccagagcccacccctgagctgcgcagtgccatccaacgacagcagtcccatttactcagcggcacccaccttccccacgccgaacactgacattttccctgagccacaaagccaggccttcccgggctcggcagggacagcgctccagtacccgcctcctgcctaccctgccgccaagggtggcttccaggttcccatgatccccgactacctgtttccacagcagcagggggatctgggcctgggcaccccagaccagaagcccttccagggcctggagagccgcacccagcagccttcgctaacccctctgtctactattaaggcctttgccactcagtcgggctcccaggacctgaaggccctcaataccagctaccagtcccagctcatcaaacccagccgcatgcgcaagtaccccaaccggcccagcaagacgcccccccacgaacgcccttacgcttgcccagtggagtcctgtgatcgccgcttctcccgctccgacgagctcacccgccacatccgcatccacacaggccagaagcccttccagtgccgcatctgcatgcgcaacttcagccgcagcgaccacctcaccacccacatccgcacccacacaggcgaaaagcccttcgcctgcgacatctgtggaagaaagtttgccaggagcgatgaacgcaagaggcataccaagatccacttgcggcagaaggacaagaaagcagacaaaagtgttgtggcctcttcggccacctcctctctctcttcctacccgtccccggttgctacctcttacccgtccccggttactacctcttatccatccccggccaccacctcatacccatcccctgtgcccacctccttctcctctcccggctcctcgacctacccatcccctgtgcacagtggcttcccctccccgtcggtggccaccacgtactcctctgttccccctgctttcccggcccaggtcagcagcttcccttcctcagctgtcaccaactccttcagcgcctccacagggctttcggacatgacagcaaccttttctcccaggacaattgaaatttgctaaagggaaaggggaaagaaagggaaaagggagaaaaagaaacacaagagacttaaaggacaggaggaggagatggccataggagaggagggttcctcttaggtcagatggaggttctcagagccaagtcctccctctctactggagtggaaggtctattggccaacaatcctttctgcccacttccccttccccaattactattccctttgacttcagctgcctgaaacagccatgtccaagttcttcacctctatccaaagaacttgatttgcatggattttggataaatcatttcagtatcatctccatcatatgcctgaccccttgctcccttcaatgctagaaaatcgagttggcaaaatggggtttgggcccctcagagccctgccctgcacccttgtacagtgtctgtgccatggatttcgtttttcttggggtactcttgatgtgaagataatttgcatattctattgtattatttggagttaggtcctcacttgggggaaaaaaaaaaaagaaaagccaagcaaaccaatggtgatcctctattttgtgatgatgctgtgacaataagtttgaacctttttttttgaaacagcagtcccagtattctcagagcatgtgtcagagtgttgttccgttaacctttttgtaaatactgcttgaccgtactctcacatgtggcaaaatatggtttggtttttctttttttttttttttgaaagtgttttttcttcgtccttttggtttaaaaagtttcacgtcttggtgccttttgtgtgatgcgccttgctgatggcttgacatgtgcaattgtgagggacatgctcacctctagccttaaggggggcagggagtgatgatttgggggaggctttgggagcaaaataaggaagagggctgagctgagcttcggttctccagaatgtaagaaaacaaaatctaaaacaaaatctgaactctcaaaagtctatttttttaactgaaaatgtaaatttataaatatattcaggagttggaatgttgtagttacctactgagtaggcggcgatttttgtatgttatgaacatgcagttcattattttgtggttctattttactttgtacttgtgtttgcttaaacaaagtgactgtttggcttataaacacattgaatgcgctttattgcccatgggatatgtggtgtatatccttccaaaaaattaaaacgaaaataaagtagctgcgattgggtatgtgtttcctgggttaggggaaggactctgccctattgagggctgtgaggttttctgaagacttggcctttagagatacaaggatcctccagccagagtcaggcccactgtgtgaaactggagttcgttatttatgaggactgagtatgggtcttcaaatagggtctcggtctatccacccaggctggagtgcagtagtgtaatcacagttcactgcagctttggtgtctcaggctcaagtgatcctcccacctcagcctcctgagtagctgggactataggcacgtgccaccacactcggttaatgtttatagagacagggttttgccatgttgcccaggctggagttcttcttgataatgggcctgttcctcttcagtctgttgggctgaagctttaccttggttagctaaagccaagaaaggcaagagttagggctgggacatgtgtggccaaaggcagtgttactctcctggcatcaaatgttgggccagtcccgtcc

SEQ ID NO: 117690 - DNA, 1029 bp, Homo sapiens
tgggggccattctccctggaagccctgccccttgaaggagacgctcctccttaggcatcttggggcctcctcgccaagactgggccttctccataggcatgcctgtggccccactgccccagtgacctgccatgccctcttctatctaacccagagcataggtaacctcctagaccatcctgtgaaggcagaaagaacctgggggaagtcgaggttcccatcacagccagaaactggtatctaggacaccgtcccctcccacgcctgctgtcagtaccacacccacacatttcaccaagagatgggtatcaatctcagagaagcatttcccaatcctcgcttgctggccctgccctgccctcatcagtcctgcccatcccggagtcccactgaaatctaacctgaatcctcctgttccatcctgctgagcagcagtccgcagtccctgatagattccaggcaagtttgtggacacacaatagatgcatgtcacccacagccttgtttcctttcatccctgtcaggcaaggaggctgtcgttggcatggtaactttccctgtaaaagttgcagccctcaaggatgtttttcaattccagcagggacacagctccttcccgacattgtagactacggggtgacatgtagatgtgtcattctggcctcccccggaatggggacatggagctggcagcacaaaaggatgggttcgtggagggcagcaaaaggcttaagggagatgtcgattggatctctgaggaacaggttccttctgccctgtgttctgatactctgccacccagagaaaccagttctgaggcccagaatatttcgggagactcttgggatctcatagtgaaagataaacacatatcttcgctagaaccaggcccctgacaaatagcatgatgcccagggcttaattccatagaataagctgataaatcataaagcctccaaaatccagcgatttcctttctcttcgattcctctgtggaataaatgaatatttattagccatctcccgtgt

SEQ ID NO: 117691 - DNA, 3751 bp, Homo sapiens
cctctcctgcactgtgaaacctgtgctgctttcttcacttgatcagctcttccactgcagtggcttctctggtttgctctaagtgcatcacaacagttgaaagtatgaccctcccgtatgagataggtttaaatgatagcttcctcaaattctggtttggagagctttgttctctacgaggccactcccaaaagcagtcctggaatgtctcttctgagccattgaatgggtgctgcttagagacactacaacagcctgacttctagagtcaacagtaggaatcataagctgaatacccactgagtttttgtgttggtatttcatagctgagggtagagcctgaggagaagtgttgtttgaaataatccgaatttctctgctgatatccattaggttatcaaaaccagagatgacttacagagctttacacacagacatgcctataaatgggaggatgagagtgataggtgggcaaggggctgtgagagggactaattagccttcatatatcctaatcccccatttttgtatctcatggtcatccctgtagaccggacaggaacatgagcttatcgagagcatgcccctgttggaatggtttgctaacaactataaaaaatttggagctacgttggaaattgtcacagataaatcacaagaagggtctcagtttgtgaaaggatttggtggaattggaggtgagtagcaaatcagcaaaccaaacttaaaaccagggtctcaggtcaaggtccctcctggctagccctagccctgcttccggtgaggtgcttattatctgctgggataggtgattgacgcagcaggtgcaggttcctaatttggacccatgtttattattacctctttgctttctgcaattctgcaagagaatagggcttcccttattcccttaccagccacctacacacatgcccatcccatgaacacaggtaatttaccttttggtttgtttccccaggtatcttgcggtaccgagtagatttccagggaatggaataccaaggaggagacgatgaattttttgaccttgatgactactaggtagtcgacatgggtccggcaaaacgtgcctcaccctccagcatccaacccaaggagcatacccatggtggaatccaaacagatccctgccttacaattggaacatttccagaacttaatccatgagcattggatattgaaaagaaaaccgaaacaaaaccagacccagccctacactttggtttgtcatggtgtcagcgcagcagcctacaactaagttcctaaacgccactttggactaatttaaaaaagaatcccagtttttacttttactggatggtgaaattggttgctcttgtattttatgaaaaaaaatgatttttttaaccttcatacatagaagcaaaaatactttaactgctgtaaaccttcaaaagttaatagaagtgagatcatactggtttgtttcttattttgattggagaaaaattaaattgctgcatttcgcagtgacccatttacatggcattctcagcttagactgcgtaagaagaaatatatgtggtgaaatgttggaaccatttctctcttggtctctgtttaatgttgaaagggtgagctaataggaggcactttcaacttcactccctcacgctaccccgtccccctccagactggcagtttcaaggatgcaaattgcattgcaaaatcaaactgactcatgaagcatttgggccagtgcactgtttacttccatctgtttgcagacacatttgtgcccggcgtttgggagccctttgtatcaatgttctgacaagggtccctataaccttaacctactcgaaaccggtttgggatggatatgatggggcttctgtgctattgctgggattgggagaaataaaacatgcaatttaagtggaagcgaagaaatttaaagaggattttattttgcttgggtcaatccttgttaaaagggaggtggatgtgttttccttgtgttggatggcatgagattatgtgaatgttttgatttattaaaatgaactgcaaggtttttcacaggaacgacagacatgtatgactgcatgtaattataaactcctgacctcctggtggggttggagcatctgtttcaaatgtgggacttacaagcacttctcacatgagaaattaggggcgggtgggaagggatgggacacagcttctggcaccatggatttaagaccatgttggatccaaaagttggcctgaaaccctgaagcttatgcttcacagctgggctgtaagtcagacttgaacccagctgatatgcaaggtcatggcgtgcccagggtggtgacagttgaacaaagtgtatagtacgtgcccagtggtagcgatggaaaaaagtataccaaatggactttgaaggaccaaaggttttaaaagtcaattggtatcacctccacactgactagggtagtggggtgcatttggttttcaaattgggtacttttaacactttagtgcctgactgctgttctttactgacttgattcagtcactcgtagctttattggtctgaaccagctccttgttcccaggttacagacctgcctatcgttccaataatcctgtttcacttgaatgaagggagtatgtcttaaatgtaaagtttctggttctcacactgtactctgaggtccaaatactgtctgtcaatgtgtaacctgatgtctcaaccccctgtgagaagagtccattatttggtgttcaccaacgtgggagacttcaccggaacaggcttttttgctttgggctctgctatttgtttgcagaacacccaagagcgagcaaacatgctctcttcacagcagtaccttagggttttgccattgtaaatgggtctgatgtgatatgacaagaccagagaaattggatgtaaatttacatttttgaatatgcttgttgtttcacatgatacatttagggtatgcagctccttttgtagtttttatttttactatttaagtttggaaatgatgccaaatttttgtatttctttaatcaatgtgttctcttcggtgatatatattgcattatatattgatgtgtgtatcaatatatattgatatgtattacacttacacatacaaacacatataagagggggtgaaaaccgtagcctttgcattctctatagcctctgcagagagatactaagcagcaaaatcttggtgttgtgatgtacagaaatggagaagagtattaaaccatatttaagaatatactttgtgtgcttgagattttttaggactggtctagaaaggcctgaactgtggagacagttctccaaggcatacctcagattagtcacggccaatagcatttcagccttgggtttgagttgtgtttactacatttgtctatggaaaggtatatgcaaagtttttctgaggtcatgatcccagagttatgctagaagaagaaggttcaggttgctggggccaaactaatttgtattctcccccattctatatgcatgccaaagggaatcttgcttttttttttttttaaggtatgttaagtatattatcccataacccagcatcccatggaggtagatggtgtacccaattttacaggtgatgaaacagaacaaaagaaggttaagtagcagctctttagtgataacaccaaaattttatcccaggccttattccaaagttctctctgtatctgtctttgagtcctataatagaatggt

SEQ ID NO: 117692 - DNA, 1892 bp, Homo sapiens
caaagtgctgggattataggtgtgagccaccctccccagcccgtcttaacctctactaccttatttggcaggagccagtggtcccccctttcctccacaataacttatttttgtttgcacttaatgagttgtcctatagtaggtctaataaaatgtgtgatataattggcagtgctgttcactttaagagcagcttttgattaaattgggctccttccccatatttagacttcagtgatcataatgctgagctttgcataccattaagagttagtgggtttgagtaaaggtgttttaataatattttaaataagtaccagtaagtactaataatattttttttgtgtgttagaggttacaatcaaaagttttaaaattagttgatatatcctatggtggtgaaaatggattcaaccaagctattgagttatctactgaagtcctctccaacgtgaaattcattcaagagaagaaattaataggtatcggtgaaatgcaactacttattctgtgaaatgttttcgtgtgtgtgtgtgtgtgtgtgtgtgtgtgtatgtgtgtgtgtgtatgtacgtgattgtatgtatgagacaaggtaccaaaaatgtaaaaaggaatatttagtatttttattaactcttttgcctcagtaaaagcattattttttatcttctttagtcattaggtcgaataggtgtgtttgtatctactagggaaactttaatatatatcctgttgactgatccctaatcgtaggacgatactttgatgaaatcagccaggacacgggcaagtactgttttggcgttgaagatacactaaaggctttggaaatgggagctgtagaaattctaatagtctatgaaaatctggatataatgagatatgttcttcattgccaaggcacagaaggtatgagaattagaaaataaggttgctatttgttactgagccaggaagcctggggtggagatttgggagggatggctgatttcaggagcaatcagaaggtagatctacccattgttccccagtccttcagtctgtagcacattcctgcatagatttttctgcttgaactgtttaacgtctgcttaagattgttacatctgctgaggaccaggactatatcttgaacatctctgatgttccttatggttgaagcattgtacctagtagacactcagtgtatgctaacatgtttatggaaaaaatgttgagagattgagtccctgagcccttttctcatctaacctcatcttatggagcttacacagattagtatatgagagccaggttaacacattttttcctcctaatactacagaggagaaaattctctatctaactccagagcaagaaaaggataaatctcatttcacagacaaagaggtatgtgattattttcttggtttgatgatacgtgcaagcgtaaatccgtgtgttagagtactggctgtgtagagggtgagctttgggaaaccaaaccttatactaattgggggtgctgtgggaggtggtcatctatctgccacatacgaatctgatttcagggaaggagctgcagctttttttttttttttttttttttttttttttgagacaaggtcttgctctgttgcccaagctggagtgcagtggcatgatctcggctcgctgcaacctccacctcctgggctcaagtgatcctcttgcctcagcctctctggtagctgggactacaggcatacaccaccacgcccaactaatttttgaattttttgtagagaggcgttttcaccatgttgccctgggctggtctcaaactcctgagctcaagcaatccacttacctcggcctcccaagtggtgggattacaggtgtgagccaccatgaccggtcttttttttttt

SEQ ID NO: 117693 - DNA, 1082 bp, Homo sapiens
aatgtgacgggcgcctgtaatcccagctacttgtgaggctgaggcaggagaattgcttgaacccgggagacggaggttgcattgagccaagattgcgccactgcactccagtctgggcgacagagtgagactctgtctcaaaaaagagagagagagaaaacagtatgatgtgaggggagtgaatccagatgatggggagagaagcctcctgtaatgactggtgcctcattggtacttacagctcctctcttgacatagacttagtagtcgctctctgaaaacaagtagcagtttatgctgaacgtttagttaagggaatggtgatttttctttgtccttttcttagatgatgacatgattattttatttttaatttgaagacatcttgtagttcttaataattgcctttttctcttgctacttttgtgtcaaaggtagaggaggtcagtcagccttgcgttttgcccgtttaagaatggaaaagcgacataactatgttcggaaagtagcagagactgctgtgcagctgtttatttctggggacaaagtgaatgtggctggtctagttttagctggatccgctgactttaaaactgaactaagtcaatctgatatgtttgatcaggtaagtaagaagtagatgctttattatgtaagaccctaggtaggagtaggtgagtcctctgtgtgagcactggaacagacacatctttttaaaattccttgggttaaaaacttgcctctgagttaaacagcaggtttacagatgtttatcaggaaacattcccctgtgcttttctgaaccccttctcttctgaaatcaaccatttttaggtgggcttcttatggatcctgtggaggttccttgtttagttgggttgtcagaattggctgtagaatggagtttgatttcaaagaaactaaaacctgttccttattttctttttctgatttattcttggagatacatagcagcaaagctctcagcagtatgacagctgattcagcctaaagcatttaaagcacattttataacatgggctcagccataatacactttcaagatctggaggaagtagcct

SEQ ID NO: 117694 - DNA, 3003 bp, Homo sapiens
atgagacagagtcttgctctgtcacccagagactgaagtgcagtaatccgatctcagctcaccacaagcctcccaggttgaagtgattcttccgtctcagcctctcgagtagctgggactacaggtgcccatcaccacgcctggctactttttgtatttttcgtagagatggggtttcaccatgttggccaggttggtcttgaattcctgacgtcaggtgatccgcctacctcggcctcccagagtgctgggattacaggcgtgagccaccaccacgtccagcctgtttactttaaagaataaatcgtactgaaacgtctcagaagaagttttaaaattagggagagagttctgcctgagagatttcaagctttttctgctttatttaaattatgacttaaaggatcaggcagggaaaataggctatgggaacattttctattaattgacgaaaaactagatatggggtaaagtagaaaaattgtttgtgttctttgcagtacctccaaatggtctggttgtatactgtggaacaattgtaacagaagaaggaaaggaaaagaaagtcaacattgactttgaacctttcaaaccaattaatacgtcattgtatttgtgtgacaacaaattccatacagaggtaagaagtcaaacccagaacattttcatcgctccagaattctttccccgtacccattagcagtcagtcccccatccctcccacttacctgtctcattctaggcaaccactatattttctttccatagatatgcttgtgctgtacttcttttatttttatttttttatttttatttttttattttttttttagacggagtctcgctctgtctcccaggctggagtgcagtggtatgatctcggctcactgcaagctccgcctcccagattcaagggattctcctgtctcagcctcctgagtagctgggattgcaggcacatgccaccacacccagctaatttttttgtatttttagtagagatggtgtttaaacacattggtcaggctggtctcagactcctgacctcgtgatccacccaccttagcctcccaaagtactaggattacaggcatgagcaaccccgcccagcctggacattttatataatggaatcatatagtttgtggccttttgtgactggcttcttttactttatacttttaaggttccatgtggtagcattcatcagtacatttcatcccttttgattaccaagtagtattccattgtatacctatatgccatatttcatattttatatagcttctcgtttcatcagttttacatttgagtggtttgcactgtttggctgttctgaataatgctgctgtgaacattcatggacaagtttctatgtgaccatacattttcatgtttcttagatttgtggaatcgtgtaggttatatagtaattatgtttaactttttaagaagttgctagactgttttccaaaccgttgtaccattttacaaagctgtctgttttcaaaaagtaaggcaatttacatttattatgacactagtcattcagcatgttttgagacagagtctcacactgtcgcccaggctagagtgcagtggtgcaatcttggcccactgcaacctccatctccatggttcaagcgattcttgtgcctcaagcctcctgaataactgggattacaggtgtgcaccaccatgcctggctaattttttgtgtttttttagtagagacagagttttgccatgttggccaggcctgtcccaaactcctggcctcaagtgatctgctcgcttcagcctcccaaagtgtgtgtgtgtgtgtgtgttttgatttttgtgggtacatagtaggtgtatatggggtacatgagatgttttgatacaggcatgcaatgtgagctatcacactatggaaaatagggtacccatttcctcaagcgtatatccattgtgttacaagcagtccagttatactctttgagttattgcactcagttttcacataacaattgtaaaatttttagtagcagaactgtaagaactcattttcccccctttcccctgaaacttttgagtgacaaagctgccataggatgaacttgaacagtggaaaggaaacctcattagagtgacctaaatcagtcaacagtagaacaatcaagaattcacagctggctccttagttcattctcttgcctttcatcaacctagggaaaaacctctacagtggaattagaactgacatttgtcgacagtttacagtggatgatttttgctaacttgatgggaagtccatttatagttggatcttggtcgactgcatagacaatccagactgtttttctcttcactaccacactctacttacagcagagggtttttcagggagcctctcagccactgaaaccacttacctgtatctggttggatgaaagccgattttgaatcttgttgatttaaacagtgccaggtacccatgttgtctggcttttgctcacttactgagttagccttgttggcttttttccaaaccttaactccttttctaagatactgtttaatcttgctaactttgtacattttagctttaactgagagggttatatcctgtttatcagggtaattatatattctaataagggatatgcctattccctgataagcagatttattaaaaacttcaatctacctaacgggtcattttgataaggctatattattaacgtgcaatattcatattcatgtcttttttctttttctttttcttttttctgagattgagttttgctctgttgcccaggctggagtgcaatggcacgatctcggctccttgcaacttccacctcccgaattcaagtgattgtcctgcctcagcctcctgagtagctgggattacaagtgtgcaccaccacgcccaactaatttttgtatttttagtagatgagatttcaccatgttggctaggctggtctgaaactcctgacctcgagtgatccaccc

SEQ ID NO: 117695 - DNA, 1420 bp, Homo sapiens
tttttttttctcgagactaagtctagctctgtcgcccaggctggagtgcagtgacatgatctcggctcactgcaacctccgcctcccggattcaagtgattctcgtgcctcagccacctgaatagctgggattacaggcacttgccaccatgcccagcgaattttttttttttttaattgagacgaggtttcactctgttggccaggcttgcctcgaactcctgaccttgtgatccgcccgcctcggcctcccaaagtgctgggattataagcgtgagccatcgtgcccggccgagagagagagatttcataactgggacatttctgtgacttccacagttctcctttcccatcattagaatactaaattcttgattacaaatatgcctagactttggaaagactcattgcatcatcctgtcatggcgtctcccactcaaccaccacatttgaaggctctcccacggacagattcactaccaaattccagcctgttgacactccttatttatcatagatagcttctttctttaggaaatgaggtgtttctcaagtatctctccaagtgtattctttacataacttacctcactattcaatcaaattgagcactagattctgaacactgttcctaactctgtgtatacgttcataaacaagactaatatagtccctacattactcctttgagagtgacctgtttccataactttggggcatctccctgtagcttgcttttaccagagagaaacatgagtttacttacatgatatttaaatccctaatgagttattctttcttccacagcaatggcaccagcatgatatcattgatcattcctcccaaagaccagatttcacgagtggcaaaaatgttagcggatgagtttggaactgcatctaacattaagtcacgagtaaaccgcctttcagtcctgggagccattacatctgtacaacaaagactcaaactttataacaaaggtaatctggagtttgctccttttccttctctacacattttggttatgttttatactgtgatgctgctatggtgctttgttcactaatgttcccttaagtcggctgtcatcagtgtctctttggccttggtggttagcttttttgttttgttttgttttttgtttattgaaagttaagtaggccaggcacagtggctcatgcctgtaatcccagcactttgggaagctgaggcaggtggatcacttgaggtcaggagttcgagaccagcctggacaacatggtgtgaaaccctgtctctacaaaaaatacaaaagttagccaggcctggtggcacacacctgtagtcccatctactctggaggctgaggcgagagaatcaactggacccgggaggtgggagttgcagtgagccacgatctcgctgctgcacactagcc

SEQ ID NO: 117696 - DNA, 1477 bp, Homo sapiens
taatctcagctactagggaggctgaggcaggagaatcgcttgaacctgggaggtggaggttgcggtgagccgagattgcgccattgcactccagcctgggcaacaagagcaaaactcagtctcagaaaaaaaaaaaataataataataataggggcctggtgcggtggctcacgcctgtaatcccagcactttgggaggccaaggtgggcaggtcacaaggtcaggagatcgagaccatcctggctaacacagtgaaaccctgtctctactaaaaatactagccaggcatggtggcgggcacctgtagtcccagctactcgggaggctgaggcaggagaatggcttgaacccgggaggcggagcttgcagtgagccgagattgcgccactgcactccagcctgggcgacagagcaagattccatctcaaaaaaaataataataacaataataataaataaagaccacatgagaaaaaagtcaagaactagactattttaagttttgtgagaagagatgaatatagaacaaacaactacagacttctcactctttccaaattttggtttccacatgtgtaactatggacattaatcttggattaggtggtaacagttgagataatatgggttaaaatacttaacaccacatttgccacatagagagtgctctgtaatgttagctctttccttttgtatatacaaacattgattctgtagagataccctaatggagaactgtattattaaaagatcaggatacagatgccacaggtctgaactatgagaaagaggagaaatagatgagagagaaaagaggtagtaaagggaagaggacagagtatatatgttagaaaggatgtggtggtggtccttagtttcctccaagtatgtaggctgcctgcttcaactcagaactagtcctaacagccgttgtatctggcatggtgttctatgcactgtgaacctaatgaacaattactccctttgaatttcaagtcttgacagacctcctattgtaatagcagatatacttatgcttccagggaaggaaggcttactctggacatattgcaaggtaagcaagagtacataattagagtatcatttaaggcagagtgctgtgtaggttataggtctctcccatcctccacaccagttggaccctttcttcacagggctcgttttctttgaacttgagattgaggatcggcccagtacagcaccaccccctgtcctgggatggtacttcattgttaaaaaagttagtgtcagctttgcagcagggctataaatggtcttcgatcctatttgaagagtaggaaggagaaatttgccttcccactgctggatctgttcaactaagaggctggacagtagaaattacttctcagtccagcctattctctagggctctcagaatagaaccttctcctaggatacattctgtaggtgtcttttaattcttcagcagcctac

SEQ ID NO: 117697 - DNA, 3553 bp, Homo sapiens
cccccagccttacctcacaaggcggcgcggacccagctgcagccaatcggcgggctcattgtaggctgcggggcagagagccaatgagaagtcgcggcggacgcccagcttctcctcactcgcaccggccccctcccttccgcctgccgccttccactccgcccctggcggaggaagtgatgtcacaggccccatgtgagcggattgcaacacatgcagctgcctggagagagggagccggtgtcctacgtcagagccgccgccgccgcggagccgccgccggggaggagcagccgctgccgcccaggactgggcccttaggtaaggcacagggagggaaaggccggtgacctttgtggcgagctgcaccggacgggaggagagggcctctgggggatggcgaggaagggggccgctctgccccagcggcggcgctaactctgtggtcttggtgtctccgggccccgccgggccgctctagggaggaggaggcgagaagatggcggacgaccccagtgctgccgacaggaacgtggagatctggaagatcaagaagctcattaagagcttggaggcggcccgcgggtgagcgccgcgtccggcaccctccgtgccctcttggttcccggacccctcaggatggacgcccccgcgccgcatggccggatgaggagaaccaggcactagccaactcccgccttctggatctctgggtagtagcccctgacccaggggcgagggtcggcgcggttggcccgagaaggggtcctttccccgcatgggggtaaggggcccgcgctccccggtttagatcactcggcccccctcgtggtaggccaccgctacttttgcacctctcccgggcccttaagtccaggtcctccctcttcgggctccaggtgctgccacccgactcgggtgctattgtggcaaagtgttcggccttcctttcccagggcccttccctgatttcctcttctcccttcatttctcagccaggcctcattaaaatggcctctcccttctgggcttctgagacccgggtgggtgaagtttggatgggacgggaagcagaggtggccagggacagcttctttctgattcctgatttctctgggtcttccacctgtcccaagatgacttctcccaagtcctctaattaccccggagcttcctggttttagctgttccaggacccacctataaactgaaaatgccaacgtacgcgcgatgtgaggggtgctgggtaggttttggttaatgaatctgcatgtgtatgtccaggagaaatacgggttagggggccgtttgataggaatcataactacagagtccctgctggcatttctctgaaacttgtggggatatcgctgtagagaggcgcctgatgtgcttgatgcttgttgagtgagattcataattgaattaaatgggctttgagtcttgtacattttgataagaaactgtaggtgtgtccattggggggagagtaggctagattaaaattagctgtgtgtgtgtgttttcttttttttttaacgttgttcgtttgaggaaggtgtgccaggggtattcctgtttcttttattactttattttgttcctttcccagtcatagaaactttttacttacaggaagtgcccccccccccaaaaaaaagtgtttggaacattattacatacttgtatgtctgagcattcttagaatagtagaatggcctgcctcaggccatgtgaaaagttgatttcagcacaagaatttgacattctggtttccagcccaggattgtcatttatgggtagatttgcaattttagaatgacagcccctccaagctcttcattattactgttatatgaaacaggatgtgcttaattgtactgaaggcccaattcacaggttggttttactagtgttttgttcttaataaattagggacagttctgtttggaatgaggcttctaaaagtttggccccattcagtgacgggcttgtgctcactccttcggtttactggagaaacgttagtttaatatgaatcgaagacagcggcttgttagtccttaggtttttctttgaattcaatagaatatccagaccttcttaatgatcttacaggaacttgtgccgtatgatagagtgaccagttattcccaaaatgtgagaatactgtacagaaagggtaacataggtcacgacccattatgttgcactaccaagaattagccaggttcttttgtttcagtaggatcttgttttgttacttgaagccttcaatccagtattgcattttatagattgctgttgttgcagtattgtatataggtggatgtgacctctggatttgttcttactgctttcagtagcaggcaggtttacacattttaatttgcatacgttatattctctgaaacagtccaaaaaattaaatcatgactataatttgcctgtttgaatgaagtaacattgaagatgacattgcttaataagtaacagcattcctttctactgcttaatgaaggaaactcattcttaaatttgttctacccatgttacctagccactagaaacttttaagcgcctctttaaggcttttgaaggctttacctctttgtttagcaaagttcagtaaagtttaaagcatgctaaaaatgaagttataagacacaacttgtatttcaagttgttgagtttggatatttcagacatgattaagctgtctaaaatagctggaggaccttccgctacacattgtggttaataatcatgtcctactttgcttttaatcaggatttggttgcatcttgatcccatggaaatttaaaatcttggccatctctgagtattggtaagggagtcagaagattccccagtatataccagtttttggaggtgggaatattttcattgccaacttgtgttaaagtcagactctagattttcatagatagggtacagtggaaaatgttattcctactttacctagtgataaaatatctttagaagaattgtaatgggctttaaagacttaagtggatggcaaaatgaatctgtatttgctgatgttttggggatactctggttttcaggaggaaactgaggttttcaggcatggttattaggacaaggtagtgagacttagtggttgagtaacagtattgttttggaaatgaaaaagccctttcctccccttagcagtgtagaattctaggcataggaatcatggatttgtttttaacagtagttattaaaatatgctagaataagagtgattttgaaattaagataatcctatgtggttatctcttgatatatgacccaaatttaatgtagcttgaaaaaggaaccacctgcaaaatgggctcactaactacatctgaataaagggaagtatgttggcaaaataatttattaagcacatactatattatagactgtgctacagtacattattaagtcatttaatcctcacaagtattgccaccatttggtagacaaggcacctgaggctaagagataatttgtccaagatgtcacagcaaaaatgtagcag

SEQ ID NO: 117698 - DNA, 2948 bp, Homo sapiens
ccctcgtggagttcctcagattgaagttacatttgacattgatgccaatgggatagtacatgtttctgctaaagataaaggcacaggacgtgagcagcagagtaagtcaccttgtttatcagaccctaagagtgaggtgagggaggtcttgggaatagaccctcttagaatgatgagtcctctttgcccctcagttatcagatttacttgtacaagtgtaatgtttattccccacaaacaggcactgagcctgtggattgctgaagttttgatgggcaaacaggccagttggtgtttgtgtatatattgggtccttggtttcattttgctttataggactatagggtatttctcctcttcataatttgtatcaagattggctgctatgagcaggagtactcttaatgcaatggaggaagaagaggcatataactttacctgggaattaatgaaatgccttctgtttactacagttgtaatccagtcttctggtggattaagcaaagatgatattgaaaatatggttaaaaatgcagagaaatatgctgaagaagaccggcgaaagaaggtgattacttcttgtcttctgaactttaatcttagtaaagctcagtcttgacagtgggagtttggggctgggcgcagtgtctcactcctgtaatcccagcactgtaagcccactgccaaggtgggcagatcgtttgaagccgggcgtggtggtgcacgcctgcagtcccagctacttgggaggctcaggcaggagaatcgcttgaacaagaaagtgggagagtttggacatgtcataggttgtgggtaagagaaaacctaagataatctattcttccttccccgttgtttataccttatgtttgcagtgcctttattatttcttctgttttccctgtcacaattctgatgttacaaaatctagcccaaatctctctcaaagccatcccagactctttcatgccactctgatttctccctcttactctatttttatctgtaactgtatgtaacacatagcttattgtctgagtatagacattcagcaaactttggttgattggaaagtcttcgtttaaacttctaatttctctaaggaacgagttgaagcagttaatatggctgaaggaatcattcacgacacagaaaccaagatggaagaattcaaggaccaattacctgctgatgaggtgagttctattttaaagtaactcaagaggttgaacacatttttaccaatgccagtgaagtttatttttctgtgggttttgataggggtttaattattttaaaatgtttctaaatagtacttctacttgtaatggtacaggagacctggaaaagtaaggatttttgttttctttttttaagtgcaacaagctgaaagaagagatttccaaaatgagggagctcctggctagaaaagacagcgaaacaggagaaaatattagacaggcagcatcctctcttcagcaggcatcactgaagctgttcgaaatggcatacaaaaaggtacaagggctgaagtggattttgattctaacttgatctggatggaactgttcttgatgactgtcactggtggctccctccatagccatttgtggaatttagagtgagattagagttgggagatagtctcctgccgtcttgactctactttggcattggagttagtgtcaaagggaaggaatccagaaaccaccagtagggtagaaagtggggagggggagtggaatagaaatgaatgatgaggacatatgtgggtccctcatcttggagtgcaacaaagagcaaatggttagctctaacgttaaatctgagtggctctcaaatgttttcttaacagatggcatctgagcgagaaggctctggaagttctggcactggggaacaaaaggaagatcaaaaggaggaaaaacagtaataatagcagaaattttgaagccagaaggacaacatatgaagcttaggagtgaagagacttcctgagcagaaatgggcgaacttcagtctttttactgtgtttttgcagtattctatatataatttccttaatttgtaaatttagtgaccattagctagtgatcatttaatggacagtgattctaacagtataaagttcacaatattctatgtccctagcctgtcatttttcagctgcatgtaaaaggaggtaggatgaattgatcattataaagatttaactattttatgctgaagtgaccatattttcaaggggtgaaaccatctcgcacacagcaatgaaggtagtcatccatagacttgaaatgagaccacatatggggatgagatccttctagttagcctagtactgctgtactggcctgtatgtacatggggtccttcaactgaggccttgcaagtcaagctggctgtgccatgtttgtagatggggcagaggaatctagaacaatgggaaacttagctatttatattaggtacagctattaaaacaaggtaggaatgaggctagacctttaacttccctaaggcatacttttctagctaccttctgccctgtgtctggcacctacatccttgatgattgttctcttacccattctggaatttttttttttttaaataaatacagaaagcatcttgatctcttgtttgtgaggggtgatgccctgagatttagcttcaagaatatgccatggctcatgcttcccatatttcccaaagagggaaatacaggatttgctaacactggttaaaaatgcaaattcaagatttggaagggctgttataatgaaataatgagcagtatcagcatgtgcaaatcttgtttgaaggattttattttctccccttagacctttggtacatttagaatcttgaaagtttctagatctctaacatgaaagtttctagatctctaacatgaaagtttttagatctctaacatgaaaaccaag

SEQ ID NO: 117699 - DNA, 4273 bp, Homo sapiens
tcgtgatccacccgcctcgccctcccaaagtgctgggattacaggcgtgagccactgcacccggcaaaacattgcatcttaaagagtaactattcttggccgggtggggtggctcacgcctgtaatcccagcactttgggaggctgaggcaggcggatcacgaggtcaagagatcgagaccatcctggccaacatgctgaaaccctgtctctactaaaaatacaaaaattagctgggcatggtggcacatgcctgtagtcccagctacttgggaggctgaggcaggagaatcgcttgaacctgggaggcggaggttgcagtgagccaagatcatgccactgcactccagcctggcgatagaatgagactctgtctcaaaaaaaaaaaaagtattcttggtgactattcatttaaattagatctcaccctccctttggttttgcaagtcttctgtcctagggcatggtcatattttagttgaaataataaatgtaaccgtcatttggcctgctcgctgacatgcaattaaacatttcctttgcagactgacatcaatttgccctatcttacaatggattcttctggacccaagcatttgaatatgaagttgacccgtgctcaatttgaagggattgtcactgatctaatcagaaggactatcgctccatgccaaaaagctatgcaagatgcagaagtcagcaagagtgacataggagaagtgattcttgtgggtggcatgactaggatgcccaaggtatggaccagtggaattctgtcgtggagagagagggctggcgcatagtgtattcttgggacaggtggcacaaatatatggcccattctgctggggtgacctaaaagggagatgagattatatactcactaaagaattcttttctgtttgttttgttaaaattgaaaaataggctgggcatggtggttcacgcctataatcccaacacttcgggaggctgaggcgggcagatcacatgagtctaatttatatatatatatgtatgtatgtatgtatgaaaaattagggaggggcagaatttctttaggggcagtagcagggaggatcccgaactcagtcatagaatttttaggattgaaacaaagtttgaggtcagaggggaacataaaaccttggtaataccccgcccccggccaccatctttgtacatgtgtctttgcagcttagtgcatctctttgacaaagatttgtgcaatgatgtattttattcaacacatcattctgaaagaacgtgtggaaaactaatgactgagcacaaacctgttgaagatgcagttcttcttggtagcctaaataggattatcttggacctaagatagtgaccttgttttttttcttaatttttccattgaaatacatggccttaaggaaatatgcaaaaaaaaaaaaaatgaacctggaaaaaaaaggtcctggaccaggtggatgcctcatatattaagaaatccccgaggccgggtacagtggcttacgcctgtaatcccagcactttgggaggccaaggcgggcggatcacgaggtcaagagatcgagaccatcctggctaacacggtgaaaccctgtctctactaaaaatataaaaaatttggtgggcgcctgtagtcccagctacttgggaggctgaggtaggagaatggcgtgaacgcaggaggtggagcttgcggtgagtggagattgcgccaccgcactccagcctgagcgacacagcgagactccgtctcaaaaaaaaaaaaaagaagaagaaaaagtatccccgatactattcaaatggaactttatcactaataaacacaagggaagaccatgccccatgttagcaatgcaaattattgctacagctgcctatgataatttggtctttagttgataatatacaagagaatgtggacttctaagtccccttgccttgcatcctctgtttcaaatgatttaatgtgttgtgtaggaaagcagataataaaacttaggagaatccttcccagatttacaagggtcatgaaggagatacttctataggtataaagtgtatgagtgttagaagatcattagcaggaacccaagtacgaaatggttatttgaataaacattctcagatttgagttagcctgtcttgagatctggctgggagcgtaggacacgtgctcccttttgttctgctcaggtagttcccaagtgtgggccgacaggttctttttccttgatgttcaggttcagcagactgtacaggatctttttggcagagccccaagtaaagctgtcaatcctgatgaggctgtggccattggagctgccattcagggaggtgtgttggccggcgatgtcacggatgtgctgctccttgatgtcactcccctgtctctgggtattgaaactctaggaggtgtctttaccaaacttattaataggaataccactattccaaccaagaagagccaggtaagagccatcacttcctaccttgtcacatgggttttaggttctatgacggatgtaattgcagccactttcatgagttttttctagaaaacttcatttttatctgttttacagtttagaatattaaacagttaactgtgggtggtgagaatcctgtgttttgttttttgtttttttgttaccagaaaagttcttacatgttagctggtagtgatgattataagaaggacatcagtagtctcctccacaggattaacataatttgctaaaagggatctcagtcatttgagactgaatttcctgtagtcttctgttctcaaagacagtaaaaagggtagtctggaccagacttaggggagtgttcttatcttatggatgaatgaagggggtggtatgagggtgccgagataccaagcagggctacttggacatggcttgttcttgaagtaggaattatttctggctgggcaccgtggctcatgcctgtaatcccagcactttgggaggctgtggcgagaggattacttgagctgaggagtttgagaccagcctgggtaacatggtgaagctccctctctccaaaaagttaaattagccaggcatggtgctgtgtacctgtagtcccagctactcaggaggctgaggtgggtggatcacttgagcatgggaggcagaggttgcaatgagctgaggtcatgccactgcactccagcctgggcgacagtatgaagtgaggtcttgtctcaaaaaaaaaaaaaaaattatttcctgacttacccaatcttgtgatgtttttccataaaactatggttgttggtatatttgtgccgtgatgtatttgtcaacacatcactctgaagaaaagtatgtggtgactttctgtgactgagcatgatacatcttctttctctgatcccgtttccccagatgagcatgtttcaacattttagttccttttgaggacttctgtcctaatgctgcgtctttgtacaatgcatttgcttagctgaaacagttgctattgtatgcccatttgctgtactaatcctacttctattccctataaagacatcagcctttgttctgaacataccgtaaattaggagtcttccagtcttggaatgtaaacctttggctttcattttttctatagaaatggagtaggttaatcacattgacaacccaggagggtttcttcttccctaggtattctctactgccgctgatggtcaaacgcaagtggaaattaaagtgtgtcagggtgaaagagagatggctggagacaacaaactccttggacagtttactttggtaggttattgtgaatcctgaatactatgcctccttcactgtaaagtgagataatattctaagccataaaaatattagtataaactgctggcatacacatacatactgagtagtcttgagaagaagggatgcaactagatacccatggcatcagtttttacctgaaagccttgctttttccttgtgccttaggaatttcctcagaaataaactcctgattactcatttaaaagacatttgatattgttactggtttctgatcagcattgcttattggttattggtgaggtgaataataggagatttgctatctgtcatttagtgtgtccacaggtacatacagccattatggttacttgctatagctaaacttcactggtataaaaccagttgatttcaggcagcgaactactactgttgcttataaactttgtgttttgtacattaaatcacttgtttctcccaggaaccaagtgacttgtttactagaaa

SEQ ID NO: 117700 - DNA, 2129 bp, Homo sapiens
ttcaaacaattctcccgcctcagcctcctgagtagctgaaatgacaggcatgcgccaccatgcctgaataattttgtatttttagtagagatggggtttctccatattggttaggctggtctcaaaactctcaaccttaggtgatctgcccgcctcagcctcccaaagtgctgggattacgagtgtgagccaccgtgcccggcctgatcttgggtttttaaccagtgtatttacttggagtgtttcctgcaaggacatattaggtcacttaccaaaagactgaagaatgttgtctgtggctgcaaaaggatgacacaggttgttgggctatattaataattctgttctgacagaattccatgattgaatttcattcttttccagaaaattacttggggcacacagcaaaaaatgctgtgatcacagtcccagcttatttcaatgactcgcagagacaggtgaggtcaattagcattcttattcacaaaaagtaaggtgcctgggatggaagggtacaaaaatgtttttctctttgttttctctaggccactaaagatgctggccagatatctggactgaatgtgcttcgggtgattaatgagcccacagctgctgctcttgcctatggtctagacaaatcagaagacaaagtgtaagtttgtgcagtaaatttctcacctggatgtgtgaaactaaagtgtcacttaattttttagtaattgagccttttacagtgcttttactgattttaagtctgtattgtctttgttttttcatttcaaaaccattcttttcttttcttttgggccatggtaatttaactagtacatatctcagggaaatagcttagattatctgtatttggttattgaaatttatatcctggtgataggttttgttcttaaggatttcttttcttttttttttcacaaatcatttacagcattgctgtatatgatttaggtggtggaacttttgatatttctatcctggaaattcagaaaggagtatttgaggtgaaatccacaaatggggataccttcttaggtggggaagactttgaccaggccttgctacggcacattgtgaaggagttcaagagagaggtgagttaccaatgtggttaatatgtagacgttgggatattgagaaattctttgttcagattgctctttgctttgtttacgagttcagttcaacccccttattctagacacagatactcttttcagaatattttttttccctacacattaagggtaataaaaagtaattcatgcttatatataaaggtatgactccattttgtgttgttccaccttattactgcagtttatttatcacctcactaatgctggtgtttggtgttcaatgtcttcactttatagacaggggttgatttgactaaagacaacatggcacttcagagggtacgggaagctgctgaaaaggctaaatgtgaactctcctcatctgtgcaggtgagacacggaaaattcgagcagtcttgatggatattttcagccggagcttatttaaaataaatagtattttctaattggcctaatgtcagttgagttttttttgtttgtttgttttttcagttttctggtttctagagacctttgccatgagcacagggacagtaaggtctttagtttctttatgagctgaaatttttttagccactcaaatcagttacatatactggagctaaataatgtgtgaatgatgtgctgggtgtacttgtttgcctttcagttaaagacatttattttaaaacctgctctggcagtgtttaaaactagaattactagcttggaaaaactgctgtcttaactgacaatattaaataacctctctccttgtgaattggagagtctctgagtgtcttttttttttttttttttttttttttgagacagagttttgctcctgttgcccaggctacagtgcaatggcgtgatcttggctcaccgcaacctctgcctcctgggttcaagtgatttctcctgcctcgacctcccaagtagctgggattacaggtgtgcaccaccatgcctggctaatttttgtatttatagtacagacagggttctgccatgttggccaggttggtccttggactc

SEQ ID NO: 117701 - DNA, 1282 bp, Homo sapiens
ctgtttctgctttttggctattagaaataatgctgccataaacatttgtgtacaagtttttgtgtggacataaatatttccatttgtcttagagagtagaattgctggatcatacagtaacggtttcatcaaattattctaaagtggctgcaaaaatcttctgcctggggcgctaaataaagaatgttgaggtttcatcataatgtttttatatgttagtgattgctttctttttatttatttatttcattttgccttgtaattctcataaaccatgttagtgattgctttctaaagaatttcacaaactgtcatttgttggccatgaatgagtctcttggggtggaagatggatgttcatggtatgtggtaattttgtcatggtaagttgttcaggtagttttctctaatagaatttttgtgtcttacagtaaaaatgttccctttaaaattgtccgtgcctccaatggtgatgcctgggttgaggctcatgggaaattgtattctccgagtcagattggagcatttgtgttgatgaagatgaaagagactgcaggtgagtgggtttagttcacatctgggaaagttctaagaacaatgattcctgtgagatcactagctccctgtgctccagctcctgtagatgaatctgtggtcccttttgtatagaaaaactaggaatggcaaaactgtgttatacttcatgctttccctgcagattgaattaatcttcaaatctcactaatggtggctggcttgtttctttttttccagtagggggtaatgttctatattgaaagccacaagactacacattaagcttttgtccctgttaggtataaattagaacttcctatttgaagtggctgttgtaagtctaaaggtcattgtagtttagtgaaccttcactaaaatgttgaaagagtgatcttaggggtttctgttttttggggtttttttgttgttgttttttgagacagagtttcactcttgttgcccaggctggagtgcagtggcacaatctcggctcaccaaagcctccgcctcccgggttcaagcgattatcctgccctctccctcccccccaacgtagctgggattacaggcatgcgccatcatgcctagccacttttgtgtttttagtaaagagatgggggtttcttcatgttggtcaggctggtctccaactcccgacaaatcaggtgattcatccgcctcagcctctcagagtgctgggattacaggcatgagccaccgtgcctggccggccgatcttgggttt

SEQ ID NO: 117702 - DNA, 1277 bp, Homo sapiens
aaaaaaatagtagtttgaaagtaaagggctaaagataccttaactaaatatctactgttcattaactatcagcagtaaagcatgcccggtagtattgttgatgtgcatttgtttcgcaatttgggagctgtttctgtgtcttaaatgattgctgcaaacataccagtaataggctgggcgtattggctcatgcctgtatcgcaacacttcgggaggctgaggcgggcagatcacctgaggtcaggagttcgagaccagcctggccaaaatggtgaaacccccgtctctactaaaaaatgccgaaaaattagcttggtgtggtggtgcacgcctatagtaccagctactagggaggctgagacagaagaatcgcttgaacccaggatgcggaggttgcagtgagccaagattgtgccattgtactccagccttagcgacagagtgagactccatctcaaaaaacataccagtgataactacaaacttactctctatcacattttgggagtttaggtgctggagaatgccgaaggtgccagaaccaccccttcagttgtggcctttacagcagatggtgagcgacttgttggaatgccggccaagcgacaggctgtcaccaacccaaacaatacattttatgctaccaagcgtctcattggccggcgatatgatgatcctgaagtacagaaagacatgtgagtaacagcaaaagttttttgcaaaaagcagttatttgcaagggccacacagaagagcctcagcatgttgatgaggatccctggagcaccttactttagtaattttacttattgtccctaggggaaatctgtaccactgccaaaagggtaatccctttaaaaaattcatttttggccagtgcagtggctcacacctgtaatcctagcactttgggaggccgaggtgggtggatcacctgaagtcaggagttcaagaccagcctggccaacatggtgaaaccctgtctctactaaaatacaaaaattagctgtgcatgatggtgggtgcctgtaatcccggctactcaggaggctgagacgggagaatcacttgaacccgggagacggtggttgcggtgagccgagatcactgccactgcactccagcctgggctgctgagactctgtctcaaaagaaaaaaattcatttttgtctttacagattaggtctttgctatgtattgacatgatacatgaaaatttgcaaagcattcctaaaccacatagttcagtgttgaatacataaggcagaaatggcat

SEQ ID NO: 117703 - DNA, 1050 bp, Homo sapiens
gccagggatgctgctgtatatcctacaatgcacagaacagcccccaccacaaaaatttcgcccaaaattaatagcgccacggttgagaaatcctactgtaatgtgattctaaggccatcttttatttaccttttttcgtcttacttatttgggaaactttaatatttactgttttagtagcttaatgtattttatatactaagtgagcccaagttttctctttttcctcccaggatacacactggttggtgactgagtcagttttttcttttttaggatagctggaatggccttagtcatgaggcttttagacttgtttcaaggcgggattatgcgtaagtataatatcatttcctttgagagggaatacatattaaacttcaaagcagtgttttctacatttgtgattattcttctctgtaattatttatctgtatttatttagagattatgtagtataccactgttaattttccaattaaatattatcttccagtgactttggtctatcaagataacaatagctgtgacactgttctaaatgtcttacagatcagaagcaatcaagggagcagttgttggtattgatttgggtactaccaactcctgcgtggcagttatggaaggtaaacaagcaaaggtgagcatgattgataactagtaccttatccagaatctgtccagaattctgtgctcttttccttagttaaggaatttgagaacctgatttgcgctttttttttttttttttttttttttttggagacagtctctatagcccatggtggagtgcagtggcacggtctccgctcactgcaacctctgcctcctgggttcaaacagttctcctgccttggccacatagctgggattacaggcatgaaccaccattcctggctaattttttgtattttcagtagagacagttccactgtgttggccaggctggtcttgagctcaagtgatccgcccacgttggcctccaaagtgctgggattacagatgtgaaccactaagcctggcctcgaagtacttccaactaaaacagca

SEQ ID NO: 117704 - DNA, 1056 bp, Homo sapiens
gtcccttttactaacatctgtagactgcttaggaaatttgctttggggctagtagaatttaagtttccccgatattactttttcctattctctaagcacccccccacacagcttgatagatagtagctcttaataaatcacacaggcgtgaacggtgctcccactgagaactcttctctgcccctctccagcctacaggaggtcttctgtgaaaggagccctccccacctcctctcatagcttcagaatggaggtggggcagtgggtggattcctactctctgtgactatcctctctgacctcctctatttaaatagcccaaattcagaagtaggagtggacctgaggacccagcaggatagtccctctagcccacggcctaacccctgcagatgcccaggaaaccagggggcaagtgggcccccctggctggtcctttgctcaatcctgaaggcatctgtgaagggagcgggggtgcttgggttcttagctgcaaagcaggtggcatggtctcctcttcattgggaacccagaagtgtctggcaagtctctctgccacaggcctccctggggaccagagctctttgaagagaagaaaaggttctaggaacaagaaagctgctgctcttgatgaaaaagtcaggagggaagaaaatgagaccaacaagggctgaagagaactatctgtgggctgaagagaatgttaatggctctgctcccgagcttcaaagcctgagctgggtaggagtgcatgcacatgcctcagctgtcacctccagaatacttaccaaggactgaggcttgcaagcattcccagcctgattttcccagatcaagcagagcatctgctaaggcagaagaaagagaagccattgggagatcctaggcctgtttctgctagctggggtttaaacttaactcttccatatcagtcaacaaatggggttcccagaggaatttaggtggcagggaaatgactggtggggaaatggctctcatggaacaaagctggctttcctgtttagaaaatggtagctgctatggactgaactgtgt

SEQ ID NO: 117705 - DNA, 1033 bp, Homo sapiens
agtgagctgagattgtgccgttgcactccagcctgggcaatagagtgagactgtctcaaaaaacaaaaaacaagcaaacaaacaaaaagatcctctcaccttggcctctcaaagcactgggattacaggtgtgagccactgcacccggccatgcccctctcacctgttttttataatcccagaaggctgtttgtgtaagtgtggtttttgtttttttctgtgaatgtaaaggattattatcacatggatttggttattgcctctgaaggactggggcaatttgcaggtcgtctcttgttctcttgtctttcttcttctccctgtttccttctccctctgcctctgtaatcttagttggccgtcatgtaaaaccgaagagagttttatgcttcctagtcctactatttagagtggataagtggaatgtttttaatttctgtctcttagaaaaacaacagctaaattaaattctttgttacttgtgtaactctcaactgcttttcctctcactgtgcgtcagcacccccactttctaagactgagaagtcgatactgcttcccagggaaaaggaaaacacacccaacatgggcctttggatttcccaccacttcaaacttctcttctatttaacttgcatggtaatttgcatatatctacatatgttatgcaatcagcctgttctccttttacatttaagcctaaaataattttgcgtttctgatgttttccttctctactgccttctttatttctttctggacctgcaaaaggaattgatgaaaggccagtggtatggacacactacacacagcatgggggaaaggaagattggggaacaggatgatgagattgtctctggggcttattcattcgttcatcaaatatttattgagcacctactatgtgctaggccctgtgtcagttgctgggagtacagcgatgagcaaatcgatcacagttcttactcacatggagcttacactctagtgagtaaaatagtaagcataaataaaaagataacttctgatatta

SEQ ID NO: 117706 - DNA, 1011 bp, Homo sapiens
tgccgctgaggcatacagtatttaaaaacagttcaaggctgctgtgaactatgatcatgcccctgcactccagcctgggcaacacagtgagaccctgactcagaaaaaaagaaaatggactggatgttgggggcctagggtaaagttgcttcctcagtgattcccttctactctcccaacataacctttcatgatgagcttttagtcatatcttaagactcagcactttcgtttctggtagcaaattttttagcactgggtggtgcattacattatgctgtacgttattattgatgtacctgtttgcctttactgctaggaagggagccttgtaagctccttgaaggcaggaactgagagtcttagttcttgtcttggtgcttagtacctggcatggagggcaaattagatgcttgttgagtgaaggaggaaaaagtcttttctgcctggagtctagcttgtggatggaatgataacagatgaggcaacagtcagattatggagggcctccaataacaaatttgggcaaactgagaaccatctacagcccattcttcttccttgccacccagatctaatcactgatgaaatcctctccatgcagtcctcagcttatgtgtaatatattctttttttctcctatttcttttttttttgagatggagttttgctcttgttgcccaggctggagtgcaatggcgtgatgtcggctcactgcaacctctgtctcctgggttcaagtgattcttctgcctcagcctcccaagtagctgggattacaggcatgtgccaccacacctggctaatctggtattttaattttatttattttatttatttttatttttttttgagatggagtcttgctctgtcacccaggctggagtgcagtggtgcgatcttggctccctgcaacctccgcctcccgggttcatgccgttctcctgcctcagcctccctagtagctgggactgcaggcgcctgccaccacacccggctaactttttttgt

SEQ ID NO: 117707 - DNA, 1024 bp, Homo sapiens
cctccaatgtcttctgaatttcataacttttctttctttcttttttttgagacaagagtctcgctctgtcgtccaggctggagtgcagtggcgtgatcttggctcactgcaagctcctcctcccgggttcacgccattctcctgctcagcctcccgagtagctaggactacaggcgcccgccatcacgcctggctaattttttgtattttttagtagagacagggtttcactgtgttagccaggatggtctcgatctcctgaccttgtgatctgcccaccttggactcccaaagtgctgggattacaggcatgagccaccgcgccaggctgaatttcttagcttttctttcagcttattatctgccacttcactgtgcatcctctatttttcactcactgtggttgccggaaggtgctggtgttctttggcgccattgtccttcacaacctgaaacagcctccctgccctcaaacagtacgtcagatactcagtgagtccttcctgactatttggggaccgtcttttgggtgcccctggagcacttagaacattataccttctatcgtattataactcttttcctgtatagactgttgtaagcattttccccctactttttttggggaagatcttcaaacctacagaaaagttgaagtacagtgagtgcttgatttaccagctgaccattgttaacatttttcaaattttctcaattactcgatagaaactatttcagagtcatttgaaagtaaactgcagacctcatgggacttcactctttagcatgttattctgaagaataacataacaggccctgcataaccctgacactactgtcacactcaagaccttttacattgatacagtaacatgtaataccttttaaagagcagtctgagggttagcattggctctccctgggagctcttgagaaatgcagaatcttaggccttaccctagatatattgaatcagaatctgtgttttaacaagatccgcagaagtactgatttttttgtgcag

SEQ ID NO: 117708 - DNA, 1048 bp, Homo sapiens
accatcctaacatttcattaagttaactttgctgttaaaaaaaaaattggcattgagtagcatggttaaggtagtctaaatctgccacaatataataatgaaaattcaggagcagacacattttaagcatgatttggccattcttttataagtgaatgctgaacatctttggagaaggtacgtagttctttgcacaaatgaggcagtttgccagttatcagcccccttggttctgatagaactatgcttttattttctcctcattgcttctcaatttctctttctgttgtagattgctagctaaatgattgcatctctgcccctttctgaatttatagcaaacttttgctttatagccaggattaccatttataaggtaatgaagaccagataagtacagtttaactgtttatttagttccattaagcatgatccctcctggaaaaacctaaggttgctgtaattcattaaggttggctagctctagtaggttttgtgatagatcttgcgaaggagtgctctgtaagttaattggaaaagtagaaactgtcaagagtttaaaagttatttgtttagttactctgaacaataccattaattgtagagaaccagaagatacgactaagattaaggcaggagctttgtcttgggaggcttgtaaatatttgcaaattatgttgcataaattcagctcaactaatactatctgccctgcataaagctcccagccagcaacttacgggatataaagaaacataggcatggttatcatccttacacttaaaatatagctctgaagaccatatgctaaacctgagaaaattaagtttaataaaacaattcaatggctgttgagtgacaacataaatgaaaagagcaccagaatttcaggactagagggatttggagtatagaattcaacttctttcattttatagatagatgaaaagagcaccagaatttcaggactagaaggatttggagtatagaattcaacttctttcattttatagatagatgaaaagagcaccagaatttcaggactaga

SEQ ID NO: 117709 - DNA, 1012 bp, Homo sapiens
gtggtcttgatctcctgacctcgtgatccgcccacctcggcctcccaaagtgctgggattacaggcatgagccaccgcgcccgtcctgtgccaccttttttaagttaagaagtaagtgaaattatttgtactccaaagtatcaaaattaggaaaacaaaagaccaagaatgttttttgttcaagaaaaaaatgaaagtctttttttgagaaagtgaaatagttatgtgttgtacctgtttaataattaaacacaaatgtgaccacatatacctaaatgtctgcttgcagctagcttcacttaactttcctcttggctctctccctttgcaaccctggaaggttctgtgttttgtttgtgttaatgcagtatctctggaatgctaggatatgtaggatccatagggcaaatagttcttctgaaatgtcttatctgtgacatttgatgacatttggttgagctgttgtcaaacctttagcaatctagagcattccatttcctaaggttcactgacttgggttgatcagttgagtggacaaataacctttaaaaaccaaagtgtaggcctgacgtcacatgaatgtagacagcaaattcatctaccttcaatgaaacagatgactgggacacaggcattctgtgttaccagattaggcaaatgcaggttccttttggcacccctatctctagtgattctagatttgatgacagtataatgacagtataatgatgaaaattcagaaatttaacattgatacaatgctactgtttaattcagtacccatagtcaaattttgtcaattgtctcaatgtttttccctttctcaacacaatttcagtccagaatcactgtgtttaagtctctttagcctcctttaatctggaaatatttctttttttttttttttttttttttttgagtcggagtcttgctctgtccgcccaggctggagtgcagtggcgcgatctcggttcactgcaacctccgcctcccaggttcatgccattctctt

SEQ ID NO: 117710 - DNA, 2423 bp, Homo sapiens
gggaggctgaggccagagaatggcgtgaacccaggaggcggagcttgcagtgagctgagatccaccactgccctccagcctgggcgaaagagcaagactctgtctcaaaaaaaaaaaaaaaaagaaagtagctttcattcactttagcttttcatcttgtttctaaaggtggggcagataaagtgagtaggaactgaggtaggaagtcttggtgctagagaagcccaaagggaaacattctgtgtgtttgggaatgccctcttgtagtacccctcctatttgtaagcctgaaatcattaaatattaagaggttgtaaggtttactgggtcttcatgtgtaggctagttagaattttttcatctatagtgaatatagctttcctgatgcaaaagtcccaaagtaggagaagatttgttacatatttcatgtttgtgtttgatgtttgcctgactgactttttgtttcttatttagaaatgactgctgtccatgcaggcaacataaacttcaagtgggatcctaaaagtctagagatcaggactctggcagttgagagactgttggagcctcttgttacacaggtaagaatctgaaaacacaaatacattgtaacatggttctatagcacaggcctgggtaacaaccataagagcaaggttatttagttcaaagccttaattccagtacttgagtttaggtgacagttcttagatgatttgaatattgatgcatgggtttagttaacccttgagaacgctgctgctgtcgttttcttcagtcttattgctagtaacgggtccatggtatgtagtgcaactttgcaaatgtttgtgctttgcagatacttcacctttcttcagaggggaaacccaagaaaggtggagtctggatccttgattgttaaggtctctcactctgcttaacacacctttcattgtgtgggattaattagcaggtaattcaacttgagggtttaggtttggtatgctacaaatgtcacaatgttagggtagttcataaactgttagcaactagctgtgtacttttagtgttttacaatagtatgtctattgtttgtatgtgagagattcagagagagagagagaaaatgagtcttgtttggcaaatttacactataacatatattcatcatctttaacctagagataatctggtattatgtgtattaatgatggtaatgttctaagacataaagcgtcatcactgtaggcttctttgggcaatcattcgtttattgggacctttactaattgctgagatttgtgtgaataaactgtcaaaagacttcagaagcaaattatcttaaaatgttttgcaaagtttgaaaacagtggcagtgtgatctccagataaagctaagttcattgttaacctctttctggaacatcttggtgacatatagtagagacatctaacttgtctctaatcattttttaatttgtaaaatcaaactaaaaacctaatgatcatatttgagaaattaaaatatgtgttaaataattctctgtacacattaagaaagctgaattattttggaaattaaatatagcatcattgctgtatatcttaaatatggggaattgtatgttaatgttcagtggaatctcatgtgattttttaaaagaataacttaatcttgctgtctttaaagatattagtttgtcattttaattgactccagtttaatgttaaaaatgaaacttttaggttacaacccttgtaaacaccaatagtaaagggccctctaataagaagagaggtcgttctaagaaggcccatgttttggctgcatctgttgaacaagcaactgagaatttcttggagaagggggataaaattgcgaaggagagccagtttctcaaggaggagcttgtggctgctgtagaagatgttcgaaaacaaggtaggtcattactgctttttaggtaaagagaggcaggcctttctagaaaatcagtgtttgaagattttttttgtggtcagtattctcattcttatgcttgccaattgctcagtaacttacttagttattggagatgtattaagttggactggctcatattttaattctcattcttatgcttgccagttgctcagtaacttagttattggagatgtattaagttggactggctcattttaatcatgagagatgcttgcagagggacatctggagaatctgaatccacttctcttgggtatttcaagtaatagttaagtcttagaaatgttgtaacacaaattgataggaaagaaatgggaccgaagtttacttttcatcctgtgtaatacttctttttagttcatgctgaagagatgggtgtgataaaatggaaaaatatctacctactctgaaaatactctagaaattgtcctattgtgtcagaatagtatgttaaatc

SEQ ID NO: 117711 - DNA, 1126 bp, Homo sapiens
tcttggcttacttttttctttggagaatcttaacaaatggtgataagatctcttttctatcataaatagaacaaaatacatattacaaaaatatgaagcacagattgcttaatcaactgagacttgttggctatgtcgttgaagccatttactcatcgtttgaaaccctgtagtggtgttaataggtctgcagattctttggacacccctcccttaaaaaaaaatagagcctaacccttgaacatgggttgaacttagtgattcctacaatgactagaatgtggtagaagtggtgctatttactttgggagcaaagttataaaaatggggccgtatccactccactttttctcatggattattctgtctgggggaagctggctgctatgtcttgagtgcactcaggaggtcctgtggagaagaactgaagtctccaaccatcagtcagcacacatttgtcaagcatgtgagtgaaccacctaggaagcagatcctccacctccagtcaagtttcagacaacatcagtcctgaccaaccccaaatccctgacccatagaaaactctgggagttaataattgttttaagctgccacctcttggaatttcttaggcagcaaaagaaaatttatacaaacacttttccctgccctggcttcagtggtcctgagcatttacgtaaaaccctgacctaacttttctgaatttttctgataaataaaaatatgccatccactgaaacacttaatttttaaaggatttttaagatgtctttgttctgaatcactgttgacgttgtttaggatgggggttggtaaatttcttctagaaggccaggtaataagtatttttggcttttctgatcataagggctctgggctgggtgcgatggctcacgcctgtaatcccagcactttgggaggcccagttgggcggatcacgaggtcaggagatgaaaactatcctggctaacacggtgaaaccccgtctctactaaaaatacaaaaaattagccgggcgtgttggtgggcacctgtatacccagctgaggcaggagaatggcgtgaacctgggaggcggagctggcagtgagccgagaccgtgccactgcactccagcctgggtgac

SEQ ID NO: 117712 - DNA, 1100 bp, Homo sapiens
cataataaccaaaagttggaatgtacacagtttttgatgtgtaactttctttttgtgttagaccctgattacataaataatgaatatgcacatttgtgagtatactaaaatttcaccataatgctgtaagtgatgttaaaaaaattcacgtacataaaaacaggatcatttgacttcaaggctaatgaaatggtcaggtgagccacatgtggtggataggagccagtcaccaattgcatggcttccaaatctctgtgatctaagagtttaattgtactactaatctgcttcgtttttgagtagctaccttatataggcagaggtgtacatatgcctcttagatgtgctcttttcttattttaggatcctgtttacctcccgtatccccccatccttatcagatcaatcttacctttgttcttttttgtcttagcgcttatcacagtggtaatttaagttggttgccttttcctctctacgctccagcagtgcaggttctgtgctggtctggtgaccattctgtttgtatctatgatagtacctggtccgtgataggcacttaaatgtttgagtaagataattgattattctccgagaagtacagtaagagaaaatgcttttttctcgaaatttaaagtgtgttttcctttccagtgccaaatgtaaatgcatgggtaggggtggagaatcttatgttttttttaaaaaattgagatataatttcacataccataaaaatcacccatttaaagtatacaatgcagtgttttttagggtattcagagttgtacagctatcaccatgatctaattccaggacatttttatcatcccccaaaagaaacctcatactcattagcagacattccccatacatgtacattttaacagtagataaagagtagcagctgccttgtggtacataaatgtattttatgaatccttgaatagggctctgaccagaaaaagaagcctcttaagccggataggggactttcaggggacagagatgagaagacctaaatgaagcttttttgaaaaaggagagatattatgaacagaggcccattaatgttaaatttgaagtggagtgatgaggaa

SEQ ID NO: 117713 - DNA, 1640 bp, Homo sapiens
gagaggtttaatatagtttggagcatatttagagggtggcttggaatgccatgtggcattacatggttcaggtcccatatgcttgaatgtatcaagtgacacaggactcactcactacctcaagggggagctctttccagtattggtttgtgtttattttaaaagcttttttttccccttagaaactgaaatttgtctcttgaattttcttcctgttttaagaagttccaccatctgggcaatacagaatatgaggaaaagtggagtttttgcagggagattagtgttagctgtgtgcaggaagggttaaagtgactggtagacagcccagaggtaggacctagagtctggagatgaccatagtagtggggagtgaaatggagctgtgcaggaagggactgctataacagaattgatggaaagagagaattggccagttgtcatgcatgttaactgccagcagggcctgtgcaagtagctgatcttttcagtaggtaaaactaagggacctggtatgtgaaaagttgtagtaatttattttcctgtgacttgaggcatttagggtggtgttgaggcagcatgtgctgctaagaacctgtgttcttacaggtgtaaaatgctgccttttaaaatgtttgcattatttgcttgtaatggatgtcaaaccttattttgtgttcattaatcacacgtattaatgtttattaatacatctgaaacatgttatttgtgtgagttcctatggcaatgataagtattggtaaacattagtgctcctttctctgttgatttgttgaagccctgttatttttctttttaattggaattccaccaagttttcaaaaattgagacatggctcattgggctggagatgctgatcttttagatttctctttactaatctaatggcatagcagaggttaaattaccttggagtagaaaatcaagaaatgattgtgtgtgtctgcaattttggttttaatggtaggacaagattatggtagtctgggaaaaggtgattgagtgctgctgaacagagcaaggattgattgtagctaagtctagtgacttactgcctgccatttggtttgaccttcattttgtgactatcgtaccactaaccacagccagtcacctctcatgtatgtgttgttattctcatggcaaacactgtgaaaacctctgggtaattcactgcagcctcttcttcagtgctgaaaaaacattttatagtgacaactatacatcctttgtcccccagatggccagaaggtgaagatagagtaagttcttttactaaatattcctgtccataaataaaaagcagacatcttaatgtttggcttacagttttttcccctttcatatctatttatgtttagacagatttgtcttaagatttctttgaaacgtttctttttaggttttggctttcaggtcattccatttcaggcaaactttgatactgcgaatgcattttccttgagtagaagatctcaacttactgaaagcagtcagtgttgttaagtactaaatctcaatcattacataaatcatcttttatgtaaaaaatgtcggccgggtgcggtggctcatgtctgtaatcccagcactttgggaggccgaggcgggcagatca

SEQ ID NO: 117714 - DNA, 1734 bp, Homo sapiens
atctcagtaattgtgtataactgtgtagtgaagctaaggacatagatgccatcttccttggtacagcttgaataatttgtatatagggagaaaaaatgtgtacacacatgtatgtgtatgtgtatatatacatagttcactgtgaatcttggcaaggcaattttcagaaaaataatgtatttcatccctgacaaaaggttattgagcacaagctgtcaggctcttgaggcatgattttctccctggcaactgactagagtcaagattgaaggaggcgaaaattggtctcctgtccagtgcagatgttgacagcttcagactgatgtacccacatctactataggcagcctggaagatagatgttaaaagacagctgtgattaggacaaagcacgtatcagtgactgttttaagtagagtttgagacgtagacaggaggcagaatggaatctgggtttgctgggttcatgatgtgaagacttaaaacatagctttgaagagcattgtgtgggtgtgtgtgagagagattgcattttaatttgtctgatctggttagtgtggttttaatcgggttgagatcatgagcttgatctcacatatgggctctttaatttttcacaagagaaaaatgacaagtgttcctactttggaatgttgagtatggatttcaaaaagtgttaatgatgctctggaagagcagtagctgggaaacattcaacattttgaaaaagattaaagttaagttaattagcttttcagattagtacaataactttattaaaactagcaagaaatcagctgatttttttctcatagtcttcctttgagttctggcttctcatttgttatcttaccttttccccttgttgtcttagaattttcatcctgttttctcctcttatttttgtggatgtctcttttcatgtgatcccattgtggcttggtcttttgttagaagtgctcccactccaattcatacctttcagatgttcctgaagactgtaattaatttaaaaattgttattgaccccattccttcagtctcaccatttaatccattttttcttgttcttcatttaacttgagcaggaaaagcaaaatataaattctgaaaaatcattagctggttgtcatctgggaattttatgtcttaaagttgtctgcctgacttaaactataagtctttagggcagaggctatattttctttgacttgggatgtttcaaggatgctgtctgcttctggatcactacccttgtgtgagcatatgctgctttgcagagacttgtgttctgctgtagccagcttggaattgaggaaagaagagtgaagttattacattctaatgtcattttgaagtggttcattttttccccttttattaaaaagtctgtcctgttaagctcacaaaaataaataacactaaccaggataataatatttatgagttacagtgggtaatattactgccttaatatatttgtacagtcagtgtagctgaggaagttattttaggtattaaaattttagttttggcatgacttcaaccatgatgttgcagtaacatgatttctactagttaatttcttaagaaagtgattccaagttgaaatgcatgttatgcatttatttgaatgtgtaatcaggaagtaagtgcctctctttggagtgtttctgaatagcagcagggcacacttgaattagtaaggaaaatgagaacatgaatatgtgtgtt

SEQ ID NO: 117715 - DNA, 2636 bp, Homo sapiens
gttaaaatcattttgagataaagagaacaaagttacttgagcaaggttatctgggaaatcagtgggagaagggagagttggaattccaagtatgctcatgaaactgatcctgaaatgagtaatttgaacatgtttaagatagttgatggtgtctaactcttctcctggaagcttttgtcattttagcgcagggctgtttttgctggtttgcagaagcatattcaggtggatgtctttaaaatctcttttctcttttggatttggcagttgataacaaacaatatgctcctgtaaaatgttctgtttaagaaatgcctacctaaggtctgtgtaaccattgaatcttcttccctgcagcaactctacagaaaattttaaaaatgagattggggctacagatacccatttattttaccacttggcttactcttattttggataaaacccctctagttagctgactttataagcttttacagaaagattttgtaatatgtgcaagttttactttttcatttttgcatgaactagcagccatgggatttttatacttcagaaaaaagaaaatttgaagcctgagttttattatcatacacacaaactaaagatattggcatttttatcatttaaaaactttttttatataaaagtatattcactatagaaagtaaaaataaacaataaacaatcacccatcaggctgtaccaccttatgattaagctctgtcgatattttggtatgtgttggttgtagtgtttaccatcccatccctttcccaggacataaacacattgtgatctccattctcactgtgcagtacagattgttatatatctgctatttaaagtggaaatgaaaatcatttccattaatgaagatacctgggtgggggcagattgtataatttatcgaagataagctgtgtttctctactgggctggcaaaaatattttttctggaccttaaaggtagaaaggttctggtgaagaagctatttaaaagtatccttagtattattttggggaaggagatataactttgccctatttattgaggtttttggaggacttttacaggcagtagagatgtttccatagctggatttctgagccattacgttgtggttgggaacctttcttttgtagtatactgtagaattttgggatgtgacactgtaaatgggatagatgaggaagatgaccagttcctgagaactggaaggaatcccagcttgacttgagaacttctttaaaacaaaatgaaacaaaacaaaacaaaaaaactgctaaaaaaaaaatttaaaaaaagcagttggaaaaacgtaaggcacagcaagctttggttgtagctattagcacaaaaggaacaattattactactttctgcactatagacagtggagtgaaggaagctcccctcatcctttacagcttcagcatttaaaattaaaagctaacatttcctctgtcctttaggaaacttggtatcatgactttatttctaaaaaggtaagaaacagctggtgtgtggataatgacatgttctaaataggtttaaaaactggaaaaagtagatggaaaaatagaagggggcacagaagtatttgttgagctttgcatatattatttcatttaattttcaaaacaactgagtaaggtatgggagatgtgtactcattttacagaaaagaaaacagctagagataaaacaacccaaagtaacacagctgccaaatatcgaagctggatttagacccagttccaataccttatttcatctacaccaagtagtgttctgggagagaagtagttatattcattaacattacttcatagcattctttgttttaaaggagcaatgtaacaggttcaggttaaaacaaacaagccttttgttttttttatccatcacccaaatattttccaagcctatcctttccccgtaactttataaagtttggttgctttcaggggaatttactcatgatatttgatgcttcaaaaacttcttgattttgtcttctcctaataaagaattgtgggtttttttgtttgtttgtttactttataattgcccattgtctttgttttaaactccagaggaacttattttattcccagctcaggagagaacatcaggggatgacagattttatttcatggcagatggtacagtagtattgagctctcttaagtttcatctcctttgttagtagatgtagtgtagttgactggaaacagctgggacaaagtcaggttttacaaccgtgcgatcttggatatagttcctgtctacctcagtttccccagtttgcccttttgtgtgcagagagcacttttgatatcttataaatttaaactaacaggtatctttttaaatttttaattttttttattaaaaaaaattttttttgagatggagtcttactctgtcacccaggccactgtgcctggctaatttttgtattattattttttagtagttctggtcttgaacctctgatctcaagtaatcccctaccctcagcctcccaaagtgctgagccatcgtgcccagccttctgccacattttgtttttttagacagagtttcgctcttgttgcccaggctggagtgcaatggcgtgacctcggtt

SEQ ID NO: 117716 - DNA, 1077 bp, Homo sapiens
tagttgggatgattaatgaagtgtggtggttctgcataattgtggccctgtttctgtattctatggatgtgagagtagattttattagatatgttttttctcctgttcaaatcttgaatttttcttttttttggatacatataatgcccttttttttttaaaggaacattattagatcaaagggaaatatttttaagcctcttgatatatagtgccaagtcactttccagatattttgctttcaccagcaatatatgaaggtgctttttttagtgatagctataaaacaaacaaaggaacagcaaacaacaacaaaaatgaaaactcttaaactaaatttgtgcatgaaatatacaaagtttggattatttttatatttttaaaaatgtagatcagttatttgagttcattcttgctgagtttgtttttcattctgtaaaacaggtgatttgatgaaggctgctgcaggagagttcgcagatgatccctgctcttctgtgaagcgaggcaacatggttcgggcagctcgagctttgctctctgctgttacccggttgctgattttggctgacatggcagatgtctacaaattacttgttcagctgaaagttgtaagtatacaggcctatgtctgtaatttgttctatcacaggaagattgctactggccttccttagttcagtattccttaggatttagtttggttttgaatttggtttatctcaatggaccagagatgtttttgtttaatttccacttactcctctattccaagtatatatcatcctggctctgttctgagccagtgttgtcttggctgtaatgaagaacttgtagcaaagatactgttttgactccttccctttttccagtaatgattaaatattttccttgtagagttctggagttgagaaaccaagatacattaaattttgtacttttatttatttatttattttttccatttaaccctgagtggacacagcacatgtttcagagagcacagggttgggggtaaggtcacagatcaacaggatcccaaggccgaagaatttttcttagtacagaacaaaatga

SEQ ID NO: 117717 - DNA, 1056 bp, Homo sapiens
cagcccggccaacacagcgaaaccccgtctccaccaaaaaaatacgaaaaccagtcaggcgtggcagcgcacgcctgcaaatcgcaggcactcggcaggctgaggcaggaaaatcaggcagggaggttgcagtgagccgagatggcagcagtacagtccagcttcagctcggcatcagagggagaccgtggaaagagagggagagggagaccgtggggagagggagagggaggggaagggggagggaattttgtacttttagaggccaatattagtgtttttcccactatgaagctcctgtgtaattgctgtttaaatgttagaagaccatgcgcaaactcgagagctaagtttgggttgctttttgagtagttgttaacaggaatgaaaattcctaggatgccatcttctttacagacctacattcagaatttttgggttttggggtctttcttattttataggtggaagatggtatcttgaagttgaggaatgctggcaatgaacaagacttaggaatccagtataaagccctaaaacctgaagtggataagctgaacattatggcagccaaaagacaacaggtacagtcatgatttggggatatattaaagttgttcattttactatctagagggaaaaactcattctgtgtgttttctgaaagtaccattacttaccttcgccaatatagttccattaaaacatttaaactaaggtgtcttttcagtattgtgctgttaataaagttgtaattacattgcattcatgttatgctcctattttaattcttgtgaacattttatcttaagtagcttgacaacttgtgatgaaggtagtgtctggagaggtaataggtctttgtgtatttaaggattaacctgaattagtggtgcagttttgttcagatttttaataaaatcttaatccatttaaatatactggaattatctctgtatcagaaagtatctccataccttgccccaccagccccgtgtcttgttactttttaactgtttcttattgttattagtattttccattgtgtggcatgag

SEQ ID NO: 117718 - DNA, 1019 bp, Homo sapiens
cgagtagctgggactataagcgcctgtcaccacacccagccaatttttgtatttttagtagagacggggtttcaccatcttggccaggctactcttgaactcctgaccttgtgatccacctgcctcggtctcccaaagtgctgggattacaggcatgagccaccacactctgtctggaattttgtatgctattcaagaaacttactagaaagtaatgctacctgagttgttttttttcttttttccaaagccaaatacttctcaatgcctaagttttaataccatgttccatggatctgtgaagagttccttgaacataatcccttatgtatttttttcatgtgtttttttttgaaagtagtagcaaatgccaaagttttctgaaataagatgtcacagaaatattggaattattatatacatgctggataatcttctgtttgcccttccatattgtttcccacccttgtttaccctattctctgccccaggaacctaacctgcctggatttcatttgtgggctcctgcttgggcttggtgagtgggagcaccagcaggaggtcaaaggagatagagtgatgctagggtgttactcttaggcctctttcctgctgggtgccctgggttgctaaaagtgatggcattctctacacatcttgctccctggttttggtaactgctgcctcctcttgtcccttcattcctaagtgtcctaccagctttgtagtttttctgtattttgtccatacctatgtatgatagtatagtctctaaactgcctttgagtcacccgatttgattttattctatttttttctgccagaattttgaatgatacgtattcgcattttcttgggtttatagtaagtcatgagtcatttgtagttttccttgggcctaagtttttagccttagcctcctgaaagagaattcactgagtagactggttgtgggctcctgtgtacccccgttcacaaaatggtcttttataggcttgggccttggtgtatattccagt

SEQ ID NO: 117719 - DNA, 1026 bp, Homo sapiens
attattcttattacagtaaatagtgctgtactgtgatagtgtccgttttctttatgtaacaaaatctaatttctttgtgctaaggcaagagcagttctaaagagagaaaaaagaacactttagcagtcaggacaaatgatggtatttcgttattattttcatcatagattaaaatatatccctcatactttgtaaataggagtctatcagagatacactgtgataagggcaagacaattagaaaatggcacacagaacatatgcaccagctgtttaagcataatggttaaccctagctccttgtcataactcgagtcttgaaatgatcaccaattctctaaatccacaggatcttgtttctgaatatttagcctaatgtagtctttggaaaagtagaagttggtaataccataccaggcagtggcttaggaaagtcatgtgttgaatagtaattatggcacctgctaacttgagatgaccgtaagtgtctttggtaactaacctttataagaagctatgctgatctaggtcatagatacttaggaggaatgccaaagctgattgcaaagcatttttataaaacggtagacaatttaagtacttaaaggcaaatgccttcccggaaaacttttagagcccctcagattgtggtgaaggcaagacatttagaaaatgccacacaaaacatgtgcaccagctgtttaagtgtaatgtttagtcatagccccttgttgcttgagtctttaaatgataactgattctttaaatctacagggtcctgtttttgaatatttagcctaatgtactgtgttacagggcatttggagtgctgtgagctattacttgcaaatttagattccaaatgagaaaagaattctaggaggaaaagtaagctgtcatgttatacaaggtttgaataaagatgcaaacctaaatatatactgagatgaagtttcagaaaaaggaagccagtttggtgtctctaatgcctaattaggaactcatctagaaagatgaaccactaaa

SEQ ID NO: 117720 - DNA, 1588 bp, Homo sapiens
tgactgtatctcttcatgatctttctatcgttggttggtataggtacatatatctatatagagttgtaatcaagatgctaggcagtttgttttgtcttttatttaatgccttatttagtgctgtgctaagtactttacatacattatccgatttaatcctcaaaacaatgataagaaaggtactgttactgctcttctttgacagaaggggaaccttagccctgagggtttaaaataaggtcataaaatagccaggagaaagtagaagtgggtgtggggtggattcagatctaggtctgtgtgattccaaagctcagaatcttacctaccaaaccatactgccttctttgtgattgactctcaactagattgttaatgaaaataatgtgtctaattaatagaaattctaacttttcagcatttaccagcaaatttttatatgagtaaagcccatataaagagtgctccaatttcttgttttatttactcttgtaggaattgaaagatgttggccatcgtgatcagatggctgcagctagaggaatcctgcagaagaacgttccgatcctctatactgcatcccaggcatgcctacagcaccctgatgtcgcagcctataaggccaacagggacctgatatacaagcagctgcagcaggcggtcacaggcatttccaatgcagcccaggccactgcctcagacgatgcctcacagcaccagggtggaggaggaggagaactggcatatgcactcaataactttgacgtaagttatgcttgggtggaaatttccagctcttgaccatcccccaaaagataacagatttctggggaaaagtgatcaaggcttctgatgatagctcaatttccacttagatctttaatctaagtcaaaagaaattatgaatcatcagtctacttgattttaacttggcctaaaacatttatttttatttttgtttttagtttgaattaaacttctggattcttttatgtagcttgtgtttcctatgaggtcattctttactgaggatatgggtttggttcatttcaaccaagattttgaccttctggcagatgtgaagctatggtagatacagaaactaagtacacgtagggtcagccccctagaggctcgtggtctattgggagatagagaaacatcataagtgactgcagcaaaagtaccatcattctaatctttcttgtctgcctagatatacttcttttcagtgactaaattggaataatgaacagaaatttaatcaagtggaagcaaatttgggattaaaatactttcttagcataatgccataattacttttcataaatgatgcgctaggtctgtcctgtgtacacaactcttaaggttaactttttggtgggttatgtgttcttaattcctacccacagtgcctcttggcttccagtagatggcagcagtataagttttttttttttttttagggctttaaaagtaactgttggggctaattaaaaaaaaaaaaaacaaaccaaaaaacagaaattgtgttccaggtgaccagcatcctttcataaagtagggatgctatgaaatatagaataaa

SEQ ID NO: 117721 - DNA, 1102 bp, Homo sapiens
taatttttttgtggtgcaacagttctaaatatcacatggcagttttatattctgcaagtaagaggtaacttttattttccttgtaattctcatctgatgatttgaattgctagtcttatacgggtttacctttagatgttcagaataagttgtgtgagcatgatatgtttgtatttgtggtatcataccttatcatgccttgtttggctacatagcattacttccactgctttctttgaggagtgatcaacagtaggccatcttctgtgggacagccccttacctgctaagaagtataactttctttcagatgttggaatttttgtgttaaatcttgatattactaataacacttttctcaccttgaataaagaagggaacagagatgagtactaacattcggtaatactttctctgcagaaacaaatcattgtggaccccttgagcttcagcgaggagcgctttaggccttccctggaggagcgtctggaaagcatcattagtggggctgccttgatggccgactcgtcctgcacgcgtgatgaccgtcgtgagcgaattgtggcagagtgtaatgctgtccgccaggccctgcaggacctgctttcggagtacatgggcaatgtgagtttgacagcttttctttgaagtaagatatttatggatgaggagttttctataacatgttggatctgagatgttttcactataaataccaaatatgtccttgactccttgatttttgggagtaggtcagatttttaaagaaatggataaatggctaagtggctctttcctctctccagcttattgagaaattttcaacttataaaaatcatacagtgaatacctaggaaatttatctgtattcatcaattaacatgtagatacatgtgtaggtgtgtgtatatataaatgtatatgtatgtatggtatatacacaaacatccttttttcccccgaagcctttggaagaaagttgtagacattgtgatgcttcacctctaatattttagcatgcctctccaaagaataatgaccttctataccactaaagtttcattatcccaagtaggtggctaattttgggcaaaagggaatg

SEQ ID NO: 117722 - DNA, 1049 bp, Homo sapiens
tttttaaagccattgccccctgggcatgatggttcaagcctgtagtcccagcgttttgggaggctgaggtgggtggattgcgtgagcccaagagtttgagaccatcttgggcaacatggtgaaatcccatctctacaaaaaatacaaaagttaactgggcatggtggcgcacgcctggtctcagctactcgggaggctgaggcggaagaatcgcttaagcctgggaggttgtggctacagtgaaccatggtcgcgccactgtgctccagcctgggcgacagagcgagagtgtctcaaaaaaaaaagccatgttttgattataggcagtctacttaagaaaaatgagattagaggttttgttaaatcaaatggaaaaagtggtttttaagtcacagtgaaaatgtgggacacatttaaaaatccatagctaagattgaacattagaaaatattttaaaagatggatatgttgcagaatggctcacaatgttgcagtcttaaacaggggaacaaaaactcatggtaagtggatcagtcatctgctatcatgggtagtgctggaaatggtgtaaaagtgtcttatgtagttatgatgaggaaatcacttcaaaaacagactttggtgggaaggaggatgtgataaatctgttccgattgctccgttttagagcctcctaatcagtctataagatatcccttgagtcttgaggttggtcacattcttgggccaatcacccctggtcatgagtaaccttgaggtttcgaaacctagagtgccatacaaacagtactgtctattcatgccatcagtgtaagaaaaggtgggaagcactcatttatactgaagacatggagactgcagtagcattcttaaatgaaaactggaacaatgtgtgatgtgaggctgaaatttgagtattatggtagggatcttgaaagaaatcttggccgggcacggtggctcacgcctgtaatcccagcactttgggaggccaaggcagacggatcacaaggtcaggagattgagaccatcctggctaacatggtgaa

SEQ ID NO: 117723 - DNA, 1070 bp, Homo sapiens
attagccggacatggaggcgggcgcctgtagtcccagctgctctggaggctgatgcaggagaatggtgtgaacccaggaggcggagctttcagtgagccaagatcacgccactgcactccagcctggggaacagagggagactccatctcaaaaaaaaaaaaacccaaaaaataaacaaacaaaaaacagaaaaattagccaggcgtggtgtgggggcccctgtagtcccagctactcgggaggctgaggcaggagaatggtgtgaatccagcaggcggagcttgcagtgagccaagatcgcaccactgcactccagcctgggcgacagagcgagattctgtctcaaaaacaaaaaagcacaaaagaaagaaatcttcttgagatttagaaatgtattttaggagatggtctctgggtatgtttctcctaaaggtaaaaatctttagtttccttttattgattcacgtaacagtgaacaggcttggtcctgtcaaaaagcactggagtgaggataaacggtgagggcagtggagcacacttgaagaaagcttagaatgataaaagggtctggaagaagcagaagcaactggggatagatttttgcttatttatgaagcattcaaaaacatttagaacctctagtgagtgtcagaatataaccagcaatgtctgcctgtcagtcagttcattctgagtatgtgacacatgcaaagcagtgtgttgggcacaatgtaagaggaggaatgaggctctgatccctcccttctggaacagacaaagtttctatagggggtttaatgggagtgtcatcataggtacagccaaaatgctgtggaaattgcaaggaggttgaggttatttctatctgggaaatccaggaggctttctcttctagaagatttattttgtaatcttttggttaacttctatcttgattttaaaaaaatggttcattttatttctgttgaaaaatattagacaaattatgttatgtggagaattgaaatcacctacattaattaatacttgtttactacgtggaactttgtataaacattgttgtaaagtc

SEQ ID NO: 117724 - DNA, 1027 bp, Homo sapiens
tgtatatatgtatgtatgtatttatttattttttgagatggagtttccctctgtcacctgggctggagtgcaatggtgtgatctcggctgactgcaacttctgcctcctggattcaagtgattctcctgcctcagcctcctgagtagctgggattacaggcgcccgctaccacgcccggctaatttttgtatttttagtagagatggggtttcaccatgttgaccaggctggtcttgaactcctgacctcaggtgatcaacctgccttggcctcccaaaatgctggtattacagacatgagccactgcaccaggcctgttttgaagaggaatattggatatatagaaccaaagactgttgggcaccaattccatttggtcattctctcaaaactgccattagggctttttgtaatgtcataatttggaaacataaggaagatatttcctttgagttactttatgctgaaataacatctggtcagtaaatatcctacaagtattactttcagatgttttgaaatgattggcctcctgctctggttttaaccccagttgaagacactttaatgtttgcagtttataataatctaccaagttgaatacagtgtgacatcgtatttcaaggcttccttaagggctaaccgtcctttaaatttaacactggaacatattagcctgaattacttctccttgctttgagagagaattactggttttatagattcaaacatgaaagtcatcttctaggagtgaaaagattaatgttttggcttgcccttgctcttgtgtctgtaagaatattgcttactatttcctggtataaaatgacctgagatattttattagaaaaattataccggccggggcaacatggcaaaactctatctctataaaaatattaagaattagccgagcatggtggcacacacctgtagttccagctactcgggaggctgaggtaagaggagagcctgagcccgggaagttgaggctgcagtgagccatgatggcaccactgcactcca

SEQ ID NO: 117725 - DNA, 1019 bp, Homo sapiens
agatttgaacagatatgaaagttggtttaggaggaatggttacatacaagataattccttacagagtgagatgtatgatttgtttaaaaacattccagcagaaaaaccaatggaaaggtgataaatgaaacaagaaagcagaaagttgatgatttttaaagtttggtaatggttaagtgagggagttcatttagtattctcaatccttttggtggttatgttagaaaaaactcataataatttttttttttaaaggacatgtcatcaccatgatggttagttgagtaggtgttagcatgttagatgtctgagagcacagtccttgccatatgtacacccttcggagggcatttgcatgctttgcaacccctggaaggccttgttttatcccactcagtcctcttctcactctccattttataggctggctggtgcctatgctgattcttaagccaattagattctcttggggatttgtatgggtaaataatgggaaaatgatgcaattagtaatggaaactgaaaaaggaaatgatgccattatgtagagccagggtcataggggtcttgacaaagtgaacttatggctgagtagcagctatgaattagataggcagcaaagagggtgagaatgggtcaggcatttgagattggagaatgggatagccagctaagaggagtgtcctgggcttcctgtatggccgcttctaggggcagtggcccagctgtacttgggttcttctgtatatgtgtccttgaagtaaaaccctttgtcactgtattcaatttgggtttctggattcccccaaaaggagtctactgtagttactgaacagtgcagaattttcttggctaaattaaaagtaagcactttttttagaaggtcaaaagtgatcattgcctattcatctaggcattccattgtgcaattcttaaggctttttttggagacttggcccttccccaagtaatttaatttttctttttaaaccaaagtggaagcaagtttgtggaaagca

SEQ ID NO: 117726 - DNA, 1039 bp, Homo sapiens
agtacgaaaccttttgtctcttagctgcttgacttttatataatttagtagtgatgtttacattgttcactagactttgattgaattgaatttaataaatggcagtaatcaggtgttttttggtggaggggttagcttgctgtcttcaggtttcctatgcttgagaatttgcctcaacacaattttaggtggctgtaacactattttgttggccagtataattttagattcctcactttggttgttggttgttaaaagacatagggagctttgtttgactctaaatctaccattgtctgtctctttccttttctttggtgttcttttttaggggacgaaagtaagaattgagaagatctggcttagataatgctagtaatggagattttaaaaaattacctattattttattattataaagcactagagcaagtatagaattatgtatagtaagtaggatatacaaagaaagaaaagattggcattcattggctctggggagtgggctaaggttaaaacaaagatttagagtcaaaaattaattagtgtgcaggagacagcaaacctcttggcttggtgggaatgaaaaactatttaataagcataactggctagaagcagtcttctttccccattagtaggtggctcactgacattgtcctaggtgtttgaaatgtttgtttttctccctttaatttgctcctgtgtataaagttactgccgaaggagccaggactgaatcagacttgagcaatacggggcttgtggaaagagatgttttgatcatattgttatttttgtgtcataaaatcttagattggcaactttcttctagggtggatttagcctttgatacattttcttaggcccacgaaaatgagctgctaaagtagaaatgaataaaactattcggtttagcctctagacagtgacacattaaggactaatgactgccaaaaggaaatgtcaaacactaagctagtctactttctttggcagctgagaatccggtgaatcaacagttttagggggtgtatat

SEQ ID NO: 117727 - DNA, 1021 bp, Homo sapiens
gcatattttgggggaggggcatttctctctaaattgatgtactaggagatagagcatatttttgctgccccaagtaaacttttgatgcattacaaaaaggaaacatttgggcaactcccatttctgttgctttggagcttaatagtcattaagtttgtgtttctttatgtggtactgagtaaaagctgaaagtagcagagattgtataggccagtatatcttttgttagttttgaacttgttgggagcacttataattacctgtgtttctagagataaatcaagtggcacctctgtttctttaagttcttctttacctagctgagattcaggggtcttgcttcttgggtaataaattctacctaatttgaagctttgctttccttccagagatgtttgaactacatttactaatgcatatatgctgttggcataaagataaatttgttattgaagggattttctatggagagactgttctagtcttgacagctgcactgagcatgaaaagttacctaagctttcccaagtctatgtttcctcaactgggaactggggatgataatggtgcctatgcacccatcatggttgcaagtgtatagaaaagagtcatgtaaggcacaaccactgctgttaatactagtgttactattaacattgctataactaataatttatatttgaattgttcacactttaagtcctcttttttttgtttgtttgtttttttagctcttctgatttccagtagtttcatagagccattgcatttatcattctcctccaagagcttagttctctctctgctcccccttttcttctctcttcttttacagtcatggtcaaatacatttggagaattttcccttttacatgtgtattctgataataatgtctaaagactgtgtccctgttgactgtgctgcatagcttattttattgctctccatttgtcttaactgtcttgcctgaagttggtagctttattcctagattcataatatgctctctttactattaaa

SEQ ID NO: 117728 - DNA, 2755 bp, Homo sapiens
gattgggcctggcatacttttttttgagatagagtctctctctgtcgcccaggctggagtgcagtggcgtgagcttggttcactgcaacctccacttcctgggttcaagtgatttcctgcctcagcctcctgagtagctgggattacaggtatgcaccatcatacccagctaatttttgtatttttagtagagacaaggtttcaccatgttggtcagactggtctcgaactcctgacctcatgatatgcctgcctcggcctcccaaattgctgggattacaggcgtgagccaccttgccctgcctggcatacttctttattgttaattctgagttatctggcatggggaagcatggctctgatcgtcagtgttcattctctgaattgagttttgtataggcatctctgtataaaatttcttgattattctttcctactggttttggctttatttggtgattgcatttgaagtagactgtttatttgaatactgtaactattcatgtagtttcatgttcattttttataagttgtatttcctctctatttttttttaaaattagcactagaggaaaaagctattatgaatagggttttgttgtttttgttttaacaaacccactatctcattgtttaagagaatttacacaccctagaactggttgaataattaaccaaaaacagtaaacctaggcatagcctatgtatttaaaaaacaaaaacaaaaacaaagacggtaggacaggcagtgtgaggtctagaagttctctttccctttcatgttataacattctctgtctttagagctcttaaacctctgaagagaaaaatcttattaggaaaatctttatagttaagcagggctgactttgaagtgaggcacgtgcgctggctggtatcatcactccacttcaggagatgtgaacagttgccatcagatgttatctatgaacttactcattggattaatggttatttgcttcagaaaactaaagagtaataggagagcaattcatttgctggctttcatagggttcttgttttgaaaaaggtctgttgttgaactgagatccttacagttgcatttccttatacctgataaaaagtttttttttttaattcttaaaataggcagtgcatttacatggcttaaaggggtctaaaagagtatctaatgagcattgcctctcatccctgttacctagccattcagtttctcttcttacagtttcttgtgtatcttccagaaatattttttgtagatacaataaaacacacacacacacacactctctctcttaagatttttgtgtcttttgacttatatggaaagttattatacttgattgtgaaataggttttactatgataatttgctgacctacacttattttgtttttttcctctaaaacaatgttttcctaatgtttatttactttgctcttatggctacccagtctgattccacatgccctcttttggccaaaccatccgcaatttgtgctctccctgtcttctatctttgccttccttcttctttcttagatatttaatcctggatgcctctatttctattcactgtactatggcatcagcttatagtcccttaattgcaatgaactctatgaagctcacatgtctagaatataatcactttggcttctttcatgtttgaattgtttttcaaccaagtcagatcgagtggccttagtctaggtgctctgttattgactgttctgtataatgttgaggatacttctatttaacaaataattaatactaataatagtacatcttactgtattatctatgtagccattaggcatttaccatcttctttcaaatgtttatcttacggtgttagatctctttatacttcattaatttatttttcacatcacagatggtttaaagtcttcatttactataacaactttgaaggttttactatttcactgtagtctctttcagtttgtgtatccaacgactcctgtggtctttagctctggatccagggtcttatccagaaaatcttcattttgttctttcttaatttttactgaggctctctggttttagagcccaaagatggatgcttctacagatttaagttttacctattatcactacaaaacaaacagaaaccctgtctaataagtcttttggtgattgatattagtttctgctttctaatattagatctttaactttagccatgcacaaacgttctgttaggggaatattgagcattaccttaagcagtggtaaaaactggcatgctgtgttatgtgaagaaagaagatgattcagtaaacaaacaaaaggcatttattgccttgtgccagctggcatcagtatagaaaacatgcagtgtaatgtcacccatgatatattcctgggaagttgaggttcaggataattccacaaaatggtttctgtgtagaacatatcatggatgacagggggcagagaatgcacactgcctttgtcgttttcattgttgggctcttatctcaactgagcctcatttcctatcctgatgggcattcttgtgcctgatctctgtctgcagggcttctggggcccttgacttcacatcctccagaggttgttcagttgatcatggcagctagtcatcatagaaggtgatgctactttgcctgtgggtgaaggtggactctgacagcatctttgaagaataggtgattttagtctctaagcaggagaggtgtacacgtggttaacatgggtgcta

SEQ ID NO: 117729 - DNA, 1425 bp, Homo sapiens
ggtttgaaataaattgacatatttcaaatacagattcctttgcaaaaatgtcatgggtgataataaattgcctgactttgagcttttgggtttaaagaaaattcttttcacatagaccattttaattgtttaagatcaaaattcatttgacctgggtgaatggaagaagaagcccaatcatagagctgggttagtgaaggtttttggagcctttcctgctatagcattctatgataaaccttcctttcacaattatcattgatattacatctgcaagactttcgtacttgtaagtagttttaagaatatttgtttttatttttttacccacatctgcaaaaatgtgtgtggatatctgcgaattatttatggatatacaagtttctgaatgcaagcactgaatgtgactctacacacattcaactgagtggttctttttctaatcaagtaagagcagtcagtacaagactcaaaatcacagggggagccaaacttaaaaaaaatctttgacaagaaatgagctaaataatggctttctctttgaaataaataggggctattttgtcttgatctggggccatttgcctccatttccccccaactgaacacatgtacttgtgtctgtacacacactctcttacataggcttaagtgaaaagtgtaaatgctagaggaacttaagtgggagaaggaaaggaggacagaacagttcaacagactcctcagactgcaatagcgtaaaatatagaaattatgtggtacagtgaaaatagaataaaggatttaaaatgcagaattgatttgacccactaagcctctctattagaaaaacatttcccagtaagcctctctgtagacatttttcagttccttctttggataattttttctcatgttacattgtttccccttattctctgtagacactgttcattaaaaagggtaatgatggcttatgtaataatgtcatcctgtggatgcacatccagtgtacttcatactccacgggacatacactttgagtgattctcctcccagcattggtaatgtattttcactgaactcacatcttttgagtacccattataaccattgacagatactttccatttcagagagaaaaaaatattgggatttagagtgtgaagagcaaaattggtccactcaaacaccaaacccatgattggctttttaactgtcattttgtttgtttgtttttgttttgagacggagtctcactctgtcacccaggctggcgtgcagtagcgcgatctcggctcactgcaacctccgcctcccgggttcaagctattcttctgcctcagcctcccgagtagctgggactgcaggtgcctgccagcacgcccagctaatttttgtatttttagtagagacagggattcaccatattggccaggctggtct

SEQ ID NO: 117730 - DNA, 1041 bp, Homo sapiens
ttataggcgtgagccaccgcgcccagcctcaactgtcatgttttaaaccaaacaagctaaccagccagcacttgttttttctatgtatagatattaatataattgtggatgcaggaaactgcaaagttaccagcagatgccctttactttcagtgagagaaaattcagttcatactgggttaaactggtttttgttttttcctgtttcctaaaaatttgcatctaggtgagttttcatcttccttttaaaaagcttagaatgctgttttaccagtggtttttagttgctggcacttgccaggaggtgtttggggagtctacaattttgtacggtgtttggtgggtgagacaaggtctttactttgtcactgtaagcgtgtgtctttccttcttataaaaagagctggaaaagcagtaagagttgatttttggtaggtactttccatttgggttggctaagtaaaaatggcagtagaattttactgtctgggatttgacagtttttgtagtttgcctaggtagagaaatttgagttgttagctagtcttgattgtaatgaaaatgtgaaaagaaatgtatgttattacttgagactttgaagagctcttattattacaatttttgaaagaatctttctaaagaaggagaaagtatgtgaccctggagaggaaactagggacattatagagttaattttgggtagagaatgaagggattccaaaatcctgaaacttgttgatacatattttttgaagtataaccctcaagatgtcatttcttagctttaatttctgttaagatgggaagtagataatggcttggggcttttattaaaattatattgatagccatgccacatacttcttaacaaaaccagcagttctgctgagatttccaacagtgaagccattaatgaacctcttgtatatgaacgtaacaaattaaaccttataataagatactcttttgtagtgtgtgagggagtaaaattaacattgtcactacactgtgatggtgcatttctttcttttcctttttttt

SEQ ID NO: 117731 - DNA, 1098 bp, Homo sapiens
aatacatctctctaagtcactgctttggtcatcatatcctagccgtcttcagaaatctggagtgactgctcttgtcaaccatgttaaatctaagctcccttcctagccccagaggcttcttgttatttggtcctactttggccaagcccagagtaacttcactattaatgggcatcatgtctcagattactggctctggccttctctgtacccagccatattgaaatcctgctgttccttttgtaccaagctcaaagctcatttatccactgcattcgttaaaaaaaaaaatttttttaaatagagatggggtcttgctatgctgcccagggtggtctccaactcctggcctcaagcagtcctcccacctcggcctcccaaagtactggcattacagatgtgagcctaccactgcattcttaagtgccttcctattttctaaatatcagtaatattagtggcactgtccatttgtatttaaccatcaaagcatgaagcatggtactgttaatgcataaaggttaaatgatttatacaaggtcccatagctagtaagtagaggtgctatactttgaacccagcctggctccagaatttgagcccttaaccactgtgcaacactgtaaggactagttgaaattaatagtatattagattgacagtaccataacttacaattgtaattccctttcagacattttattttgaaaattacgcatgtagggaagctgaaagaattatacagtgaaccacccacatatgaatccacttcttagattctattaaatgtttaaatatttcctttgagacatatttagccatccctgtatccatcttactgttttgatgcatttcaaattcagttgcagacacttgtacattcacctctaaacactgtcccatatgtgtcattaattagagttaaaaaaaattttttttttttttttgagacaggttcttgctctgttgcccaggctgaaatgcagtgatgttaacactgctcactatagccttgaactcgtgggctccagcagtcctcccacctcagcctcctgagtagctagcagcacgggtatgcaccaccatacctggttaatt

SEQ ID NO: 117732 - DNA, 1071 bp, Homo sapiens
tcattcctgatgtagtggaagatgtgttttttgtttttgtttttgtttttgtttttgtttttggagagggagtcttgctctgttgcccaggctggagtgcagtggcgcgatctcggctcactacaacctccgccttccaggttcaagcagttctctgcctcagcctcccgagaagctgggattacaggtgctcgccaccacacccggctaatttttgtatttttagtagagacggggtttcaccatcttggccaggctggtcttgaactcctgacctcgtgatccacccgcctctgcctcccaaagtgctgggattacaggcgtgagccaccgctcccggccggaagatgtttttaattttaaattgtactcctcgtgtagaagatgtgtaatataatgtagtaggtgtttactgggtgtcccttgtgtgttggagccctgttgtctggtcccagggatgtgataaagaggaaacaccagctgctgaaagtgcttggttcattcttgcagaacttctaggctccacccacccttgggtcacggcaaagtttaggtcatcacagagtgcgcagcatgcttgtgtaggctccttacccttagcctttatcaagggtcctgatgaagaacaactctgcctgttctctagaacctccttagagggacagtccaacgttgttcctacagctggctccattttataaataattcacaggttttttcacttaagtgtctctttttccagcgaaaccaatgtgctgctttatccgatgaaagctgttggttttattctttgttttggccaccaggaagatcagggccaaattggtgtatagtgtatactagaaataatgatttcattgctgtactaggcctttctaacccctttttgtaatttatcaaaacccattagatctggtaaaatatgtggactcacatacaatattgtattataattttaagacgttcttgcatcctgaaacgtattctggacccttggggttaagagtcctgcttttgatctttttatatctttatttcactattctgtacatagttttattctaagtttcc

SEQ ID NO: 117733 - DNA, 1033 bp, Homo sapiens
aagagtattcccaaaacaagtattgaggataaaggtcaaattcatgctaaggagaaatgtttttgcagtagctatgactttcacctctttttccccttccctctttgtaaaagacaatttgtagtacattttgtctctctaagggagacatgactaccccaaatttttaaacagaccaggaagaatctattgtatatttgagtgggaacctgagaatgctgtggcatatagacaaaattaattaaaataactgataaatcagatgtagctttaaatgggattttcaaaattaaaatgtaggagaattatgttaataagctctgcttttaactctatcaagtataggaatgtgttcctttgtgcaatttaaaaccaccatcacctatgccctctagtgcttatgggatgagtttgacaatagaattgtgttctctgtttcctgcttctgccctggttactgctgatattcctggtgtgagagttctcttagtctctctgatcccagcttccctggcattgggaaaagggtggctttgcctattcctccatgtggtcctgctatggggctgtggtgctggagaaacaataagtgcatctgggcaaacacggcagactactggcagtcagctcctggaagccagggcagtttatgccctagcactgcccaggtgtagaatcctgtcctgaggatgtttatctgtagcaagccaaggacattatagttgacccttgagcaacatgggtatgaattgttaaggtctacttatatgtggatttcctcccacctgtgatacttatatgtggatttcctcccacctgtgataaccctgagacagtaagactgactccttttctttctcttccttctcggcctactcaatgtgaagacaacaagaaggatgaaggcctttatggtgatccagttccacttaatgataaatgtattttctcttatgattttctttctttctttttttttttttctttttttttaagatggagtctcactctgtcacccagactggagtgcagt

SEQ ID NO: 117734 - DNA, 1012 bp, Homo sapiens
aactagttcttggtttctagatgggtatggtatcatagtcttctttagctttcctttttccagagagattaattatttttctggttcttaatggtcattttcctctaatcttaaaaatagaaaaaaaatggagtgggtagtggtggtgaagaggataaaaccccatcaaaaaacaaaagctctgacactgtgtaaccaagatccgcagcgttgctgtgatgctgttccgttctagccagttggtaaagaaagcacagatgactaacagtctaatcttcaaacctgtgctgattctgaaacacaaatggacaaaaatgaaagaaaatcttgccttctacaggcaattaaaaagggaggtttttgcttttaaatgagaaaggaaaatacctttttggtactactgtcattcacttttcttaaaggacattacccagaaaaatggaaggcaaaaaattttgatttttttcaactggaaagtatgcctcgctagccttggctatgctgttcctctgaattagtaaatggctggcttttccaatttgcttttgtccgtacactaaggattttgccagttatggtcctttaaggattaaggtggagattcccagccaaagaaggggatttcttacccatcccacagtttaaatcttaattttgtttgtggtttgaaatgatggaaaatactcctctgctgtccttcagggctgatggaatcttgtgtgctcaggacacagttgtgttgtgaccaagctgtctgtcacctgacaaatggcaatggtcatcctgataaatgggttggtaaattttagctcgtggtgctcttatttgtaataggggcttctaattcagcctgtctgtggggaagtagggcgctgtgctctatgctgttaaatcagcttctgtctctgcccagacaagcccagggtctggtttaacaagagacaaaatactcaccactcgagatcaactgaattgaactgggctgagactttgacaaactaatctgcccacc

SEQ ID NO: 117735 - DNA, 4196 bp, Homo sapiens
tagaaaaaaatagtatatggagaccttagtgtaaaggtttacacacgattgtatataattacatacatttcttattttgaagtaagcattttagactttccaacaggagtgcaaattaatgtgagcattgattcatttaacacttaaaatatggtttcatttaaaaaattaaaaatacttcaacacttcaaaaactaagtctccacttagtttggaaaattaggcttaatgtcaccattggtaaaaattagatatgtatttagcctctactatgtaaaataggttacttatctgatgtgatttttgatgatgggtagatattatacttcacattctttgtatggcagctgctgacacttgcactgtccataaccattaatgatgatgaagggtccttcatgggtgggttcatattcattatacggtccttggtctgacatgtttgacatatggagtcgtgtttgggatcggagctgcctgtggttctgaaccattgagcactgcctaattcttcttaaagtgggagggcagcacttcctggagatgaacactataaaaataataaaaaagaaagaaaacaataaagccattgttcccgtaattacccgctgagtgaagatggcattgtctggttcaggaaagtgttcctcggtagtaactgctatgcctgcagtagttgggatttctttgtctcccacatggtaacttgatgagcttattctttttgtatattcagtggttggatctctataagttgtagccatgacagtgacagtggttgacaaattccagcagagctgaaatccatggactgcatctagaatatcctctccttgggtgtggtcaggactgtggcataggatggagtgttcccaccgaccttggaaactgcccagccaggaggccagagcacatattcgggcgctgcattcccacagattgccagagagaccaacggttgtgagggatctcagggagtttaagatcttggaatcaaggctgtttaacttgttgttatccatgaggagtattttaagattgggcatcgtttcaaacactgtcaagtcgatggctttgatttcatttccagtcaggtctagcttttctaaagtgccccaggtccactccatcccacatgtcaagttgctgattttgttccattgtaagaagagcgtgtgcagactgcttagccgtaggaaatgagcaaaattaatcttcgtcagctggttgtgctctaggtgaagctctctcagtttaattaatcctgcaaatccattgcgagccaaacttcgcaaacgatttgtgctcaaatccagaaactccagactacgacagtcccagaacaggcgtactgggatagtccgcagggagttggaacgtaaatgcaaggtctgcagcttccgaaggccatagaagagctctgggtgcagagatgacagctgattaaaagacaggtccaaattttgcaggttaatcagttgggtaaaagttgtgtttggcaagtaaaatattttgttggaacttaagattaattccttaagtttatatagtccttgaaaagcatcttcttttactgttgaaatttgattgtgatctaagtggagccaagtaagttgactgaagctggcaaattgatctctttcgagctctgtgatgtgattgtgcctcagggacaggcccagagagcccttgtctgtggcgtttggcactgagtggaagccctgagagtcgcagtagaagagcagcttctcgcagcggcatttgggtggacacgccatacccagggcaggcagcatttttaaaaccatactcattgcatatattgctgccagcataggggcccctaatggccacttgaaatgtaagcctgcagaatataatttaaggaaaacaagaagataggatatttttcagcagaacatatgggctatttaaaaaaaacaaccaccaccaacattatagcaaaagatttcactgcatataacttatttttcatttactgcagaaaaattaaccttattggtatgactggaccaaaacttaagccatttaaaaagaagataaaacatgtctctgtcatcatcgatatatgcttttacctaaacctcaaaatccaaaatatgatggtgatttccctcataaaatgtgaattcggtagcttattttaaaagcgtgattccttgttgaatgtacaagacatataaatgcacagacttacccattcttctgagcacattggaggctgcattcagtcgcggttgttagactcaacgcagtgagtctgtaaaaggctctaacatgtaggagcctttgaccagtttcctgttttctgtgtcccaggctttccaagtaaaattgaatccaccaggacgagttgttttttccttaggatatccctctggaaagcattggtttcattttctgtgattgctctgatccctaaatcagttttgaatataagttattaaatttctccacctctaactgctcagctggttaatcaaagcttcagtctcctttccgcagccgttagttctcttggtcttaacttgttgatggcagatgggtggcttgttgcagagaagagctcctggagcagcatgagtgcatttactgaaaagcttttccgagaaacggcacaagaatggatttgcttatgtgctgcgaccacacagaactgtatataggctgacgtcaccggatgacgtgtcttttgtttgggttttccagaagctttactgttataaagcaccatgctttgtaacagcatcggggtcgttgcaggaccccctgattacaataaagcgagaaagaagaactcctgacttaaaaacatgatattccttcagtgtaggaagcagcagtgaggttgtaataaaggctgcattcaagaagacccatctgaacagtgagttgggttagcagagtgatgatttttaatgcttgtgagagccagtgttagactgccgattctgcatagagagatcatctaaatgggcagaagcctgcacaatttatgaagtgctgatttaacaccagcctatgcaaggtagtgtcgctgcactggtagtttggaaagctattcagttgccttgttgtcatgcttggttaaaatcaaagtatgactatgatttgctttagatgtgttgataaactagctaagtgggcttggcttgtttgtcatcaagagcttaacattataaacgaagaataaagggggaggggaagcttgcaaaacaaagcatgtggttatttttttctttgagaatttcaggggaactctaaaaagatttctctttctcctattttataacaatgttttgtcgccatactgattgaaaaaataatgctgagttgatctttaaatgtcctcctgggaggacaaggcaggttgatacagtcattttaatgcacatgccctaacagcaaagcagagatgatttaggacaagtgataccgtgtagctggattctgacatggccccttgtattttacctcagaatctcacctactccataactaaaagcctccgctggtactgaggttggtggttgtgacactgaaataatagagcatttgcaccctagttcccagccaccaagtggctgacttaactgagcctactgctgttgttagaacctgtcttgtgaatacaaaaggtcactcatgctttggactgggatttttgttttgacttgattttgcttgccctaactccagtttctccctgttgaatggtgtcttcacttttcagacctcagttgtggatgtatagctccatgtttagtgttatataaatgcaaaagatgtttctagatgttatattttcaggcctgacaaaggtaagcccttttctacatcttgccttattgatttgacccaacatacctatttctcccatatcattggcacttaccctttgtgggtcttgtctcagacctaaggacagacatctttaaaactactgatggtgtctgtgaaacaagaacatcgttggcctttttggttctgagggattcatcccactgggcagatctaagaagtaattgtcttgggtaaaatttttctgttgtagtgttgtgctggagtgagagctgtgagactccaaggtcccttccttagggctctgtgtaaaggtgctatgaaaactgcagcagtgcaggtgtgtggtttgagtcctcctagaagtgatccca

SEQ ID NO: 117736 - DNA, 1310 bp, Homo sapiens
tgggcattaggttatggaaggtcttccatagaagtttggacagatgaacgtttatactattaagatgttttatttctcctattatagacatcaaaacaaaaataacagactctatcttgaagtttttgtgtttgttcgtttgtttttgagacaaggtctcactgtgttgcccaggttggagtgcagtggcgtaacctcccaggctccattgatctccctccttagcctcccagatagctgggactacaggtgcgtaccaccatgcctggctaattttttgtggagacggggtttcatcatgttgcgctaggctggtcttgaactcctgggctcaagctgtcctcccacctcagcctccctaatcgttgggattacaggcataagccaccatgcccagaccatcttgaagtattgattaaagcacaggctgaaatgtttatggcaacctccccgccgccccttttaaaactcttcttctgctagtggcttcattgtgttcatgttttccctttcccctctgtgtagcatgcttcatcttttattctgaaatacatagccaagtttggggttgtccttcctttctcctctctacatttctgagtagcttttgatgtagatgttatttcctcttacctacatagatggcccaaggggctatacaaagaaagctgtttgcacaggatagaattaagaggtaagatacccgttcatacttacttgaagaatcgttcaattttagtggactctctgacccagttgtctaaatttaaggggttagtttgcatgtttgttggctatatgctagcacttaaggttgatgaagcttggaaaccatcatctgagaaccctcttaataggttctgggctggaggggcagtgacaagtgatatggcaaggaaaaaaaaaaacacattgaatatgtgatgttgttaatgcaaagaaaattcataaaaatttggcccaaagagaacaagatcatttcttactctgtacggtttatagcagcatgtcagcattccgtctgcagttgagatgttgattcctccttgtattgcacattgctgaaaggggcttcctgaggctggagagagcagtgaggtaagactgtcctccttgagagctcgtcttgatgcttgttgcgtttgtctgtgtatgtctgcagtgtctgttctgctctttgtaatttaagaagagggcattctttgaaaagaatttgggaatacaggactatataatcattgtattctaagattgatctactgttgagctttgcttaaagcactcccagcaactcttgttacatgttcagc

SEQ ID NO: 117737 - DNA, 1031 bp, Homo sapiens
ctctgacctatcaggtacatcttagtttttaaatttgttgtttcacattgtttcagtgccaggtcccatttttcacatcttgacattcttcagatctcagagttcatcaaaatcaggtgtaccctgttcttgctgcagttcaaggagagctgcttcattaataaaattggtgtatgctgaaccttgagttaaaatataaatttaatttttaaaagccaaactttaagcaaagctctttgtctcttggcttctcttattttggcaaaactccctcaattccagtcatcagataatgtggagcccaagaattgtaaggttgggtttttatgaataaagccacataacacccctctgctccccagtattttccaactttgagtttaagaagttgtactgctttttcagtgttgacatgagcacaaatggctataggctatcattaggtttctttgtaaatgaataaaatgctcatctcttttccttttatccaggctggacgtaaagaaagaagtgatgcactcaattctgcaatagataaaatgaccaagaagaccagggacttgcgtagacaggtaatctggatgaaagtgctgattgtttttctaagttctcaattttgtagttttgattaaaatcctaataagcactggccttatatttttttattgagagaaaggatggattttcacaagaaagtgcctatctttgttttgttgctaatatgcttcttaatggctaatcaaatttcatgaagacatgggataatacagtctcactgtgttggactgaataagttagctctagtgtgaaaggcatgtacaggtaggaaaataaatttaaaatgacttggagacctgtgaaaataatcctgaaggatcttgttgtattgactatgtacaatagagacagaaatttcagttgtttatctgacttgccctatactcattacacacttgcagttcccttagatccatggtgaaatgtttccagttccaaatatggtaggtatagagatatttgaggtgctgaat

SEQ ID NO: 117738 - DNA, 1014 bp, Homo sapiens
acagctcagttctgacccctttctaacctctcttctctccacacccccacacgttaactatgcattaaatgacacatggcttttcattgcttgaggcataaccataggctttgtagtcccattctgcaaacagttaaattacatttacggtaatagagacactaggatgtataattgcatatgtccatgaaaaggaaataaatttttaaagtgttgtagaagcctcaaattcctgacttatggcagaattttattcttcagtgacaaggcttctcctcccctaccacttttgtattataatgaaacactttgaactagtcagtgacttgttttaagcaaaggtaaaatatttcattgtgagtgttaatttcttgactgcttcatttcttcttgttctaactggattaaatgtctacaggccaactttggttttaagggccatttgccattttccctggggtgtaagggaagtgagagtgctatatgaaagttgggcagggttgatggtgataagcctctggcaagagaggagaggttcagacattgcagccactgagaagtctgccagatgtgtttgggttgagtgctcctcctaaaatactgcaatacagttctgatgctaatcaccagaagttagtgcagaccccacaggtttagggcatggtccccaataagatttgccttcacttcacatgtcagctgcaagttctggggtccccaggccacctgtacttctgaccagccaggtacaaatctgaggggttcctatgacccacctcaggtttcagtaatccactagaacaactcatagaatattttattataaaggatactaatcaggaccagccaaatgaggagacacataggatggagtctgggaaggtctcaaatacagagattctatgcctcttccaatgaaatcaaggttcatcatcctcttgtcacattgatgtttcaccaaccagaagctccactgagtttcagtgttcagagtttttattggggtttcattat

SEQ ID NO: 117739 - DNA, 1062 bp, Homo sapiens
cctgcctacaactgcctttcgtcctgtgtctcccttgctgaatgacttctgccatagttgactagttttcatctttgaccatacctaaacatgtcaccacctgtgccctctacccacatgtcacttctgtagagaaactttcctggaacgcttatcccctccattgcatcctctagcagtcattttttcattcaccagttttacatcctttgtagtgcttcttactatctgaaactattgaatttattttcttatttgtctggcccccaccccatactccaaaagaatataagttatctgaggacatgggccaagaatagtacctagaatatagtaggtgctcagcaactactagatgagggaacctattggttctcaaagttaataaacattagagttgcccaggtgctcaacattcagattcctgggctaccacccagccccctccccaagattctgatttagtgggctgaagactatactttagaaatgcagagctctacattatgactgatcgtccttgttagtggactttgtcttattctgaagtatgtgtaacatttgcacaaaagagcgttgtaatgcatcttgcatatatacccagtgtgcacaaggggaatgaactgggaaaacttgtgggatgtggagatggtgggaaaaatttggagattttttttgaaaaggttaactgacattgatttgagcagttttttggggggggggatgggagtggctagaatgaagctttcaaaaacctgtagcaaacttcctgtatttgagggagaagaaaattgtaacaaaattcttaaaataagtatttatagatttcttagtatgtcctggtcacagttctggacattaggaatatagtagtgaatacaacaataatctctactcacataaagattatcttgtactaaatacgtattttatataatgtatatattttttacaatgtagtagaaattgtactgaggtgatacgtgcaagttgtccattttatcagagtttgaaatgaaagttgaacaaaagctgttatttcagtagcattttaatacatga

SEQ ID NO: 117740 - DNA, 1051 bp, Homo sapiens
acatcatctgatagacattttcccagtgttagtccagtcctgaaatctgccagtcattgacagctgcatagatatttgcaatggatccaatcaccacatccagaaggatcttggatggccaagttgtatgagacagatttgaatttggattctttcttcaagtttgtttgccatttaccctatcagcactttgtttttaatgtctttggttttccatttggtcttgaaatgcttgaaaagcgacaatgctttcacaaatctgtggaaacagatggtagcatacactgatcacacctaccaagagtatttatataaatgatcttaaaacccaggaaaaaaatcacacggagagtctagtagatcctaatgaaaatgatggtgtgcataacctgtgtggccaagccatgtcacatgggtttgagttagccatcagaaagcaatgtgtcttcctctcccttgcagtttcatttttcctactaaaacagatttcaagaggaataggctttaggcagacagtgcccagaccacacttggtactgggtatgtgtcctgaaaaaaaccatgttttttcaagtgtgattattcttcagattctcacctgggctcattgctactcttgctcacaaactgctatgcacacaggactgggcaggttcagtaatggcaaataaagtaggtgtttacagacatggtcacagcaaactgggcatcatgtgcttgattttcagtaaggcagctttgacttcaccccagccccgttattgccagatcccttcctcctcctccttctttcttgtttcttcttcttttttctttttttgagatggagtctgactctgtcacccaggctggagtgcagtagcatgatctctgctcactgcagcctctgcctcccaggttcaagtgattctcctgctgcagcctcccaaatagctggaattacaggcatgtgccaccatgcccagctaatttttgtatttctggtagagacggggtttcaccatgttgcccatgctggtcttgaactcctggcctcaagtgatgcctgctt

SEQ ID NO: 117741 - DNA, 1229 bp, Homo sapiens
gtttttatttgttttatcattgtctatagtttgcaaataaaatatgtattaattcaacttcaccatataaaacttactgttttacactcttccccttcatctttgtgatagttaggatagagcatgtggtgtgatgtctcctagtgaaatgcatgtaagacaaagccatgactctgaaaaagagtaaacagtgaagtttaatatcttttgcaggttattaatgctgcactggctttagcagcaaaaccacagagtaaactggcccaagagaacatggatctttttaaagaacaatgggaaaaacaagtccgtgttctcacagatgctgtcgatgacattacttccattgatgacttcttggctgtctcaggtaatgagctggttccccagagaagtatgtgaagatgttcataattacttttgtctaagttgtattaatgggcaaacactgctatgtcttggcaggtaaattattctaacaataatattgtgctggttttcattttaatgttaaaaaagctatcagctacagggttttcaagtgacagcttctcagctactaggaagtagctggggttggagatgtttcccttgatagggctggtctgaatcctaggagcatgaattagaaacctggctggcaaaggcttatccctgcttgtatagagtgaggtctttcaactgggaccggtagaacaccaggaccatccatccctcttgctgccattgtgtttagaaaaaacattgatctgtgtcttggtggagactgtggttatttgttatcagcctatgaaacttaggagaagaagggattctcaacaccatcacctttagtttcttttttaaaataatttcttcccttcttggaaagcctctcttctgtctctcagaaatgatcatagtcatagtttatctgcctacttttccaaagactttctgtctgcatgatgcacagatagaaaacagagaggaaatatttaagtgccatttaattatgaacttgaaaaaataaatctgggtaattcacctcacaaaaacagttgatttcattatataaacataaactggtaatgacttagtaaattgcattcatatagaaaatatctgtcaaatgcaattcagtgtttatcacacagagataaatttcaatcccatcttcttagagttgagtaactataaatgcattctccatttaacgggacctctgttgcccttggctgcatggcttg

SEQ ID NO: 117742 - DNA, 1047 bp, Homo sapiens
tttgaacctcactgcaagtccttgggctgggcttggactatgtcctggtacacagacgagagactcgcctcactgccctcctgtcacaggccagccggctgggctgagcgccaaccccagctgttctgcctgctgcccccttactgataactgccagaggacaacattatgtttcaagtcagtagctaatcatgagaggctggtagttggtacaaaataagaattttatttcataattaaagcaaagagctaggaccagtaatcagtcccttgggtatttactcagccctcacctgccatattctcccctcttttcttttgatgaaagtcaaaagaatactttaaaatacattgcctatttttactcctccaagcagccttggtaccctaacagaaggcccagttatttaattttctttttgtcataaagtaggaaagttatacaaatccgcttaatactatacaaaacacctctatttttaagtcagtaccttttctacccaggacagttctcatctttgtcttaaaatgccggtgttggggaagtaaattaggaagtaaaaaccttatgtcactgggcacaagtggctcacgcctgtaatctcagcactttgggaggccagggcaggcagatcacctgaggtcaggagttcaagaccagcctgaccaacatggtgaaaccccgtctctactaaaaatacaaaaattagccgggcatggtggcatgttgcctctaatcccagccacttgggaggctgaggcaggtgaatctcttgaacccgggaggcggaggttgcattgattccaagatcacgccactgcactccagcctgggtgacagagcgagactctgtctcaaaggaaaaaaaaaaacaatcatgtcttacaaagaaatagtgaattgactcagtgatagcaattgagccccacacacagtgaaaccagcccaggcctgctgtgggccaggcagcccagcgtgtgcaccagtgaagcagaggctcgagacaaatgctgagtgattttgactttattcaccatactgttcag

SEQ ID NO: 117743 - DNA, 2019 bp, Homo sapiens
atggcctgagtgccagcggtatctctcagccctctttcttcaggtgtacattctaaagccactttcagttcatcttgaatagttggaaatgtccatcagggcccaccagggaaagggctccacactttcatcaaccccttctctcatttcttgtcttatattaataagaattaagcaggttctgtccctgcacaggtgtgattccaaagcttccacattagccttccacccctcgctgtttccttccacactaaaacttgtgctcaaaagtgggtcggaaattcaggctgccataagtttctgcaaaaaatgagagaaatagcccttcaggcgaaatgaaacctattaaagcattatcctacctatgccacagattgcctgttggaaatattcttggctaatgcactctgagaacttcatattctttttatgtaagagctctttgtgcttctgatcacaggcgatcatggctcagcttccccaggagcaaaaagcgaagattgcggaacaggtggccagcttccaggaagaaaagagcaagctggatgctgaagtgtccaaatgggacgacagtggcaatgacatcattgtgctggccaagcagatgtgcatgattatgatggagatgacagactttacccggtgagcagcaccccggccccaccaggctgcacaggggctactttcttccccacaggtcacctgcgcagcggctcagacagcccaggccatggggctttgtggacaatcttctttttctactccaactgtgaggggcttcacatacaataatccttgttctcttccctcttctcagaggtaaaggaccactcaaaaatacatcggatgtcatcagtgctgccaagaaaattgctgaggcaggatccaggatggacaagcttggccgcaccattgcagaccatgtaagtgacagacttgccaggtgggtctccaagctcctcctggggctcaggcagcccagcctggtccattcagggtaagtttcatgggccacagcacttttgccactcatctctaaaaatggttcttattaatcccagcatagatttgtaaggattctctagagcggatgtgtatgtcctggaatcttccatcgcttggtagccaaaattaacctctgctattgtctcttatgtctcagttccctctctccccctctgggcaggggccgagagcagccagaagccatgtggccagtgctgtggaaggctggtgtgcctagatgggcccaggtttcttcatcctcagcactgtgtttctcagccaccccgtcttcatccccctattccctcacactgataggtacaaaaatacggttcctaccgcctggaaattgtacaatacatttcatttggtgttttaagcctgatcaagagaagctctttctcagttacagtttttctctgtagttaacaagcctccccaccattttccctgaaatagccaaactctcagcctcatctaggccacaggatgtgtgagacacaagcctccttacacaagccaaagattgtaaaggcatccttgactcccacacaatcggtaatagggcctattgcttccattggccaaatgtatcttgacacaaaccagtcttgtcctttctgcagatctccatagccacttggactactgtggccgctcccgatttcctgttctttcctctctccacttccttctgcatccagctgtcaatactgtcatctgaaaatgcagatcacatggctctgccctgcttccatgactacttagaatacagctcatctccagtatggtctgcggggtctcagttcataccactctctgtggtgtactttgctccagcctcactggaagaaaatgtttgcttgctataaacacttgagaggtgctctgtgtttctccctttgggtaaagctttctaggctggtcctaatctgggagcctctaaaactctgagatgtggagcgagacaggaactgggcaggggccacccttttctctttgaccatccccaac

SEQ ID NO: 117744 - DNA, 1775 bp, Homo sapiens
tcctgcttctcctcccccacgtgcttacagctctgggatcacttacagtgacttccagttggtttgagtgaataaacacttgctgaggggtgggggtgagcaaggcgaggttgcctcatgtcttctccaaagggtctgagggcaggcgcttccaggctatttagataagagcagccgttgagggtgttcttcaggaacaggctgctgcccaatcctctgcgacctgcccaggccctggtcttgcagaggagtagggggctccccttcaagcacagcccacctgtgtccacgaggctggaggtcaggccggtgcttcttaccacccctgtctgcctcgtaggtggacagcgccatgtccctgatccaggcagccaagaacttgatgaatgctgtggtgcagacagtgaaggcatcctacgtcgcctctaccaaataccaaaagtcacagggtatggcttccctcaaccttcctgctgtgtcatggaagatgaaggcaccagagaaaaagccattggtgaagagagagaaacaggatgagacacagaccaagattaaacgggcatctcagaagaagcacgtgaacccggtgcaggccctcagcgagttcaaagctatggacagcatctaagtctgcccaggccggccgcccccacccctcggggctcctgaatatcagtcactgttcgtcactcaaatgaatttgctaaatacaacactgatactagattccacagggaaatgggcagactgaaccagtccaggtggtgaattttccaagaacatagtttaagttgattaaaaatgcttttagaatgcaggagcctacttctagctgtattttttgtatgcttaaataaaaataaaaattcataaccaaagagaatcccacattagcttgttagtaatgctctgaccaagccgagatgcccattctcttagtgatggcggcgttagggtttgagagaagggaatttggctcaacttcagttgagagggtgcagtccagacagcttgactgcttttaaatgaccaaagatgacctgtggtaagcaacctgggcatcttaggaagcagtccctggagaaggcatgttcccagaaaggtctctggagggacaaactcactcagtaaaacataatgtatcatgaagaaaactgattctctatgacatgaaatgaaaattttaatgcattgttataattactaatgtacgctgctgcaggacattaataaagttgcttttttaggctacagtgtctcgatgccataatcagaacacactttttttcctctttctcccagcttcaaatgcaaattcatcattgggctcacttctaataactgcagtgtttcccgccttgggcttgcagcagaaaaacctgacaacatagtgtttgctaaggcagtaatttagactttaccttatttgtgattactgtagtgattgattgattgattactattaactacaaggtataatttactatcaccttatttaaattttatgaattaatttgaatgttttttacactaactaacttttcccaataaagtccactatgaaaccacgacatccaagagcccaaagtcgtcttctctgccttcaagtcatagatttgcccgcagtatctgtggtgctctgggccctcccggtgtccgtctcttccaggatggggatgcccgggagggaaactgtctgtggctctaggctgcacggctcgtgccaacccatcagggagggccatgcccgttgtcctattgagtgccccaccctg

SEQ ID NO: 117745 - DNA, 1589 bp, Homo sapiens
tccggtctggtgagtcaggtcaaagggccttgagcaaggtcaggcctcccagtgttgttcctgcttccgggaagctctgtatttttctcagcctccagtgagacctggtgaaccccgcgcctagctgaggagtcagcggatctgcccagttttcttctctgttacaatgtgagccaagtggccaggcctaggaaacccatgctaggggggcctgagactccctgtgaaatgcagctagctgaggaggccatgttgatccgcccccacggaaaaccgggagcctgggtgctgcacttgcctctctgaactagaactaattgttcttaaagatctttccaaataccaatgatgcaaaatatttggatggttcaccatattgttcaccatatttaaactgtcagaaccttaaatatctgagcaaaacctcagcaaacaaaggatattttggggacttgttatgtgtgttgcacagcagagagatttgtagtctatacgacttccaaatcctgtaaacgaagtatttcagtgttgtcattttcagctatagaccgtcctacgatcattgccttttcttttgctattaagagatggctcattcataaacattcctacagttgtgtggcaaacgcaaaataggccctgcgtgattccactggctctgattgaggagatgatttttcacacagtgagatttatcatgtttatcaagtttatgacagaacacaaggagggtgaggggatgtggaggttggagggagtgcagatctgagtgaggaaggaagctctttcctgagcctcaaagggcgggttgacaaggtgtgttgcctataagcttggagcaaggattgtgtgggccatttccttggatcccctcttgccctgcagggtctggcctcctccgctctcccccagccaccagacatggggatagttataccaccaactgagtatagaagacctaaaataacatcctctgtgttctctaataaagttgataaatctcagtgtgtgaaaaatctcccgtatgttttagcttaaattttcttctgcttaaccttgttactcctgccttgcctccctcagactgcctgagacaattactcagggacattctttgaataattagaggctgcagataattctctttagcccgctttcttccatgttccctaccctgtggtctccctttagccagttctaattagctgctttgatccttcctcccaatctctccctctagcttgttaattacatttctcccccatgaattccttctgtactggctttgtctatccagtcagaggagctgagaatgggaatctaaggccactcagtgggaggtcttctttgtcccccaacacagatagctcctctcccttctgagaagcctgaaaaccctggcattctgtcttagcagaaaagtaaaaataataatttttgttaaatggtatattatgataaaacagctgttatcctaatgcttggcatttgccaggaactctgggtatgtttatgtatataaaatcacatttcatccccgcaacaatcccatgagataaatattattgttattaatccctgttttacaa

SEQ ID NO: 117746 - DNA, 1340 bp, Homo sapiens
ttctctgggattaacaaaaattagtttgtggctcaagaaaaattgtgtgagctcagtttgtggggtggggtcatagtttctgaggttctctccaggtttggctggtgcttggttccagcctgtgctgaagaagggcagggaacaagtgggaaggaggagctttcttgtctctggggctcttaacagctgtagtaaattgtggcatgtgtggagcagcagcagagccagcctgaggagctctgagccagagggttcacccatgggaaagctgctttttagcccagcttgaggttcttacatctggacccagcatggctgcgttgaaccagaccttcaaatgtggctgtgagtaccaggcatggctagagcatttaagtactccacatgggagctgagctttgtctttctgcatttctagggacaggctcagtggacaagtaatggtggcagaaagaacttggtgaccagatgttggctagcaccactgctttcggcgggccccaggttgttggtgaagtcaacggaatcacttaagaatgtgcagagctcaggaactgaagcctcatgattctcctgctggatctggcttccaaaggtccccataacccttatccccagctggccttggaacaacgaggcctcctatgtctcagctctccccagggaccctacagagctcattctgggcttttggagggtgtcatctgtgtggcctgaaggagacctgagttttggacacgcttgagaagggaagctgctttgatatttagccagagagatgactgagcctgttggttggagcccagtgaggatgttagaagagtgtgccgtgggccctggaggtgaggaaaggccaaggacctctcttccttcaagccaggttgtggggagagccccactgtgagccctttgtgctaggcattgagcaaagtggcagcttttgtggtgctggggatgtgggaagttttctacttttgcagctattatgctgagtttccctccctctccaggatgtaggggtatattggaatagagagctatcctgtgaaaccattggtgtgaatggggagcaactctgggctgagcctcatccccgctcttgacccccgtcaaaggtgctgaggtttccaggttcaggggagttaatctttatggtctgtgctctgagaagaagattcaagttagttggtgagaaaaccctgcaaagagttggctgctgggggaactcctcactatgcttttagtgctgtgtagatttcctaagtggagctgtttgaagtagaaaaagtcctgtgcatggtctcaggggcaggtctacaaggatgggctgcttttagaag

SEQ ID NO: 117747 - DNA, 1037 bp, Homo sapiens
gccaccacttatctctagccatggccatggggtgggaggtgatgcaaatatgtacaggggcccctgactcagtgtgactctgacctagtcctgaactcaggagtctggacacatgggatacagtcttgggtcgacagtcagagaactgacttttaagccatcattttacttctgtgagactttaagtctctgtgaaaacaagagcactagatatgaggttctttctggcttgagaagtgtgccctgagttccttccttcctgaattgtatacccatgccaagtccctggcagcgtgctgggttaggcccatagaagcttcacgtgataggcaagtctcacccttacctttgaactacactggtttgtttctcttcatttttccattttgagctgccgtgagtcaggctgcaggcagctcatttacacaggagtcagcctgaaggaaggtggcttgaagtctactttcattttgtcatgggaggtgttttcctgtggaatcgctaatcaggcaggtcaaagggaaccataagggatctcactcatccctagatggaaacaagtacagcaaagccatctcagaaggagaccaaaaacacacaaaaacaactcccctgacagcatttcttaactctggcactctcaaaattgaacatacttaaaatatccccaagggatggaggtgaggtttcttggtcccacatcagagctggtgaaccagggcccatgccacacccttaggatgctatagagataagagctgagccctgcttctcttctccccatgtgcccactgccatgtcctgccattacctcggcccctctagctgctctggctgtagcttccactgctgccgttgtgccaggcacaaatgagtttaatttgcctattttgctggtgtcccctttgtgaagaatagcgcctgagaagcatctcatcccctgtgtctgatacagcctttgttcttatcagaggcatcgccctgctttccagcttagactcagctggaccctttgcccacaccctagcttgggccct

SEQ ID NO: 117748 - DNA, 1083 bp, Homo sapiens
tatgaactgtgacttaaatgagctgcagtttccccttttgcaaaggagagaaactgttgggggcttatcaagctagatgatgccttagagggcaaaaggtgtcctacataaaggagtgcggcccttgtttccagccttcttcccctccctccttccgtatctctctcctttccttcctgtcttccttcctctctttcttccctccctcctgtgctgctgccatctgccctcagatatgtgtagtgaccactgggggccccatttttctcttgccatggctaatcttgatggtgttcgtgaagtctgtacacagaggttcattcaaaccatatgactaagataatttctgtaatttttggtagagatggggtttcactgtgttggccaggctggtctagaactcctggcctcaagtgatctgcccgccttggcctcccaaagtgctgggattacaggtgtgagccaccatgcctggctgggatatataagattcttgttttccctgtggaacatggtctgacttctctgtagtattttggtaagtgtccagattactgtctatgagatgacttacttaaacttcatgttttcaactctgatttggtaatacagtcacatggctcaaaattcaaacggcaccagaggatatgaaaagtatcctccactgtgtccttccaccgtgtccctttgctaccctgcttccctgcctcaaggcaaccagtgttgtcagtttcttctagagatatttttccatgttaaagtaaatatttccatatattgtttttacatgaaaggcagtttactgtagattcatcattctgtaatttactttttctgtttaactatataagtattttgtttgcttatttggtagagatacggtctcgctctcacccaagctagagtgcaggggtgcaatcatagcttagtgcagcttcaacctcctgggctcaagcgatcctcctgcctcagcctcccaagtagctgggaccacaggtacgtaccaccatgcctggccaatttaaaaattttttgtagagatggggtttcactgggttggtcaggctggtagcactgtatctt

SEQ ID NO: 117749 - DNA, 2188 bp, Homo sapiens
tgttgagtgttgtcatataccaggcactgcttcaagtgctctgtatgcattaattcattgacttccgtggctgccctatgagtaggtaccactattaatcccattttataaccgaggaaaatgaggcacagagagattatgtaattgctcaagatcatccagcctagtgagtggtagagctggaatttgcagcaaggtctgtctgaccctaaactctgtgctctaaaacttttggccactctgtttctcaaaggcaactggtaccttttgaattaagctcaaaaggtggagctaacaaggagccaataaaagccattgatttattcaataaataaatcaagtgtctactaactcccaggcactgttccaggcacttgagatacgtctatgaacaaaattagggcttaaccttctagcagaagcagatagacaagcataagaaagaagtaattatatgtaatatgtttgtaggtaataaatactgtagaaaaatagaaactatggcgagataggaactggcagcattgagaaggggcatctctggctggaggaagagcaagtgtggaagcccggtggtgggaacatgcctagtgtgtttgaatcagctggagctgagagcaggcagagaagaagtacatacagctcagagagataatgggaggaagaatatagagggcctgtaggccatggaaaagagtgaacttgcatattattgaaggatattgagcagaagaatgatgtgatctgacttacttttaaaaggattcctccagctactgtgttgagaattagactgcaggtggggggcttggtagaagcagagaccagataggaggctattgcagtaatccagactaggggcaacagtggcccaggaggctgtgtaatcataatcaaaggcttgtttgagatccttgtcaagacacagatcctcaatgtcctcccatgcaccatgcacgacagtgcccttgttctctgtaaactgggctaaaagacatgctttcttcctttaggattttgccagcatctgtggtgaaagaggatgagtatgcactgtatccataggaattatggggcagcctcttcatcttctttctctgctcataactctttctcaggcctcaaatagcaggactctgatcctcttagagaaaaaaaatgaacctcggttctctttcccctttccagtcttactctccagggtaaaaaccaagaactccaacagcttttccattagagatatttaaaggattaaggatataaggggttatttgccaactcagtcctcctttgatgttgacagcttctattttttctcatcttaacatatttggatgaatctttaggtatcaggtcaccatgggctcttgcacatgaaacaccaaaatgactggagagcttatcatacctggaagggtgtgagtccacaggaggcttgggctagcattgccccaacaaagttctttgttttcccttgtaggctctttgtcacttggcagtgtcttccctaaggtgacatccccattctgctttcacaggccacctcaccagacccatcctgaggtcatcccaaaatcagtccctggcagaagccaaatttgtctgttggcagagaaatgttctggatcattggtgttttgactggaagggctggtgcatcaggctgccatgcagcaatgttaagctgtgatttcactgggggattaagtaagacacaactcggcccgagtcccagttgtgatgggggcttggggtgatgtagtactagttttaaggaagatggcactttcctagccaggaacttccccagtcctttctcattccagactcactgaatggtggtttgaggagctgtaggctccaaggacccaaaccaggtctgccaggcttcctcacagccatatttgaattattaaacaggatatgtgaaaagcaaaaccttgtgtgtggaaacagatggtgagttatttatgaggagcggcctccgtccgccccatctacctcgggcagtacatttgccttctcccacgtgtctcctcagctgtgtgccaccatttttccccttcgctgtttcccattctctcattgtcttatcagtgccctgcttctttcctttcctccagggtgttggcatagttccctcctgcactccctcctcctcttcctctctgcctgtcccaccccaccc

SEQ ID NO: 117750 - DNA, 1041 bp, Homo sapiens
taattaaagtcttttattcacctctaatgtaacttcatttttaaagtttttatatgtgagtggagtggggaaggattcagagaaaattgttcgagatttgagtatagtacatatagtaatttagccatttcaaacagttgaacaaattgtacacctgtggttagattgacagtaatgacagtgatttaattttcatcagcaaattgctcctgctgtgacagctcttacccatagttttctatgtccaagtttccctaaaatgttgttggattgggtagggcaaggccaagatagtctatgattgtgagaagtggagaagtagggtgtgggttattctaccttaggtctcagctgtttcatatgtggtttgaggttgaagatgaacttgcattacttccccttaactcagtggttgtgacaaaaagcctttctattcttcctgaatattggaaatcggacttgaataagcgaatcttggaacatcttgagtgtgtttttagagctgaggcctatataggcagactttgagggctgtcttctctgggcatcttagaaagtattagtatttttgatagcatagatgagagaagactgtgagtcttggagcagcagttttttgaggatgggcatccatggtagaccacagacatcttgggcagatgtctccaaccaatttaatcacctctttgctgctctccttaggcaaggcaggctgaggtaaagcggctcttccgccccattgaggaactgaagaaagactttgatgagctgaatgttgtcattgagactgacatgcagatcatggtacggctgatcaacaagttcaatagttccagctccagtttggaagagaagattgctgcgctctttgatcttgaatattatgtccatcaggtactgtatttcttcgtccataagtcagacttttaacagctccaaaaataaatcccccttccctaagccctaagaaaatagcatcaacatctttacttctctcccagagcacagactatttttaatctagtcttgttatcttttgta

SEQ ID NO: 117751 - DNA, 1073 bp, Homo sapiens
tagagtattttgcttatatccttattctgttttagaggacaaaatccatagctttccatgaaattgtccaagaagttagtgatcccacagagttaagaaccattggcctagagggagatggggacagcccattaatccaaaattcatggcagtctttctactatttttactggttgtgtggctggccacattgctacctagagctgcaatgcttgtgggctctaaagcctgggacagaagaccctgactctggcttgtctcagagagttcctttagcactgccttatttcattgcatgtagttggcccttagcaacaggtttccacttgctatttatgctttaggctttgccatctctagtggttttagtccatatccctgtcaacgtagtacatctctctttttgccctggaataaccagcttcttggactcttcctcctaggtttggaggactgagggtaaaaccacgttcaagttgtgccatcttgggttgaacatttaccaaggtccaatatggtatagtggttaaaaggttgggctaaggacagggccatttacttcctccatttatttatttcacaaaaacctattgagtgcccacgtgccaggcattgggatacagtaataaacaaaacagcctccacaaggctggcagacagaaaaccaggtacataagcacagaagtaagatattatctggtcattactgatagtttgctgaccctgttctaaaacatgaaagtattgggaattaatcatagattaattaactggccccaaagggaggaaggaaaggaaccaatgtggctgatcccaggaacctgtcaaagactggattggtatcctcactgagatccctggagctgatccaaaccacagccatgtagcttgactagagagaagacatccattggggagcaaggttttaccactagtccttatttcaattcagggaacagaggtaagaacaaggatgatatggacaaaaagaataattaactctttatgtaaagggttaggtttataggtttaggagttagggcatttcagacagatggaacaacaggaagtcc

SEQ ID NO: 117752 - DNA, 1116 bp, Homo sapiens
cctgaagtcccataactaccaaagctcttaatgccaaggcagacccaagagcaccatgcattcattccagttggcctgtcttcgttgaagcagggcagccaggctccacagcaacctcactgtgggcaccacctgagcaggccctgtcactgggagtccaggagggacaagtttctaagcactggacactgggatgagttggggcaaagacagagccaggtataatttgttaataggtaaaactatcatttcagcagttacaaactggccatatgttttgtttgccttttctgtatttaaggtggaatacttttagaaggggcatttttcacagccctcaccattcatgttttcttacagatgaacctcctcactctcttgcctcctgcctcctgtgggcatttgacatggctcctacctcctgatcactatttcttacctgtccttctgccagggttcctcttgtcctggtgcttcatggcctcaggcttcctaggctaattttccccttcctaacgttccaagaacttcattcctgggtctgtgtctaggccctgagccttagttctctttcctggcccctagaaatatttactgtcacattgaactgtgtctgatagactaattgctgttcaaggatttaaaaagagatggtggaggaatatatttctacaaccactttatcgagatataatttatatactatccaattcacctatttaaagtgtacaatgggaataattctcaaatgtcctagggaagattggtagaatggagaggtggtttctaggctatggtgttttatggaccagaaaaacttaaaaaaaaaaaaaaaattggaggactaaggccaactttttattttgctgagttaagggccttaacatggaaacaacacactatctactatcattatctcatcttttaaaaggacattttaacacaaaaaagcaactatataatttcagaaaaaactgttatttatattgggcacttttaatttcttgtttcgggaccattggaatgaatgccacaataaacacctcaaatcctggtggcttaaaaaaacagtaactatacaaaaaaaaagtatgtaagagaacagaacactgttct

SEQ ID NO: 117753 - DNA, 1087 bp, Homo sapiens
tacccagagatgtgaatgtgagattttgcatggaaaaatacatccatattgcacaagtggctcaggacccaaactaaatatctcatctctcagttcccctctggatgggtgccttcttgctctgtgctatagtttgtctggagtgtgatagagagaatgaggatgatgaggaagcacaatcatgtataccactcccccgcaacactataatctcctcctcctagggtgcactaaagcatatgatttggcctagcataatctgaagatttggatcaaagagctgactctgtaacaatgagatttgattagtaggattttgggtgtgttggggttatcaagtgtctttttgatacctctcaactcccatcactccagtgactgttttggtgcctctgtgtggaactgtgccctctactctgccctttcaggttgaggttttctcaaagaggaggcttttgggaaagttcttgctgtatggtgagatctctgtttctgagcttaagaggtaaggtagtagctgttgggaaaagctaagggggttaaacagtcagttcctgagagaattaaaaaggttgctagactggaatcacagtccgtaaaacaacagtttagggagatggagttttgttgtagattgggtcactgtaaagtgtctaaaaatgtaaaataacaagaaaatcttggcttgggtttggatagtagaaatgtaggggaaattgagatatatatcacggttttattctttttgtagtttggaagtgatttatttattttgtatccaaaaaaggaattgtattttgttcataaaggtattatgtattaagccacatgaaatcccagaaaaatttgggaaacaacttgtttttagattgaatgtgggggagggaatagttaaagaataagaattagccctggggcagggtcagaggtggtggggaagaattgctttttcttttttgagatggagtcttactgtgtcgccaaggttggagtgcagtggtatggtctcggctcactgcaacctccacatcctgggttcaagcaattctcctgcctcagcctcccaaatagctgggtttacaggtgt

SEQ ID NO: 117754 - DNA, 1043 bp, Homo sapiens
gactgactttccatggctggagctatatgactgatggggctgatctgatgggcttaatccatgatcagcttcctgactaggatctcactgattatgattgataagaacgtgattggaagtttcacgtgtgttcctactgatctctagaggaatccattcccacatagcaaccttggccctaacctggcattagataaattcagttcagcagttcatcaagacaccaagtaattgaagtgtggattgctgccttccaagaatgacaggaagaatgatagaagggctttggaccaaaggggctgagctgttcagcccttagggaatccattattataccagtctccaccaatttctcttttgagctttaataatgtctgctttgcgggggcttccaggccctatcttggaacatagattctggtctttgtatcaaatgacttgtagcacatggggagagactttcctattttgtttcaatcagctttcttggggtgggcagggaaggtgttgacagctagtcaggatttggttgttcctgaggtgctgtcagactcagcataccctcacactggctcagacacagagaagaggcagtgttgggcaatggaagagctgcttttgaagccatacaaacctggttagagactcagttctatcatcagcctgaaggctgctctaggcagggaccactgtgagttgcaggatacaaaatgcctggtaatttctgtttggtaaacatttgtcgaattgtactagttgtgtaaccaaagaattctcatctgtaaaatgggaatacctgccccatatgattgttgtgaaaattaaacaagatgatgtgtgtatagcagctattctgatgcccagtaccaagtggtaatttgtaatgctagatttcttttagaattctgccctcttcccccttatgctgttaaagattagaagtcttctcacttcctctgtacatatttactaggctgcaatgagaatggcttgggctggtctcagtgtgtttttgttttttttgttttttttttttaagacag

SEQ ID NO: 117755 - DNA, 1334 bp, Homo sapiens
gttacaatcccggccctttgggaggctgaggtgggcagatggattgaagccaggtatttgagaccagtctgggcaacagagagagatcctgtctctacaaaaaagaaaaaaaattagccaggtgtagtggtgcgtgcctgtagtcctagctactccagaagctgaggtgggagaatcgcttgggcccaagagtttgaggttgcagtgatcatactactgcactccagcctggccgacagagcgagaccctgtctaaaaaagaaagtgctttccctatagatttgagatgctgctcttactgtatattaaatttctgtgtgcagttgggtctgtttttgaatgttcttttctgcttcattggtaattctgtctattcatgcaccagtatcaaaccattttaattgtagaggttttgcaatatgttttattatccagtaggtcattctagttttatttctgtgcgctcctgtttgtgtgtatgtgtatctagatggcagttggagacatgagaactgatgagccccagaagagaatcaagagcatcctgagaagtttcaactcttaacagtcaggtagaagagggtgagctggcaaaggagaggctgtagtggcaggaactcatcaggtattcagtctcaaggaagtcagggcagaatacttactttaggactgaggaactggcctcctgtgtcatgtgctgccaagaaatctcaggaggggaggagtgagaagcatcagtggttgtcactgggtgagagtggagtggtgtggagtgggctttggagtgaatggcgggtaaggaggtctagacattccttgagaagttatcagtataagaaaaatgaaaggagatgagaaaagatgctacccagaagaggtctagggaagtttttctttattctttttcttacattgaggttaaatttatataatataaaattaatcattttaaagtgagaagctcagtggtatttagtacattcattatgttgtgcaatcaccgcttctatttaatccgaaaacattttcatcacctcaaaaggaaatcccatacccgctgagcagtttatccacatttccctatcctctaacatctgacaaccacaaagctcctttctgtctttatggatctactcattttggatatttcatgtaaatggagtcatacatacatgagtttttgtgtctgtcttctttcactgagcataataatttttgaagttcacccatgatgtagcatgtatcaatacttcatgcctttttatggctgaataatgtatcattgtatggagataccattgtatggacaaatttgtttattcatctgctgatgg

SEQ ID NO: 117756 - DNA, 1064 bp, Homo sapiens
ctgtggtgttctctgaacaaaggcctgttcctgctgggcacaaaaattgggctgggcttggggctatagatttcttttggagataaataagcagggtatcttgcatccccttccatttcgcctgtctcaaggaagaggccaagggtcccctctttttgcaagtaaaacagaatgtactttcttaaaacgatttaaatatcacagttgggttcaatttatctacagaaatagacttatataaaaggaaaacttacaaaggagaaatttctaccaaataatgggctccctttttgttaaaatttttttcctacctttttcaaggtcatccagtttaaagtctgagtgtccaagaaagaagggaggggaggcctagagggagaagggaaagtagaagaaacagaagtacttatagattctttagggtaaatctgaagtcttagtgatcatatgctttttatcagtaccagcgatgcagcctgccaggggtttcccctccttgacctttttcttcacctcctgctcccatactcccgttggatggtcaggcaaggagggctggcctcaagaacctcagctattctaagtccttagctctgcctgtctgctgtttcagccaaactagatggcctaagatctcacacagtccacttactcccatttccagccttggtgtgaaccctttcccccatctgcagggctgtattgcaaattacagctgtgaaacaaattgccaccaacttagtggcttcaaacaccgtctcatttattatttcatagttgatgtaggtcagaaatctaggtcctggttagccgagtcttctgttcagggtctcacagcctgaaaccagggtgttggccagcctgtgtccctttctggtggctctggaaaagaatctacttccaggctcatccaggttattgccaacatatctttgcagtcacttcctagaagtcagacttctgggtcagagggtaaatgcagttataattttattagatgttgtcaaattcccctttataggggctgtatatgcaaatttcatttccctagtctcgcctgcaaa

SEQ ID NO: 117757 - DNA, 1065 bp, Homo sapiens
tagcttcatttactactttcctggcagaaattgtttccgctgcaggtgagggctggtttatgatgataccctccccatttcatgtttaaacctgaaacatgatccaggactggcttcctgagaggaggaacacttatttctgattctagttcagcccatgacagatgtggagtatgtgtggatttgaagacagtgggggaaagcatgggactttttgatgtggagtaaagccagagaaggaaaattcatctactcacagtatgtattgagcttctctttgccatgcactgaaaatttatagggtaaagatagtgggaatgtggactggttcaacaaatcctgttcagtagagcctgacatcatgtgatcccaagggaattaaatttgggacaaatgaaagaaaatttacctcacacagtgtgttgtagatacagagttgaaaggatttaaaagtaccttagaaaaatgtaatgggtaagggattgaaagagttttgaagacctccattaaccatcacggagaagaaccaatctcttctatcctcagcgcaatggccagggtatggagattgtgtcaggttattaccttttcacacacacggactgggttagtgtgggaagagagatggagctaactgcgctctgaaggattgtggacggcacctgttcaataacacctgtctccctgtgttagaacttgatttatctctgtcttagtacattttatgctgctgtaacagaataattgagactgggtaatttctaaagagcatagatttatttcttacaattctagagactgggatatccaagtttgaggagctgcatctgttgtgggcctagttgctgtggcatacgtggccaaaggcatcatgtggtgacagagcaggtgctggagagagagcagaatggggctgaacttgccttttgtgggggggaacaaaagagacggagtgttgctatgttgcctgggctggactcctgggctcaagcaagtcctcgcgtttcagccttccatgtagttgggaagctaggactataggggcacaccactgcacccagctgg

SEQ ID NO: 117758 - DNA, 1051 bp, Homo sapiens
aacccagaatcaaatggaggagatacaaaacaggtctctactctcagggagcatggtgactgattgaataacagaattaacatgaaagaattcacacacaatttattgagcacttgctatgtggtaggtatttgttctaggctattttggggggaagagaaaaggtagatgtgcttttcttcttaaaggaagctacagcatttatacacagtttatatacagttagccacacaggtcaataactgataaatatctgattgtacagacattaagttcaacgttggtagtcattgaagtgttagggttgctttggtggagaagctcattcactatgagagtaattaggtaaatttcagagaaaagataggagattaattggggcttggaaaagctggtatttgatgaggtggagtataaagggttttccaggtgggaggagcagcttgcaaagaggtagtggcagtaatgactgtcttatgatggtgaccaggtgtacggcagcacagaacagaggatggagaattacagagaggtgagggagagttaaggttatattctgagagttagggaatccagagcagtactaggtacacagtggatgagaaaaaaaacttgctacatttgtatctgattaaagggaaggtaagaaagtcttgatttttctcagtgccagaacgccccaggctcagtccttggacctctgctcttctctgtctacacttaaggcgttggtgactcatctagtctgatggcttcatgtttcatctgtatgctgatgactgctaggttttttttttatctccaacctaggcttctctgaacttcagatccatctgcctactagacacctttacttggataggcatcttaaatttaacatgtctaaaactgagctcctgcagctttccccacttcagttaatggctattctatccctttaatttttcaggtcaaaatcctcacagtcattctcgacccctttctttctctaagaccccacattctgtctgacagccgatcccaacagctctgtcttcaaaaaatatatcca

SEQ ID NO: 117759 - DNA, 1039 bp, Homo sapiens
ggatctaggattcctgccatccagtaaattttggcaggcaggctgtgtgtacggagagcgagtcctgccgccctatccctgccctgctcccctcattgcgtgtgcttcttgggtggagtctgggttgcctagcctctcatttcttccgcttttcctctaagcagcccttccttcttctctaggattggccttcagtatctgtcaggaaaagaggacagtctctcacgttcctgggacttcacagagagacccttaggaagagttcaagtcctgaggtgtttgggtacttgccatgtgcctactgctgcattaaatacagtgaggtcatagcagagtgcctgggccttaagtcttaatccttaaccacagcctacctgggaatcaattcaaacaaaaagattggcagtcttactaacccactcaaggatctggatatacaggtgtccttgtgtctgtcattatgttgatatgtcagggtcgttgaggcctccaggctagtgctggtgatgctgtgatactgttgaaagtgagttactggtaacgttgggttttcctttgccctctgctaggggagaggagaggaaaaggggcattaggttctagaaaatccttgtctgtgaagactttggttaaactttgtcttccttttacccatctctggacaagacaaaaggaccctgaataacagagtagggagcagagtgggactttggggaatcagaggcagtgagagaccagcaggaacagagagaggacttctggcctaccagcctgttagaacaagagaaaggagtcccttcttcagcctggctagccagggacacccatgctcgacccattgttggcgtggtctaggaggagccaggaggcccctgcccagtctgttacctacaattattgttgctacctctgagccacgtgctgccgtctttaaaggctcacagctacagcagagtgaaaggtcctgagctgcttggctcctgcagcatggaggctgacacacagggagagacttaggacaaatctggaccagaccagg

SEQ ID NO: 117760 - DNA, 2174 bp, Homo sapiens
gggaatggccaagagctgagcccagattgtattttggcatttgattgttgctgccgtgccttgaatatagcatgtagtatagtgttttagagtcagtctacctgggttcacacctctgctctgtcttttatagctagtagctgggcaagttacttaattacagtaaagattaatgaactatccctctctgtaaaataggggtagtaataatgcctacttcagagggttattttaaatagtaaataaggtaaacatgaaatgtttactgtgatgccaggtgcatagtaatagctcagtaaatgttagctgttgttttttctgttgtattaaaaatcagtggacatcagatgaacccaaattgaggtacagtctgcagaataactaccagcacttttcaagtatgtccaggtgatgaaagacaaagactgaggaactgtcacagattggaggagacaaaggagacctgacgaccaaatacagtgtgatatcctggattagactgtgcaagagagaaaaacattagtggaaaaactggtgaaatccaagtagagtctatagtttagttactactgttgtataatttcttagttttgataattgtcctatagttttgtaagacgttaatagcaggaaaatctggatgaagagtatatgggaaactctgtatttttttttcttttttttgcaacttttctgtaagtctaaaattgtttcaaaataaaaagctaaaatagaataatgtctaagtgatctttttaagtaaaggagaaactcaccagggtatagctgtgcccccagcataacaggtaacacctgagtcagtcttgcctcccatgtcagaaggagggctcttactcagggatcccaacacctgcctcttaagcacctgcacacctgctgcatcctcaggcaaggtctgttctaggcagataattggtcagatagcaatgcagacacacaccccagatcagatcctgcagcggggccatacagcaactggggaggaggccactcatgtggcattaggactctctgcagggctgagtgatcagggcacttgtctctgttctttggaatataaatgaaattctgcctgttttatcctacctaagcaccaatcactatggcagtatgtttgtggattgtgatgcctacccctacgctcattgtttgatcatccagagaaagaaaaataatttcaagcctttgcagtaatttattattttctttcctgccaagtggcttgcttttgcacaaagcaggtattttgcttgcttttcttaagtgtaaaaggtacatgtgcttttcttatgactgatgtggccatccctgtcatgctaatagcagggtttgtagaagaaagccattatcatcattggaagaatgtgagtcttggagtttttatttttgctttgaagtcaggtatcgggggttctggaaagtatagagtctttcattctagcacacaactcccttacaagcatttaccctcagaagcccatattttctaagttaaaaaaaatcaatgctaaaaaacattctttgtattttaactcaatggctaagctatgctgctttttgctgttgatttacacatcttattgtcagacccttgggatgtatgtggattactcaatgctgtgacaaatggctaggctccgaattgtgtattatattacaggatagttcataaaccatatttttctgtaggttattttaggcataagactagtgaactgccatttctcttttagtcacacgtgactttaaaaaggtggaggatgccagtgggaaggagaagtggctggctcaagattgaatagccagtggccccaaaaccttgtgaatgcagaggcttgaagtggacagaccttgagtatggattgggaggattgagagagcagagagaatctgctggaaatcaagccttttgctatacctttgctcaggctagagcactagcagaaaaataactggcttctcctctcctggggcttctgagtcctgagaatcctgcaccatgagtgggccttccccactcctgcgtccccctcccctacacagccacttatgctgatggatgtgcaaatcctttacagacagtttggcacggcttcgcttgcagagatcatctgtctcttttgactgagcaactttatgtttgcggctccttt

SEQ ID NO: 117761 - DNA, 1945 bp, Homo sapiens
ccaagagtataatctcttctgtcccatcctttatacatagacatgcacacacatgtgaggcccaagaaattgggtgggagcaaggttgttggttcaggacacttcatgcctaagcccctgcggctcatcaaagtgtgacagtgggacttcttagctgctgttaaggaagtaatgacttaagggagggggatagccaggggtctttgttggatgatgtttcaccctggctcaagcacagtgctggaaatgtggggcaggggctaaatagaagaaacagcctgattctgttggggtggtctgtcttcttggacataagttgctatctctggcaacttttcaggatgaagtattcaacagagcttacttttggtgctacttctttctgcacagtgccacccttcttactttgagggctttctagtcttctggggatttccttagaacttcatttgttcctcttctacctatacttctggtccctccctctataacttccaccttcccagcctttgctaagcattctcgactctgagcatctcctttgctccttggtaatacaagcttgttagggagaaccacttgggggatggaaggatgccaggtctcttgaggcctataggagcagtttctgaggcttcaaattatcctgtactgggagagaaaaaaagatggtgggctggaatacaggaaggccccaggaggctccatgaggatcatttagatctcttcattgcagagagacctcatttctcatgtagggaggtctcttcactagcctctcaggatggctgatcactgcccctcagcagctaaatcccacagccccctgggagagcaggtggaggccaggccaggaaggactgcaacctccatggcagccactgccaagactgaggccactttgcagccggctggctgagttctgctctgacaccaaagcatgtctgccctggctttggccttcattacccggatgggacaggccagggtccagtttgcaatctgtgcatttgggtggtgatggagagcagctgttggccatcctctttctaacaagcatttgtatgcttaacatgcaccctgaagcccttatcctccccttcctctgcttctatccacctgttctctctgaggtttaatcaggagtgctgagcagagtggcatagcctcaactctcaaaggttgggacacccaaatgtctgagatggaaaacttagaccaagtagggatgatggaaaactagctgccaaaatagtcccagccctcatgccacagactttgttttagttcagagaacctttgtagctctgactttgcttccttttctaatattggcctcaccccactggccaagacagcccagggcatctccacggttaagactaaccagggctaggagtagttctcaagggctggcctagagcttgaatgagaggccctttcccagaacctgttgcattcttagttttgtcagagccttggaggtaggaattgatctataacttagagacagtacttcactagatagagaagagaacaaagtatgagtagtggtgttggtggggataatatgaacagagacctgaagtgagagtatatctgcttgtctggagtggcaggtgtgtgtaagggaaaaatgaggtggtgggggtgggcagcatccactctgtcagaggtgggggccagtgagggagagggaggagatcaggaggagaactgacaagccagtagatttaaaggtgtgaaacttttttttttaaatttatttatttatttattttttattttattttttattgatcattcttgggtgtttctcgcagagggggatttggcagggtcataggacaatagtggagggaaggtcagcagataaacaagtgaacaaaggtttctggttttcctaggcagaggaccctgcggccttccgcagtgtttgtgtccc

SEQ ID NO: 117762 - DNA, 1090 bp, Homo sapiens
gccttggcaacatagtctttttaaaaatatatatctatgtatatacacctttgctacctccctttccttggggacctgaaggggaagtggaggtaaggaggcagccctggcagagggccccttgttctgctcattacccagtgctgcatgttggccccatgtgggctcagggaagcgtagccagccaggagcagacctggggctccttattgacctgatctgactccaggcggctgtgagagtctctgaaatattggcattagcacaaagagcccactcaatgtgagcacgcaggaagcctgtgcaggaacacgttcatgtgagggggaaaaaaaagaaaaagaaaaaaattccaaatcatcaacaactgatgagagcaatccaagaattatagagcaccagccatctggtcagatcatttcagatctgcacgagcaataagagggaattgaattttaaaaacctcatttatagtagaccaactactctggtttcaagtatttaagagaggagtctgatttcctgcaggccctggacatctgtctgaaggagcacctgactctggtctgggtgactctgtgacactgtttctgttgggcctctggctctttgcagctttggaggggcggcgtggttctccactcctctgacaccaagtgggtgtgcaacaattcaattcaaatctgccaatgtctatgtggaattagtctcagatccctcaagttaaagggctaagtccataagactgcttccatttcatatggcagttgcaagtcctgggccacctgtatttctgactgaccaggtataagttggggattctcacaatctccttctcaggtttgacattaataatttgctagaatggctctcaggaaaacactttatgtttattggtttgttatgaaaatgcaactcagtgacagccaaacggaagagtttagatgcggcaagatattggagtgggggtagggagtggtgtgcagagccttctagcacttcagtgtgtccgccaaccctcatgctcaagtggagttcaggaagctctctgaatcctgttgtttcagggcttttatggaggttttattat

SEQ ID NO: 117763 - DNA, 1044 bp, Homo sapiens
tgctgcctggaacaccaggggacaaactcatgacttcgtgggccttccctgcagtccaggtaggaattgggccccagtcactcagtcctggaacagctgcaggtgaatctcctgaagtctatctgcccctgttattactgtcagcatcctcactgggagctgcttgttcctagaagtgattttcctgtctctttcttctggtttattttgggatctgcctcaccttacggaggcacagcaagcatttgagggtggatacagcattagctgttcacaagcaagcagaggaaagctgtttgctggcaggtcctgggggttctgggcagggaactcaggaatttgtcctgaggctgaggacctgaggctgaacactaggactttggacctgtgcagttggtattacagaatgctggtcacagccacttcaatgggctcctgcaccctgggcatcatctatagccagagatataggtaacagctcacatttactgagcactgactctgccaggcatcctttgagggcaggtgctataactatcctcatttttacagatacaactgagtctcagaaggaaggactcagccaaacaaccaaaaagtggtagagttgggactcaaacctagatttgtctggctctaagccccagctcctaaccactgtgccatactatcttcttgtgtagcaaaaaggacgtgacccctgccctctatccagctcataatcttacaaaggatacagagaacaaagacaaaaacagccaccaaagtgttttggatgtcttggtggaagtattttgtgctcagtgagggcataaagatggtatggcaaggccagggccttttctctttaaccctgagatctgtgtggggcagttcatcaaattttatgatgctgaatctccaactccatctgcagctctctctttgagctgtgtggccttgctcaggttgcttagaatctcagaaccttagtttcctcatctgatgatagggatgaaaatataatacctacttcgcagagatgatgtaagaatgaaacaaggt

SEQ ID NO: 117764 - DNA, 1069 bp, Homo sapiens
tatgtcatccagctaacttgccctatgccattgaccccagagcctgggcctactctcttcccacttcttcccagtcctagctgtccttggctggagcctactactctgacacttgggactgttctcaggagtggcaaggtggatggcaagccccagcagctgccacagtgtagtttcaccagcttcttgctgatattcatcaccatgtcctcactgcccccactgctgctgtgctggcagggcagcatttgctgtgccagccagctttctggtagcaatattgctcctgctgtgtttgcacatgggtagttgctgccacagaagagtgatgaagcaccgaggaagccaggtgggagctaatggcattgagcagagggaacttttaggaatagaggtactgggttcagcagatccaacctctgcctgccaccacccaccccttgccaacctggcttcacttgagaacttagtcccactggtccttaaggactaaaaccagaggctgtcaggggtagggcgtggaagatacggactatatccgctgattttatgtatatagtgttgcttgtatcactttcacttttttgagacagggtcttgctctgtcacccaggctggagtgccatgttgcgatcttggctcactgcaacctctgcctcctgggctcaagtaatcctcccatctcagcctccagagtagctgggactataggtgcaagccaccacacccagctaatttttgtattttttgtagagactaggttttgccctgttgcccaggctaatctcgaactcctgggctcgagcaatccacctgcctcagcctgccaaagtcctaggattacagacgtgagccaccgcacctggctttcttgtaccacttttaaccaggcaagttcctggagcagatggaagtcagtgtcctgtggcctcgactcctactctatctgtttctgtggttgagtcagtagctcccttcatccagtagcatcctggttcatgttgcagactgaacgatgttgatggttctgaccctggccccttgcccaaccctctgggcagtggggctg

SEQ ID NO: 117765 - DNA, 1075 bp, Homo sapiens
ctgttttcaagttgaatgcctgcgtgacagtggtagaccagcggagtagcagctgcttcccttagtcaaggcaagagggctccagtttctgcagtcccaccactccctattgtttacacctggtccactgatttccctgcatccctgcctggcccctggggcatttcattgacacacctccaaggtaaattttattaactttctcctggtcctgcagtctaatgcttctgaccagggctgatcctagtgtatgtaggctctgggtacttagcagacagggtggtctttgttctggaatgtgaggcaagtacctggagcagactcaggtgctttgggctttcctcagtctaaggcacccagaagacacacctgcctatgggaaggggcattcattcatctgttttttcagcagcttcaaactaagccctgtgctaggcatgggggtgatgaaggagactgacatggtgcctgccctctggaaactcagctgttggaagttcttgatgtccatgtcctcagaatggaggatgcctcctgccagtcagtcttctctgtagtctcataagcacacctattcttctattcctagttttcttttgagctcagatttgtgcaaactttaagttgaagggataggaggggtttgaggcaccaggctgcgcaggtgacctgcttgaatgatgccatattgtatagtcactcctggatgtcacaacacagcctggaatctatgactgccttcataagtaatagtagcagccaccatgtacccaaagccagtggtttacaatgtagtacctcatctaactatgagctagatgttgttattattttcatgttgaaaatgtggaaactgaagcttaggaggttaaataactttcccgagacacaagaaactgggatttgagttattccagcatcttaagcactatgctggagtcagtgcctctcataactatgcatattacatctcccaggtgtggttagatttgagagcttcttcttgccaagatattttccttattggtccttagtaaggcctgaaattctgccatctaaatttcatgcctttatt

SEQ ID NO: 117766 - DNA, 1048 bp, Homo sapiens
ttctgccattgccactggcaggaggagaatgcccagaaaggccctgagcttggcctggctgcagcacactacggttcctggccctgtttacttggcttgtcccagcaacagcctgcccttgaccagctcctaatgccctccctctcctctcccttgataagctcccactgtcagttatttgacagtttcaccctcccctggccaccttccccaacccccagggctcccactaaatgttggataaagcgctggaagctctggagcgggaggtccttgaagtgcaaatgacaattgtgatgaatttaataacaatccagcttagctgtggttcacctctggctcatggcaagcttccaccttctctctgaaatcatttgtttcctctctgcctttccccccacttcgtggagcaggggaaaacatacagttaggagtcacgagtccttttgagtttttaatgccctctgagatcctgttggtgctgtttatttgcctcttcttcaaggacagtaagaatgggatcccaggggcccctgagaatgggactggctacagcgtgaggttggggctgtctctggcatgggttggcggtggaatggcccagaaaagaaccttcagggcccagggctgtgtcccctccccaacttgtacctcatgaggatgccatgctccccatcgtgagctttagcagatgcacaattaacaaaggcatgctgatgaatttacttaaggaccgagttaggaagtcccttttggataatagtccaaccaaatagatgagctttcagagcataattattctggcccatttatattagctctattgagtctagtctcagaaaaatgttaatactgactttcatcaacagaagctgcttttatccttatgtctgttcctaagctgtatccatttgtcataatctttcatcatgtgctaagcacaagtaggagttgaagcatcttttctctcataccataaaaattgctgccctgatgtcatttaaaatctaaattatgcagccagccaccttcacaacagtgaaaatgg

SEQ ID NO: 117767 - DNA, 1050 bp, Homo sapiens
ctttcttcatttttaagattgttttggctattctgggtcccccgaaatgtcatatgagttttagggatgagtttctccattgggattttaacagagattgctctgaatctgtatgttgctttgggtagtactgttgttaacagtatgaagtctctaattcatgaacatgggatgtccttccatccttatattcttttaattttttttttttttttggagggatggggtctcattctgtcacccaggctggactgtagtagtgcagtcatggatcactacagcctcatcctctggggcttaagtggtcttcctgcctcagccttccacatagttgggactacaggctcacaccaccatgcctagctaatttttttgtttttttaattttttgtggagacagggtctcactgtgttgttcaggctggtcgtgaacttctggcctcaagtgatcctcccacctttgcctgtccttttaatagctactggggcttgtacttttatttgtttgactgtttgaaagctgatgtgagaggttttgtgacttgggaatatcgaactttgctgtcttagaggatattgatgccatctgtcttcaggtaggataatgggtgtgttttagaagtgggtggttataaaggcttatgtggatttgtgcccatgtttgttcacatgcagatcagttggttagtttccctctctccttatagtcaagaccacccgccacaacctgataacaagttctaatgaagaaggaagggactagggctgtaatagcttatgcaggagtcctgatcgactgtatggttctacccagggcatatctcttgttggatggctggacccaccatggtagatggaggcttcagaattatctagaagtggtagaagactcgttatacctctatgcaggaaatgtctgacatgtgagcaagtgacgacatgggaatcacagtgcgggggaaccaagcattagcttttcattgaccttctgttgtctatgcttgcacctgcaggtccctgactatggctccccagagcctgccttcatct

SEQ ID NO: 117768 - DNA, 1048 bp, Homo sapiens
tctcccactgcccacctcagctccatgttcttgtcctctctttctctctctcattctctctccctgttttgtggaaaaatatatagaggcaataactgggtcagctgtgcagtccatgtggaattattgagggaagatgaaggatccacttgtgaatccacctctcatccttagtattggcagaaaatgtttctgacagtgttagcgtgtgtgcaggagacagagatggctgggagccctgtgggagctaccatttctctcaccctccactcctcttcccactccaaggagtgggggaagctgctgtgtgtgcatcagctgcccctgacctcttcttcctcagtcccttctgggcctcccccttctgctcatttgtcttctttgcccttgactatttccttctcatttagctcttcctcctcttctttttccccagcaccagtttcgttgttgatccctagctgtaagaaggaagctcataactgtgtgtctgtatgtgtgtgtctgtgtgtgtgtgtgtatacacatgagtatctcatggaaggggagggatatctgtggctttgggttaatctttgttttgttgtatgttgtcctgataatgctgtgagtcccccacttctattctttattctttttctccccacagccaaggctgcagcgttaacagaagtatagagcagtataggcagctctagggttgtgccctctcaggaaccatctccctaggcctccctagccttctccctcctgttgtggtgacgccttgcccttgttcatcctcacccagcctggcccctctcctgctcacacccagggatggccagtcacctatccagagcctggtgtggtgctgtgaactcaatccctgtctttcagtgtgattggtgccccagggagccaggttgctgggggaagctctcgtggcactcagccgttccattttgtcggcaaaaaaagagggggggagctggcagaaagctaaggcttttgctgctgggtgagtgtagcagctatttttagtacccgagcctttgcttttccattt

SEQ ID NO: 117769 - DNA, 1047 bp, Homo sapiens
tctgtgccaagggcatttagtaatcaaggtgcctgtgtgtggtatgtgtgtgtgtgcgcgtgtgtgtggtgtgtgtttgtgtgtggtgcagaaactagaacatggtagaggtgggtctttccacaagagggccccagtaggctcatttaaaaatttctgtcctttctacatatggctagccagttttcccagcacccattcagaggtgggaattgaacaatgagaacacatggacacaggaaggggaacatcacacaccggggactgttgtggggttgggggaggggggagggatagcattaggagatatacctaatgctaaatgacgagttaatgggtgcagcacaccaacattgcacatgcatacatatgtaacaaacctgcacattgtgcacatgtaccctaaaacttaaagtataataataataaaattaaaaaaaaaatttctgtcctgacacaaaatgtgcctttttatttatactgttgcagaacaaataaaatgatgagtccagtttctgtggctgatttcacagacccctcgagagacagcacggctatggaaagagcatggctttggggccaaactggctttgaattctgactctactgctctgtggctgcatgaactctggcacgttacttaacctctctgaattttggtcccctcatgggtaaaatgagcagcatattggaaccacctcagagggttgtcgtgaagagtaaatgaactaatactttgcttgcaacatggaaagttctctataaatgttgactataattattatttgacagaattaattttcctctgggatgcccagatagtatatttgaatgctgggggaaggggtggcactagggtatttctctgtctccgccatggcggagttattattacatttccacaaagtggaaggactaaagcctccgggcagtctgaggcatggctgagagcccagagaaggtagaattgtgtctgatgggagtttcttcttagaaattttacctccctgccccctccttctgctggagtgactgatgcccatcatt

SEQ ID NO: 117770 - DNA, 1034 bp, Homo sapiens
tgtactacattagtaaattccaagtcttcccctttgctattccaccaaactgatttttctcccaggaaccccaaactggttctactggctcctctgcaaagatttcatagccacagcagccacagtgtcctctgttaccaagacatcattatttttacaaaacatactgctgtgtttctccacctgcattttgaagtgtcataaacagataaagctgaagcacacttgtcagaataggttcaaaaagtgcattttgggttgctttacctttgtcctgacaatgtgtttattagcttgcttgttaattccagaattggttaacttgaggtacctctgggccagcctgctcacaccaacactcatcctgaaaacttccagagaaggactcaggtggctcactccttctcttggtgttcctgggaagtcaaagtggtgaatagcagtccttctcagggggcagagaggaaactgaattactcgtggtctgataccttccaaacatgtctctgtgggaaaggagaaattgtgggcaggatggagcagaccaacaaaggttaggagcttctcagtgattggaaaaacaagtacaaacaaaaaattagatgaaaacctttgttagacagtttgatttacttcctcttgtggatgatagattctggactatttctctccacacctgataattagaacatcaagaagataattcagtctctgataagcttttgcagtgatgttggtgggagaaaggagaggctcatgagaaggctttgcagcagaggagctgtcagtgctgattgcttcaattcttggcagggtcacccatcagatagtggacaagtctggcttggggaggctgtgtatagaaaaggagcaaggcacagggctcaagagtgctggcctggagtcataggacccaggttagagtctggctagctgggtgtgttagtttcacgtggctgctgtaacagatgaacacaaacttggtggcttaaaacaagagatttatcctttcatggttttggaggccagaagtc

SEQ ID NO: 117771 - DNA, 1517 bp, Homo sapiens
agccaccgcgcccagcctgttattcttgttactattaacttgctttagttactgactatcccctatccttctggaatagtctttatgtttaaacttatgtagaagtccccttttagtgaaactcttgctacccccacccttttttatttgtgatggagtcttgctctgtttcccaggctggagtgctgtggcatgatcttggctcaccgcaacctccacctcccaggttcaagcaattctcctgtctcagcctcctgagtagctgggactacaggtgtgtgccaccacacccagctaatttttgcattttgagacgggttttcaccatgttaggctggtctccaactcctaacctcaggtggtctgcctgcctcggcctcccaaactgctgggattataggcatgagccacgacacctggcctcgctcccttttttatgcaagaatttcagctatacaccagcaagacagggatttgaaggttctagtagttaccagaaggtagttttttggtagaacagctttttggtagagtggctctctcaaccaactttgggctcaaaaatcattattaaggctctgctcacttcttttactgccccttttcagtgctaaatgatgatcctcattcctttaatcttttttcacttgctctgtttcctggcccctgtgttgtttctgcagttcttcaaaggagtgttttctttcggaagttttcacagctgtcttctggctagggttgtaggtaatatgttaggctccatctcttctactcctccaggctataacttttgtgtgtgtgtgtgtgtgtgtgtgtgtgtgtgtgtgtgtgtgtgattgtggaaatgtgattgggatgggtaaaatgcacagttaggctctcccaccccactgtgactgtcatttgtgaatctgtgtcatgtaatggtacctcagccagggtccccaaacttgagatgctcttgaccttcagggatggtaatggcctgcacttctgtgatgcctaatgaggctgcctttaaaaggaaatttttttttaggttgagggtttttgttttgtttagaaagtaaacatacttgcatctctttttattttgacttgcattgatttcctcttctttcttaaatcctgagtaagaacttcaaaatcagttgccaacctttgtgttcacaagaattgagtggatcagcctctgtattcttcacctgtgcacctgatggactaatatactgctgtgggggaaacagcttccaaaggtctctcttctcttacacatgcacacacacacaagcacaactgtgttataaagaataggcacttctctaagaggaacttgtcctgcttcatgcaaataccctccattgcagcaaaattctggaaactttgaaagaggtacaattagtgattttttttttccccaagaagcctcaaagctcttaaaataaatcttaaaaaatctggtactcagagcttcagctcagaaagcagacaaattgcaaacctggtgcaataagact

SEQ ID NO: 117772 - DNA, 1027 bp, Homo sapiens
tgttttccctccactagaacgtaagtttcatgagagtagggacgagatctgtttgtcacattcacagctgtattcccagtcctaggaaaggtacctggcatatagtagatgatcaaacaacatttgttgaatgaatgagctgtgaatgagaatgtgttcttttattacgctgaacctgggtacacaggtgttcacattcacattcctactgctttgttccttaaataaatgtaatcaagatgattttctttcttattcattaactattgtgctcctccactcccattaattggaacagtctgtggagaggccattttccccttccttcgttttatgtggctctctttcttcctagcattttgttactggaagggggagtttgtggttgctaggctttgagcattgatttttaggatttctgtcataaggaagcaagctttagtgaattggtttggaataaaacaaacacaaaagctcaccaggaatagcaaatttatctcactctgattttttactgacattttttgtagtactccctaagttcttagataaggtcattagacaggaattgacaatggccagatagaaacaaattcacagaatgtgagtgggtggcagggtgagacatggagaggtcagaggggatagtgcttctctttctggtagtggcctggtttttcatggcaaatattggccagtgtaactgttctcctttcgtagggcctgtatgtttgggagctgtagagactgtagggggactgctcagtgctggtgtgcccacctggtaaggcctaggcaatcctaatttttttttttttttgagacagagtctctctctgttgcccaggctggagtgcagtggcatgatcttggctcactgcaacgaccacttcccagcctcagatgatcctcccacctcagcctcccaagtagtggggactacgggagcgtgctaccatgcccagctaatttttgtgtttttagtagagatggggttttgccatgttgcccagtctggtctcaaact

SEQ ID NO: 117773 - DNA, 1038 bp, Homo sapiens
ttttttattaatagccctgtctataaagtacctgtcactatgcctggcactaagtggtgctcaaaaaatacttctgcctcccttcctgccaccccctacctgcctaccctacataagagaagggtaaggagaagatcctcctgcttctgtagagggaaaatggccttaattagagctttatgtgaacttctttagttgctgatattgcttttctgagccacaatctgtggacctcctctgaagctgcctcatcaggagcgactttgatatttagtgtttgggcacatctctgcttcatccaaggagtaaaagagggtttaaaatctcatcagggcacagaatgcctgcttctgcccctgtagccttgcctcccctcccttctttctttgggtgggtcactcggggggcactgtctgccctggggattactcatttctttcagggggtcctggttgtttggttcagtgtctttactggggaaaggcttttgtgtttgtgcctgcctgggcctgtgctgggaacttttattttggaagcctggagcactcagacaaggtgatatctttttagactgtttctggctgtaggccagcttatcactatggctaccaccagcttaaagaatgtcaggacagaaagtaacttctgtaagaaatttgggagagaaagggggaaggggagagaattgtttggcttaaggtcatgtagggaggagaacagctctaagtagaactctttgatttggatacagcttcgttttccttctctctgaaattttattttttcagtcaacaaatgtatataaaacatctgttacattccagagactgttaggccctgagatacagtgtcagatagggttccagcttagagtgtactgatgaatatgtcaaagttagtaaaattacacttggaataagtgtattgaaagaaagagttaagaacatctgagagggatttgacttggtcctagggctaagagggtatcatagaaggcttctttgaggaagtgatgttcgagtaaatattgtgaagacc

SEQ ID NO: 117774 - DNA, 1049 bp, Homo sapiens
ctggactctggcgggtcctataaagaaggctgagcagccagtttagtgatttctcaacttcaaaatagaagcctggagatagtcctacccctcctctcccttctgccaattttaccagcaattgccaagaactgtgtgtggggaaccaggcagaatgactctctggaaatcatttgtttgagaactcccagtggaggaatgcattttcctgtgcttcttctcttgtgatggtgtgtgctgttgtgatttggtactgcttgtccctctgcagtactgagacttgtatataactcctccagccctgcgggggttttcaacaataaattgcttgctgggtagtatttcccccaaatccctgggagagcaggggagcatgttaacaattagggacctagttgagcctctgtttctggcactgtgactagaggcatggtgggtgaacccagatgagccatgtttcccactgctgctcgggctgggcatttattgcagttggatgtaacattaagagtcacactagaggcttggttggaaaggagagagcactgcataattattgcttatgtactgtttaaacctatcagccaacagatgtcaagtgcagaaaaaaagcacaataatgttattataatggcataatagttatcattataataatcagctggcataggttttgataagaggcagatcctgaaatgagtgcagggggaagggttaaccttgaactacagcacaatgaatggctgcttaaccttgcagaagatgctgtgtagaggcaggtgactcaggtatggagttgctaccctctctgcctagctagaggagctatggagacttcagctgggattgtctaccctgcaggtactgtctttctgatggtgtgatggagcacaccatcctttggtttaaggcatgctacactgcaggaataccatactagtgcccagagctgtgggttctgggaaatgcagagacttcatcactgtggtctcattttgggttttcagaaaatccagcctcatgcccatagttgcagatgatgaattttg

SEQ ID NO: 117775 - DNA, 1035 bp, Homo sapiens
cttgttcttagttcttgtagcaatgaggcagtcctctttggaattctttaccatttccaggaccattgcagttagggcaggaatggagtggtggtgattcctctttcctcttttggtttgaaccctcctttcaggatgcttagttacacaggcctgtcctctctggaaaaaggggatcagtagtaggtttctccactttttggagaaacctaaactaaagcttcaatggggcaataccttttaggagagtttgaactgacagtctggcttcctattctttgcggagagttattgctgctattaggcagagggctttgtttccaggttacaaatctttttagcaaagaagtgagtgtggaatagaattggaaggacttgtgtagtccttggatataatttaatgctccacatcccagagagagtaaacattgtaaagtgtgcaagatgggtttggattaatatcctgacagcatgtggcttggcatgtagggcattccttggagacccttcttaccatacacagcctgcctttgccgggtggcctcttcccacaggtcttcccagcagctgttgtgcacctgggtgaatcatccgcttccctgtgctttgaaaaaacccattttaactgatgaaagccctcatacaggaggtgcaataaacagacaaccttgaaaatgttttttagtacaacctaagctgcctctgagtttgtccagggtattcacctccattaggagcactggctgattctcacctctggtctcttctgaatagaatatggaaaatcaccttgccctttctactctgctgcacctgacatcatgggtgtggaaggtctctggaaactccggggaggcaggagcaccatggacatggagggaaggctcatttgcttctaaggaccatgcagaaatccttggctttttacttctgttagtcctacttaaatcagaatttaaagccttcaaatagaattctgtgtatggctgacatagcatggagtagggaaggcttctttgtaatttctgaggagaa

SEQ ID NO: 117776 - DNA, 1056 bp, Homo sapiens
ttcccagccacagtgagttcacatgctccattcccagagccctttgtttttgaagcattggattccttagagtaagccttatacactcaattggattagaacttcctagagggcagacactgcatctgtcattcctcttcatgcatccaatccccagcacagtcctggcacatagagagtgttcaataaatgtttatgaattcaagagtcctgctatttggtcagctgatgtacttgccagtttagcctcctgtgttactcactggctaggagtctccaactcagatgtttttagggccaagttgggaacagagaggcaacagagaatggtaggcctgtgtcaaaccggagtgcttatgtgcttcatgaggggtggctgctactcagcctatcgtcatgggtgagtatggcctcctcatgtcatatgggaggccagatattcataatctctagggactaccaaagcatatttgtggtctagatttgacctataggctacccatctgtatcctttaggtagaggctggagtttcacacatttaaattccttgtaaaataataaaggtgggggaggggaggacatagcttgaaaacttttgagggcgtttggtgaaagcctatctttagataaaagtgtcctatgattttctgtgggtagtgacttaatctcttgggttcggccctgtagaacatctatggtctgggctttatcctcccttatattctgatttcactgggctatgaaaagcaacttttgtccctagaaaggtggtgactcaagaacttttgcactttttgcccttttgctcagcttccactgaggcaggtttgatagttgttcctgcttctggctactttgaagggcctggtggtcaggctggtgcagcataaggtcccagaggccacttctgttaatgacatctctgagaaagagctctgggtgaacaaatacaactaaaagggaaatacattgtacagaatcactgcttaaatgtggtcagccaaggggcaaaacagtataatagccagaaggaagtctgcatctccatggaacct

SEQ ID NO: 117777 - DNA, 2261 bp, Homo sapiens
tgagaatctaatgctgccactgatctgacaggaggcggtgctcaggcgttaatgcaagcgttggggagcagctgtaaatacagatgaagctttgctcactcacttgctgctcacctccttggatgggtttctgataggctacagaccagtatcgggggtttgggacccctgatgtaaatgctctgtgttgtcatcattattgacaacaatagtttccagtttctgagccacgtcgtagtttcaggataggttatgctgaccaagcaagttttatcttaaccatcacctcattgttgtcttagttggtttgtattacatattatttataccaatagttataggtatttcatgctgaataactaaaagttgtgagtagcaaggaactttgctgcttctctgccatctccttccttactcagcttagtgcttatctttctcaggttctctcttgtcaggtgctcaagccagcaggccttgtttcgggggcagtgtctgatgaggggattttattggggtagggctggctagtccagagcctgcctggtccctcagatagtatgttctccttatctcttgctttctgctcttcagccagacatgaagcaattagctcatcaagggaatgttgacttttgtcactgctttcctctgatttgtatgctcatttctggtccttgtgcaaagtcacggaggcacagtcacatacactgacccagattttgtgctcaagttgactgtctctctctttgagatgtacaactggttccatgtagcaagggagtgaggaaaaagcccctggagccaatcccattattttgatctcaagttgagtttttaaaaaaatccaagcactatgactatagaccatgcctcacttctctgtatgaaacaaataaggtaaaaaaaactcactatttggagggaaggccaatctgaattggtaaacaataggaattagtacattcaagaaaatgccattgtctttttctttttagcgagcctctgcagtatcttttttacctagttttgttgcttcccctgtttcctgtgactgtgctccagaattattacagaagcgccctcttatttcttgcttttgcttcctccaggacactatataccactgccactttgggtcttcctatatattgtgcttatcagagaatacttatgcttggaagctgtattagtctgttctcatacagttataaacaaatacctgagaatgggtaatttataaagaaaagaggtttaattagctcatggttctgcaggctgtacagacttctgcttctgggaaggcctcaggaaacttaccatcatggcggaaggcgaaggggaagctggcacgtcttacatgtctggagcaggagaaagagagcaagggggacatgctgcacatttttaaatggccagatcctgtgagaactcacttttgtgaaaacagcaagggggaaatccgcccctatgacttagtcacctcccactaggcccctcctccaatattagggattacaatttgatatgagatttgggtggggacacaaattcaaaccatatcagaagccttcaatggcacccactagctcctgaataaattccaaatgtatcaggttgttggtgttccaagcctattgcagtgtatacccatcctaccattttaattaatatgtccgtaccatcacccacgtgtaccccttgctcctgatgaactgatccacgtggtcctctgagtatgcttcatgttggtgtctctgccagttcttttgcccagagtactctctccttagtttcctacttttttttttttttttaagatggagtcttgctctgttgccccaggctggagtggagtggcacaatctcggctcattgcaacctctgcctcccgggttccagtgatactcctgcctcagcctcccaagtagctgggaccacaggcatgtgccaccacacccggctaatttttgtaattttagtagagacggggtttcaccgtgttggccaggctggcctcgagctcctgaccttgtgatccacccgcctcggcatcccaaagtgctgggattacagacgtgagccactgcacccagccggttccctactttatgctgcagagctgccgccttcagtgagccttacctgatgtgtcctcatctgtatccccattgcaacacctttattatagaattcagcacacttttattatggtatgatgtttgtctctttttatatgagcttctcaaggatatgggttgtga

SEQ ID NO: 117778 - DNA, 1344 bp, Homo sapiens
agctgctaaagtctaaaatgattgtgttttgggctggaagatattatagagatctttatttccttgcaaacatcagggctggctgtttgtggtactgtggatgagtgaagagtcaggagatacacttctagttctgttactgcccaatgcctccattttgcatttgataggtttttatttttctgacgacaaaaactgagccccagagaagtgaagtgggccacgtaatggtaggatcttttttaggccacccacataatagtgggactctagtgttagagctgggacacaggctaggggtcttacaaagggtggccatagaagttgttagaattgtttaaagcattgtaaagatgcaggatgcttttgcagttaaaagtctcctgggaaggaggaggccctgtctccacttactgccttgtacatgatcttataccctcatggttgaagatttttgctgtcgtgctgtttttcctcctactcatgtcgaaatgtgtttctcttgctcttacctcagaggaaatgaatttgaagccttcctccgtgttagaaacaaatagtgctcaggccagacttgtgtgtttctgtaaagaatgaggccagatgtaacagtggaccttatctggtgatccaagcaaaccttcaagacatctctaagagaaagagagaaggaatgagtgtatttcagagtggtttaaacacactttggagtcagactcacttgtatttacgttctgatatctacttactagttgtcagattgtaagttacttattttctctaagccttagttttatgatctgttgaatgggaatagtaatatgtatttttatagctatcttaagaattcagagaatagatatggtgcttcctctggcacaatgtaaaacagcagtccccaacctttttggcactagggactagtttcatggaagactatttttccatggactgggggatgtgggggatggtttggggatgattcaagcacattatatttattgtgtactttatttctgttattattatttttgagacagagtctcactccatcacccaggctggagttcagtggcacagtcttggctcactgcaacctctgcttcccaggttcaagcaattctcctgcctcagcttcctgagtagctgagattacagatgtgtaccaccacacccgctaatttttgtatttttagtagagatgaggtttcaccatgttgaccaggctggtcttgaactcctgacctcaggtgatccacccgcctggacctcccaaaatgctgggattatgggcatcatgcccaacctatttctattattattacattatagtatgtaatgaaa

SEQ ID NO: 117779 - DNA, 1007 bp, Homo sapiens
gttgctcaggctggtcttgaacttctgggctcaagcatttctcctgcctcggtctcccaaagtactgggattattaagtgtgaaccaccacacccagccaagtttattctttattgttttaattttcttccagtctttggattttgaggtggtccatttatcatctgcttctctggtgcctcttggaccttccatcttcacagctggggctgctgtgttggcccaggtgtccccagactggacatcggaacctttgggaagagtctgatgtttggcccttgtcacatttcacatttcacatctacagagaaatggggaagggtatgtttctgaggtctgctcataggctatgttgtgactgaggaagttcttgatcatcccttttggttaccacttatcatcactggcagaaaaacatcaaagtggtcagtgaactcatctccacatctggctacttccatctctgcaagtagtttgcttcttcagtcttgtgatgggaaagagatctagaaactggaagaataatctgagatacatcctaaagttctggtgaggaaagctaatgccaatggacttttttttttttttttgagatggggtcttgctatgttgcccaggctagtcttgaactcctgggatcaagcaatccttccacctcaacctcctgagtagctgggattacatgcatgtaccaccatgcctcactcgccagtggatttttttttttttttttttttttgagacagcatcttgctctgttgcccaggctggagtgcagtggcacaatctcggctcactgcaacctctgcctcccaggttcaagtgattcttctgcctcagccttccgagtagctgggactacaggcgcctgccaccacgcctggctaatttttgtatttttagtagagatgggatttcaccatattggccaggctggtctcaaactcctggcctcgagatctgccggcctcggccttccaaagtgctgggattacaggcgtgagcca

SEQ ID NO: 117780 - DNA, 1040 bp, Homo sapiens
gccacctcgcctggcatataaacaggtttttttttgacattgtgaaagatattttgttgtgtgtgtgtgtcttttctgctctcaccccacccaagtttttttcttttctgataaaagtatagccagatttggggattgggtaggattttgatgggagccagagtgtaacgatattgggattgatatttgtataacatgggtcagaacttggtctgtggttttgagaacatggctctcgggtttttaagatggtgttaccacaccacatttatttcccctttctttcatttgtttagtgaatttaatctgctcatgaatacatgtgctgttttaatgaaattggcaatagaagagacgttctgctcccattttacaggtgatggaaatgttagtagggatgcggcagtccaggaatgaaaagttgcctagtactttgattcccacttacttccccttccctgctgttttctgaaggccagctattacttctctactgaggccaactgtgagccctggtgtgtttcattggcaggagaagaggctaattaagtgaaactgaaaggtaacaaaatggattttaaaataactgacatgtgggaacttgatccaccaatgaatgttctcctttagagtgatgtgtgcaggtgtaggtggtgggagttgaggatggcgtgcctaagtgatttggctgttgtccaaggcagttttgaaaatccacctctggaattgttttcagagacctttttgaaccatgcgagagatcagtttctttaatatattaaaccatactgtattattattattattatttttcagatggggtctcacactgtggttcaggccggagtgcagtggcataatcatagctcactgcaaccttgaactcctgggcttaagtaatactctcactaaagcctcctgagtagttgggactacaggggcgcaccaccaggcccagctaattttgtaattttaatttttgtagagacagggtctcgctgtgttgcccaggctgtttttgaattcctggcctcaagcga

SEQ ID NO: 117781 - DNA, 1228 bp, Homo sapiens
accgtggaccaaggtgacctgcgtgggtgagcgatccattagccgaatgacagcgctgccgcagaaagccagaaaaaggatatgcgtgggaagcgcaaaagcgtgggctgggcctgcagcaacggaaaggcgccacgctcgtgagcggaaccagcgttccgggggcgctcagtgtgggcaggcaggaagcctggctccactaggacacacagattctctcctgagcagctgcgaactatgcgccccttctacccttaagagatgggatgggagtccaacaaacccagccattgctcagaccccagcccttctctcctctaagaagcaggttcacctctgccaccgcactcgcatttttttttttttttaaagcccggcctttcctaggcggggtcaagggccccgcccaccgaagccacgcccagtagccgccccggggcggggttcccctcggctcccggctgccctttcccctccggcctctgccggtgctgctgcgccctgcggagctccgaacacgtgcgcgtgagtaaggacccagaggggagagtccttggaggtttcccagcctggggaaagaagcagtgcagggtggcttctgccggggcacgggacgaaattggggttcgtcccctcgtgatcccgagcttggagggcatctgaaagagacttgggcctcggagtcgtcccctgtttttctaccatccctcttccctcttctccctagggagtcccatagagcctgactccgagagcctcgatctcccagggccagaggcagggactttggaaggtttgtgaggaacaaatgtccggtggaactgagtcagcccctttaacccgagccttgaaaggggcaggctatttttagatctgtttttagacccagcgaacaatgaaccctctctactcattttcctgttcctctaaattatttggaggaagtcaggagtgaaatttggggatggctggaaaaaggtatgatcttagccttacataaattataatggtgactgtgaggccgggcgcgtggctcacgcctgtaatctcagcactttgggaggccgaggcgggcggatgacgaggtcaagagaagaagaccatcctggccaacatggtgaaaccccgtctctactaaaaatacaaaacttagctgggcgtggtgtcgcacgcctgaagtcgggaggctgaggcaggagaatcgcttgaacccgggaggcagagattg

SEQ ID NO: 117782 - DNA, 1100 bp, Homo sapiens
tgagcccaggaagtggaggctgcagtgagccatgattgtgccactgcactccagcctgggtggcagagaaagaccctgtaatataatacctccattctacaaatgagactgaggtatagagaggtttctcgcccagtatcatttggctagacactggttaggggatagagccaggctccctgatatttgtttaatcgactcttttgctactattgaactgctgtggtgtataagtaacaagagatgaaaacaaagctaaacaaggataagctattggttttattgtctgctattgtttctgtggcttaggcctaagttaccgtgttttgaggggagggactctgagctgcacacgtgttcactgttggctgactaacctggagttgtttcattgcagagaggctggctgtggcagatgcaactgcaggtgagtgcaaccccttcagctctcttggctccagctgtaggcagctgcctaggttgtcttgtacctaggcaagtgttacactgctgggagaacagcagccaatagctggttggcattctggccctggttcatgccaactcttgtgttgactaccccaggatgccagcatagttgcttatccattaaggcaggcgtgttttttggcttccctgggccacattggaaggataagaattgtcttgggccatacataaaatatagtaacactaacgataactgatagctaaatttaaaaaaaaattgccaaaaataactcctcataatgtgttaagaaagtttaccaatttgtgttgggctgcgggttggaaaagcttgcattaaggtttaatctgtgagagcatgactttttgcagagaataagtccagaccttcctgaatagttctggtccaacaggtttgggtagcatgaagttacttgaatcataccttggaaacagaacaaagctaatgggaagagggggttggtaaaaatagacggaaaagtcacacctttatttttagtgcctaccaagggctcaaagggggccagatacaatgggatttttgctaatttcactgaaattaaagtccatggctcctactacccaccataaaagctagtcatgacaccctt

SEQ ID NO: 117783 - DNA, 2105 bp, Homo sapiens
atattctgtgtactagatcactaagtttgcttgtcttcctttttaggatgacttgaaagtagggcatccttcacccatctgaagggaggaaatagtggcaggtgacagtctgcatgtgcagttttcaggtaaatatccctattcattccaacattgactacctcctctgtgccaggcctgtgggctagttggtatctatcaggaaacaaatgggaggtaaattaacctgtatttgtaagatccatgaaggaaaggacaatatatcttgttttattcactgctagatcccaatcgcagtgcttggcacatggcaggacctccctgaatgttgcataaaacaactgaaaacacagaaggggattcctgttaaagggtttgacaacagggtctgcaattagtgcttccacgcctgttttgcagtcaatattcaactgatacgtcttctacctggagtgcctaggtatctgaaacaaataatgagaaagctgtttcaggaatcatccagcggttgtcagctatccaggctcatgtggtgcctgtgatggtgttacactgttggaagagcaaacactgtctttattgaggtttggctccaagcactgttttggtgttgtagctgagtacctttgggcagtgttttgcacctctgagagtggaatgactcctgtggagttgatcctagtctgggtgcaaacaatttttttctgtttgcagaaaaagacaggttgtcttagggacagcctgtcattctttacctctttgaatcctagatgccttcacctgaatgacatctacctccatcaggaccccagatgtctgacagccctgtgtgacaccaagataagtaacgtatgtagtcttcttgtcatgtaggtcccaattaaattactatagctcagatgggggtaggggacttaaaattatgatgtgaaaaattatgtagagtatcagacttttttttggggggggacggagtcttgctcagttgcccaggctagagtacagtggctcgatctcggctcactgcaacctctgcctcctgggttcaagcgattctcctgcctcagcctcccgagtagctgggactacaggcacctgccaccatgccaggctaatttttttattttaagtagagacgaggtttcaccatattggccaggctggtctgaaactcctgaccttgcgatttgcctgccttggcctcccaaaatgctgggattacaggtttttttgtttgttttttgagacggagtctcactgtctcccaggctggagtgcaatggcgcaatctcggctcactacaacctctacctcctgggttcaagcgattctcctgcctcggcctcctgagtagctgggattataggcgtgcactaccacgcccagctaatttttgtatttttagtagagatggggtttcaccatgttggtcaggctggtctcgaactcctgacctcgtgatccacctgccttggcctcctaaagtgatgggagtacaggcatgagccaccgcgcccagccaagtatcagaattttagagaattcttaggatctaaagtccatccctcacttttctggagctctgctgtgcagtaggtatatgctacatgtggctgtgtaagttgataaaaattaatcaatttcttaatctcagaatctggctgctgactaccctattggacaactccaatattagagaacatttccaccaattcagaaagtttattatgcactgctgttctagagcagggatcagcaaacttgctgtaaagagccaggtaatataatattatgcttgttcagccatgtggtttttgcaactatttttgcagctctagtgcaaacacagccttagacaatatcaacacatgagcaagtctatagttctaatagaacattatttatggacactgaattagaatttcataaaattttcagtgtcaaaattgttttcaatgatttacaaatttaaagaccattcttattttgagagccatacaaaaacagcaggctggaattggcccataggctatggtttgccaacctctgtcctggagaatgaaattcaggccttgaaagttgaacagctcattagtgacaggttc

SEQ ID NO: 117784 - DNA, 1058 bp, Homo sapiens
tgttaatcttttcccatgctgcaatgaaaacttgaatgagactggcagggttactggtctgtaaatacccaggctgccagctgccataggtagcagtaaacacaagtgcctcttttcattgcttaggccaagtttcaggtcttaggcctgtaccatattaagaggaaaaactaaaaataaggagggtttccaaacacccccaccaaccttgaattttttaaaaaatgagggaaccacaattaataaacactattcctggcacctgtccatgatttcacttgctgggttgaaacaaactagtgtcagtgggattttatgttgaaattttggatcatgcctcactcaaatttaaaccagaaaagcaaaacccagagggataaattctgcaagtcccaaagggacacaaagaggtggctaagtgcctaggaattcacacaaaggaaaacaccgtgctaagagcaactaattaagaacttaaaaagagtgacaatgactcctgtgaatgttgttgcttaattagggctttatgaacacagctccagttaatggacctgtcaatatactcttgaaaaacaatttcactgaattaacaaattaactgtaataacttaaaatctctgcttagcaacatctttctccttaatgctatttaggaacacttgtaatgagccaacttgatgagtcataaatttgtcagtttagtagcctaaggcttgttcagaggagaccctgttacttgtttggtcttccttgccctccagtaaaggccctttaggatgtaagaatgttctgtgctgcttcttaagggtgatatactcattgggaaagtacagtaaaaaggactttaaaatttattttattttacaatacttttagatttatagaaaagttgggaagatggtacaaagagttcccatatataccatacccagtttcccctaataacatcttacattggtatattatggttgtcacaattaaatgggctaatattgatacattagtattaactaaagtccatactttgttcagatttcattagtttttatgtaatgtct

SEQ ID NO: 117785 - DNA, 1907 bp, Homo sapiens
aaggtaggcgtgaagcgggtaagagtcggggtcgggtggctgggggttctccgtgtccgccgggaggggacaacgacggcgacaggggctgcggggagccggcggcgcgcctttcttgctcgctcccgctctgcctccctccgcgttgcgtatgtgagccgcctgatcggcggccgccatgttaggagcgcagtggcggcgcaaccagccttctagggcggcggaggtgagcggtccgggagggaaacacgcggccggccaagggcccagggtgcggcgggagattttgggtgaagaggtgcgctgaccggccgagcttcctgcgcgtcctgggctcgttgtgggcgggggcgggacgactagcccgttacacgcgggccgcggcgctgagggggagggaggagctcgctcgaggcctgagggacagactgtacactgggggcttgccgtttgaggaggatggttaagatatctaagtccttgggtagcgccagtgccaaataacccgttcgcctttttttctctgaaaatgttcccccaaaatggaggatttcgcagactctgaagagcctgcttgtttgagcagcgtttctttcttttcccggtgtctcggccttcacgccgctccttgcccatcgcctcagagcgccccctaagactcccggcccacacgcgcgcgcgcgcgcggcgttagctggacatcagaaacaattcctccccgccccccatcgcgtaaaaatggccgaaaaatgaaacgttaacgcttgtttttcgtactgcgtcgtggaacaagccgcctgcagtacagtgcgaggcgggtgatttgcacttgtttagtcaagtcacctcacatcctttttctctttatcaaaatagtattagtccaggttcctccagagaggatcgtgtggtgtgggaccttccggtttccagacaaagggttttggagtaccgtggtgtagtcgccgcatcgttctttgcatttcgagctctgtgccatgttctgtgttcggcatttaccgtggatgaatatcccctaggtgtttatcctgctctgtggccctgttctgtggaatattcctattggatcagttacagttttttagccagatatttctagaacggttatggtggttctgaaatggctagtctttcgggcgcgctggaataatgtgaagaatcgttgatttcgtaggtaggggtcacgagattttgtattggtactgcgttctgtgttttaaaccttggcttaagatttctgaatagtcggtaaaatacatttttctcccagggaaatctaaacagttgactatgcggacaaaaatgatgtttcaggctattttaataaatgtttaaaatttccctttaaaaacatttctttactaatggctcagtcatctacgcagtctatcgacgtttttcacagtattgttttaaaaatcaagaaaggcttgacattttcgttgcaaaaacgctctggatgatgccttttccacttaaatagaatgtttttgcaaactcgaaattaaacaacattaaaatactgcatgaagtttcttggttatgtaagatttggaaaagatcatttagccagatgtgtgttgaagtgctttaaatttgtatttcttcctttgcacttaacagtatatacttagaacattactttgtactttacccagagaagtttcgctttatcatctttatatatttttcagccgtgtacagcttttatatcacattttgaactaacttggaaggatttaactacccttgatctgtgcatttgttttagtctttaaacatactaatttttttactaatgcttttagagtttgtaaacgctaatattacaagtcagttaatggtttttactgaggagtgcaacggtggtgtcgtattttaggagc

SEQ ID NO: 117786 - DNA, 1227 bp, Homo sapiens
ctcctgacctcaggtaatctgcccgcctcggcctcccaaagtgcaggattacaggtgtgagccactgcgcctggcctattttaaaaactcttaagccactcaaggtacatgccatactgagatgagattgtgacactcaaaaacatagattagagagcataagatttgaaagtggctgaaactctaggaaaaaaatgtagttcttcagcatacttcaaaaaaacccttaaatgaaataattgttacaaaatatgttaggaaatattatatacaccattaaaatgaaaacttgtagtacttttaaaatggaaactatggtaaattctttataaaaccattataaaatttaataaatgaagaaaaatttaaatagtaactgaaacctgttcttgaattgaaaataagttggatgcttggtttgaaagtcctgaccgcaggaatcaatatttttgtgtgatttatgacaaaaatcaagcagctaccttccaaatggtgctgctttgaaattactgacagtcaactatgtctgccatctatcagtgacataggttaagacatttttactaaattggtattgttgattgctacctaaaacatatttggtatattttcacatgaataagctaataaatgatcaaggtgattggccttgatagaacatttggaaaatctgagcatttcttgcaattcagaagaggaaaatataagaaactgtagttttctagctgttgcttgtaagtttcaatgtgaagttaaaataatgtcattatgaaggtatttttttccctgagtatctctagttttatggttaaaccataaataatctttcatagttttatgggtaaaccatctcaaattagttgttttttttttttttaattctgactacaaagactgagaagagaaaaattatttttttatttgttttgttttttgagacgatgtttgctctgtggcccaggctggagtgcagtgccccaatctcggctcagtgcagcctccatctcccaggttcaagtgattctccggccttagcctcccacgtaggtgggactacaggtgcgtgccaccatgcccagctaatttttatatttttagtagagacgaggtttcaccatgttggccaggatggtcttgatctcttgacctcgtgatcaacccacctcggcttcccaaagtgcagggattacaggcgtgagccactgcgccctgccagagaaaaattat

SEQ ID NO: 117787 - DNA, 11591 bp, Homo sapiens
acactagtatatagagattttaaataggtaaattggattttgataataaatgttctcccaaagctactatatttaaaattgttttaacctctagtgcagtttcctatagaaaggcaattttataattacaggaaaaaacaatacagtaaaaggagctaatcttttgtaaatctttagtaagtgtctccatattgtgctgcctttgctaataggcagtggggcccatgtgaatgagcctttaaaagtggcttgtacatcttatgttcagcattgacatgatagaggaactgttttcattaatgctttttcaacaatgttgccacatctggtttctcccaactttgttctaataaaaccatttttaagaatttggtttatttgtggtttaatccaaaatctaacttaagttgcttttcactaattttaccctaatatccttgatggagctgcattttacgttgaaactgagtatcttaaaactactaaggtggttatggaattacacgttgtcatgggatttacattgtttgtcttgactcttttctgagtttttctgacattcattttctgtttgtcttaaggttatcctttacctttgcttctcttaactttttccttttgttgatccactgttttcctatgagctaccaaaaaatgtaattcagagctctgtagtctaacagtcacatttccttaaaatatggccgttttaaaaattttaaacataattgtaataccattatataatttctcttagggaaaaaataattcaaaagactgacttttcagtaatgcaaagctttggctacaacatgaaggtcaaagctgcaattaataaccctgatacttcaacatttttattttgaaaaaccctctaaaggatttgatttgtaaaaatatgtgtgaaaatttagagggtccaccaccatttacatagcatctcagccgccattctgtctggcatttataagacatatcaaagaaactttcatctgaagaagtccacttattctcgtctttattaatcttaaagcttaagtagtttacatagtggatcttgtctagaactattaatagtttctttggtgtattttctcaaattcatctttcttggtgtgcaaaaacatcttcctgtaactccagccacctcttatagcatttctgtgtcttttaaaacttgattatatctattttttaaaatccagtctaaatctttcttgcctgcaactttttttatacttcctttgccactgtatttgtccattgtatccttgctttaatctatcattggtgaaattgatcctgtaatagacttgtaactactggatattgtctggttttactgttaaagtttcacatattaagctaccagtgctgagtgtattggtgatcaaaaaatagaaaatttaagcaatgcctcatagaattctgtaccaaacaacttcagatttacctctgtatgtagttgtgattataaaattgtttcactgaagatgttatgtatatctttcaactaatattttatgacaatcgtgatataaaagatttggaaattcttatgtgacagtttctgaggtacaacaataatgatttaagaaagaaaacaatttcatctagaaacacgtcttgggggatcataatcagaacataaatttaccaggtgatttgggctattcttgtgaaaagtttacaggaaactgtgtaaccaagatctcattttcatttttacctgttttgtgctctagatgtgctgtagccctgagcattaaatgagtactgatggatgctgatttggggagttcccttctttaaatcacctgtatttcctgtacctaggttttttcttgggagggctcctattcctgtactgaccagagttagttctccttactttaaaagactagatatgaagtaaacactgcctgatgtaggatggtcagtaagaaggcaattagttgtataacttaaatttgggcagcaatccttaaaactataggaaatgacttatttttcttattcacatctatcttcacctcaaattgattttgctgtataaaggtctcagctattatgtttggtcttatatcttacattaggtacttgaaacctaagcttcatttacttgtgattttacttggttctttctgatagtgataataggtctcattttccaaagcacagtacaactgattcatctttgacttgctgaccttgatttttttgtttttagtcttctggaacttaagcatcatactatagggtgtatttttattcttctaaaagaagaaacccatctatatttttactgaaattttgatgtactcagacatctaacctttcaatttacatgtttttaaactcagtatgaaagtccctttaatagttaagctttagcatgaaatactactttttaaatatctatatgcaggctctgcatacatcaggaatctgtttaagatatgtaataaattccttgtaagtttgagatcttaaatgttttttttttaaatcaacatgatgcataagtttttttttcttaaaaaaacggcatctgcttaaagggatttatgactaaaattgcttatttttctacagagttgtctgctggttctcagcttgaagaagattctgcagtccttattgatcctttttcttggcgttaccatttttgaagcaaagttaacctagctttctagtttgagctttctttttggccgtctttaaaaaaatttttttttttaatctataaaatagacaagagctagttctacaatgtccaagtcattccagcagtcatctctcagtagggactcacagggtcatgggcgtgacctgtctgcggcaggaataggccttcttgctgctgctacccagtctttaagtatgccagcatctcttggaaggatgaaccagggtactgcacgccttgctagtttaatgaatcttggaatgagttcttcattgaatcaacaaggagctcatagtgcactgtcttctgctagtacttcttcccataatttgcagtctatatttaacattggaagtagaggtccactccctttatcttctcaacaccgtggagatgcagaccaggccagtaacattttggccagctttggtctgtctgctagagacttagatgaactgagtcgttatccagaggacaagattactcctgagaatttgccccaaatccttctacagcttaaaaggaggagaactgaagaaggccctaccttgagttatggtagagatggcagatctgctacacgggagccaccatacagagtacctagggatgattgggaagaaaaaaggcactttagaagagatagttttgatgatcgtggtcctagtctcaacccagtgcttgattatgaccatggaagtcgttctcaagaatctggttattatgacagaatggattatgaagatgacagattaagagatggagaaaggtgtagggatgattctttttttggtgagacctcgcataactatcataaatttgacagtgagtatgagagaatgggacgtggtcctggccccttacaagagagatctctctttgagaaaaagagaggcgctcctccaagtagcaatattgaagacttccatggactcttaccgaagggttatccccatctgtgctctatatgtgatttgccagttcattctaataaggtgagttaactcaacagatgcttctaatttcttttacattgtagtgcctatttacctatatctttgactctaattctgtagtctgatgacattgagttgatcaagcatttttaaacttttgagaacacttactttatttggaaggtaattgtttttgagcattttaaaccagggctttacattaatatattctgcctagattacttctggccacaaagctatcatccactgagattatcttgttggtttttggcatcaatatgttcttcttaatcatatatttaagcaggttttttttgtctgctttgttgaattgttttaagtattttttttgcagtcaatgtgctctgccattcaggatgctagatttcagctctccatctgtcttgattgctgatttgtatgtagtaaagatgtattcttgaacaattctctttttttccttatctgtggctacagggaaagagttaatgtagagccctggtgtttgtttcagtatgtttcatattttagattagttcattcttccttttttaatttccctttaacacaaactctcatactatgactgaaatttttcatcattttttttctccttttccacaactttcttaaacatacttcaaaactcactttttattatcccatgttacatctgtccctttagagacttggacaaatcaactactacagtatcctgctctgtgttcctcataaacaaattctttttctgagttaggcttagacttctgaaatagtcatttgaaaagaaaatctaattctcctttgctttaattatcacatctggcaaaatgggaactttttcaaaatgcccttttaaatatgttgtcctttctctttcaactttttcagtgttactcattctgactttttttcccccaatatatggtgcagttgacttaaagtcattgttatagcaccccactagcttgatctataatctgtgaccgtccattttttcctgatgtgctctacttaactggaacaagttgctgccatgaaattgatttgatggttactgttacagggtttttctttacagtaacatctggaagggtcattttcttttcatagctaatcctttgataagcattttttagtaaatgagtatggatttttttttagtagactaaatcataccattgtttttaatattctgttaaagagtattaccagtcactccctttccttgtgtttggatctcagtatttttgtcttttaatctttaatctgtaccaaagtaaattaacataaatgctaaatttaggtttatttaaacatttaagaagatgtattttcattaagaaatacaaccccagactcacaaaagccagcaaattttaattggtatatgttttgggtgttaccttttcctaaatttgttggctctactaaatatatcatggaattcattttagtttctgatcagcactaaactttaaattttaggtcccgtgtgaattcatagaatgaaaaggtccattaaacactggtgactccaattttttctgcgttatttcttgcctgtttataaggaaataatagcagaaatgtcagtatgaccaatattctcagaaagggtctctaaattctgaggaaaatagatagttacaagtgtctcaaatgagagtgatgtgaagggacttaaaaaatcttcgctactggagtcattaagctgttgggacatcatgaacacaatggaaccatgagaggacttcgagaaaagtttctgtttttatgtatgattatgcttttttccttcaaattttgctactttctagttcctgaagaaggctaataacttaaatggatctaaattaacaaaagagcagtttttacatattttgatgaaactatggattcaagagtaagatacactaccctagtgcaagaggtacttttagcctgtaaaaatgcttaggtcctagctagttttggtattctgtcaaaatactgagtacatttgagaactattttagaggccttttgtttaattctgtggtttaaatgtgtaaattggaccaactttaagaagtttaaacacatggattatctgaatttctagttttctagttgctttactatgttttttacgtatatgcattatattgaaaaaatctttactcactttagcagtggaccctctataaccgctatagaaatgaccttagagaaaatttctgtgatggaagtagataatgaaaaatttttaaacatttaatcctgctctctggtattgctgcataacttggaaaatctgttctttttacttagtggtattgttaaatagtctacatgatcaaaaattcttactgtgaagtaagaaacttaagttgaaaataatttgtcatggagtgtcattatttttaggtgacttaaagtgatggtggtgtttttatttctttataggtcattttaggtcatcaaattgcttttcttttcttttctttttttctttttttttttgagacggagtttcacttttgttgcccaggctgtaatgagtgcaatggtgcgatctcggctcaccgcaacctccgcctcccaggttcaagcaattctcctgcttcagccttccgagtagctgggattacaggcatgcgccaccacgcccagctaattttatatttttagagccagggtttctccatgttggtcaggctggtcttgaactcctgacctcaggtgattcactgccttggcctcccaaagtcctgggattacaggtgtgagccatcgcacccagtcatcagattgcttttctatgcaatctcaagctttctcagcttcctttcacttaaagaaaattacccactacagcactttggctgtcttgtcacttgagtttatattaagttatacttttttctgccattctgtaagtgcttcccaaattcttttttttctctctataaggtatctcagatacatcaaggtgaatgtagttttcctacagaaatgtctgaatttaaaaagtgcacgaatcctttattaatctgattttacaggagttacctcagtgtagagtccagggatatatatttttataaaactctttcacttagtccccaccgtaaaccaaccagtaatagatcagtagtacagattagtcattggatgagtttgggaggtatgtgattgattttttgatcttggccttccttttttcactttgaaagaccagacacacttttcccctaagtttgaacctttaaacaacgtggaggattggatataatttctgttcagctatgtaccctttctagctcctatgaaatagaagcatgcgtagtaggataacatttatttctctcccacaacttaagaatattttaagtaaaatctgaatatttttagttcagagaattgtaagtcgttaattggtatttgtttaattaatcctttttttttttttttttttttttttttttttttttgagaaggtttctcgctctgtgtcccaggctggagtacagtggcgtgatcttggctcactgcatcctctgcctttcgggttcaagcaattctcctgcctcagcatcccaggtagctgggattacaggcatacatcaccatgcccagctaatttttttgtatttttagtagagacgggtttcaccatgttagccaggctggtctctaactcctggcctcaggtgatccgcctgccccggcctcccaaagtgctgggattacaagtatgagccaccacgcccagccaaggcttctaaattttgtgaacttacctgtggctcctctgacttagagccatttttattttattttattttgttttatgtttttgagaaagggtcttttgctttgtagcccacgctgaagtgcgcttaggtgttcgcagctcattgcactctctaccacccaggctcaagtgacgcatgtaccaccaccacatctggcgtttttttcttgatagagatcgggtttcactgtgttgcccaggctggtctcaaactcctgggctcaagtaatctgcctgctttggcctcccagagtgctgggatcgtatgcgtgagccactgcacccggcccttacaagccattttaaaactggtccccaagaaggcagtggtccattactttccagttgaaactttagatatcccaaatagctgatgattagagagccagctggagagatcttgagttccttagctattagccattattttaaaaagataatctagctttgagagacctggaaatagtagtttatagcttccaacattttaaggaaggtaccattctatttggatgagttccattttagtttacaggattttatttttatttatttatttatttttgagacagtttcactcttgcccagactggagtgcaatggtgtgatcttggctcactgcaacctctgcctcccaggttcaagctattctcctgccttagcctcccaagtagctggaattacaggcacctgccaccatgcctggctaatttttgtatttttaataaagacagcgtttcaccatgttggccaggctggtcttgaactcctgacctcagttgatgctcccaccttggccttccaaagtgctgggactgcaggcctgagccaccgcacctggcctttcacaggattttagataattttactagagcataggaatgtacctaaactgttgtcaggtaaatataaaccagttttttttttttttttttttaggagctcatttataaaataccaatccgcagctttttgaaagcacgtatcttgtaatttggtaccttggtaccttactctaatttagttcagctctcagtgagacatccccctttaaaaacacatcgcctgaccatgttttatattccaaatataattgtattgggtagtgtgggtgttacagaaattacctcaatttgtgggagtttgtgaaacatcaataatagttgtaaagcaggaattgtaaaacaagactgctttataatcagtgtaataatagttctttttttttttttttttttagcacattccatgtgcctggcaagggtctgataagcagtttacctttattgactcatttgcttttcacaacaaccctatgagactcttgtcccagtgaatttaaataacacggaccaaagattcacatctttgtaatttgggagtgaacctaggcagtctaatagcagagcccactttttgtaacttctctttcttacattgcctaaaaagttaactcatttatatctgcatttttttcctaaagaaatttatttgaataaaataagagttacttcaatttaaagtaaaccataaaagagtaaatagtgaaagaatgtcatgtttcccaccctaaatttggaaagaggcactccttaaatttgcttattttggggaaatacaaagggagcataatattttgataaatgggattcgttttctagaaaagccattcctgttgaatcatgttagcattttatggtaatgctaatcatggtgtatttttcattcactgtgtatttagtaggtagtaaacctggaacatcctcaaaagctggatgtgattaaagttttagtttttgtttttgtttttgttttgttttgttttgttttgagacggagtctttgtcatccaggctggagtgcagtggcgcagtctcagctcactggaatctccgccttttgggttcaagagattctgctgcctcagccttccaagtagctgggactacaggcgtgtgccaccacgcccggctaaattttgtattttttgtagagatggggtttcgccatgttggctaggctggtttcaaactcctggtctcaaatgatccatccatctcagcctcccaaagtgttgggattataggcatgagccaccatgctcggcctaaaagattctattttaactaattgttcacatttatagtatatagtttctagaaaagtagatataaacatggatgttttattcagagtgctataaagtagcatacaatgaatacttcagtttggtccacagtaaaaattaataagccttgctgatctcaaggttagttactactcttgatctttattaactctatatcttttccctgtcaaatatcttaagtatgttgacaagttaatccagtttttccaagaatgtgcatagcgtatttgagggcaggatcaagcctcaaggattcagagaaatggttttaaattaaatcaatgtgatttagtgaatgggcaggtgtttgtacagcctatgatactgcatagacattaatatcctagagtttgaatggttcagatgaaaatatttcagctttatttttgttaattctactaatttactttgctgcaggagtggagtcaacatatcaatggagcaagtcacagtcgtcgatgccagcttcttcttgaaatgtaggagtttgaaatacctttaaaacatccttatcgtgaatcagaatcagccattattggtttttgggagttcatcatttacttgtaatatccacaatgttaatatcacatagtggtactgtatggacaatactatttacaagtaaaatgtttagatctggaaatttcatattgaatattagatgcagtaataatattttgttatttaacatttctaggatacatatatattggtcattatacaaattggtgatttttactagacatagtgaaagatagtatttgatatgtagagtggattaaacagtagcatttttaataatacatgctctaaaaatgtaaaagatacggaaaagagggtaggttattaaaagattctaattcattgtccagcaaaatccttggtgatgaattttttttttttttttgcttttgagatctttggttttgagttcaggctgctaccatgaaatggaattcctaaagaaactccctgcttaagcagcacacagtgcccattgttcactggagttggaattttcacatatgcctaactctgttggggctattctttctttctaatgtcacaactcaactgtgctcttggtattaatattggagaaggaaaatctgtgctctgttcttgtttctatgtaacccacatttctaattctttgtgcggcacttcctccttacaatttaacaaatagaggaaaaacttaatttcaacattatctgcatttgcaagcaatacaaaacaagtttattctcgtggattattttgaagttctgaaatttttcttttgaaatatctattggaaatgctttaaaactatgtttctaacacttagactctcagataactttactaataaatgatctctattttagaggccaaacaaggctgttttgtgaaaaggacagttttattttaaagttaattttctggtctttttaaagctacccagaatggaatcctgacaatgatacaggacacacaatgtaagttaaattttttaagctaccatttgtaaaggagatcaatgtaaggaattcaggtttcactttcaacatttcataaacaaagtattttcagaatttctttactgaaaatgagactttgataaaattcactttggttaacaatttttagaatatatattatgtagtaatttgtattcttttattgttaatgtagactttgacctagttacttcacagatactctgaaagattgaagtggttgtggtcatatattggggtgctttaacatttaatcttaattctttccaatggacctctttattatgatttatattttatgtcttcactttactaggggtgatccattcatgttgcagcagtctacaaatccagcaccaggaattctgggacctccacctccctcatttcatcttgggggaccagcagttggaccaagaggaaatctgggtaattatataaaattcatgttacttttccctacagagccgttact

SEQ ID NO: 117788 - DNA, 1550 bp, Homo sapiens
tctcatgcttcagcctctcctgagtaactgggattacaagtatgtgccaccacacccagctaatttttatatttttggtagaggcaggggtttcgcggtgttgcccaggctggtctcaaacacctggcctcaaatgatctgctcagcctcccaaagtgctgggattacaggtttgagtcaccacacccggccccattctgaaaattaaaggcaatgattataggtgaaagaaggctcattcaaatattacacagaaaaaacattgcatgaaaagtgatggtaatcatatatttgtaagagcttttcatttgtgtttggaagatgcacgtttttcagtaaaattgcttctttaagcaagtatagtgattacaagactgaaaactttctcttcccataaaggtgctggaaatggaaacctgcaaggacctagacacatgcagaaaggcagagtggtcagtaatgaagcttttggttttactgtatttatgatttttgggaatatgatttgacctaaatccttactagttgagtatgtatcgtggtccttatgggaacattgctgtaatttgaaaacaatcacgtttttctatggctttgataacagttaaaactttaaattttgtatgcccatagtccagtgaggtcaccttaattcagcatcttggaagctttgctgtccagttacgcgtacaatatttaatttaaaaatcactacagagagtatgttttgacactttgaagtagtttaaccgtttggttatggtcagaaagaacttacccagtgacgtttgatatgtagctttaaaattctctagaatgttatgagttgttttacttacactctcctggttaattatagattataaaaagtcctaatgcgtaattggtttcatattgctttaaagagacttaattgcttggtttttttcccctaatggataggaaactagcagagttgttcacatcatggattttcaacgagggaaaaacttgagataccagctattacagctggtagaaccatttggagtcatttcaaatcatctgattctaaataaaattaatgaggtatgaattgaaatattggtattattcatttattcatgccactaatatatgttctgcaagaattaaatgattttgtattagaaaaataaaactcaaggtaatcttaagtttatcaaatgcagaatgtagtagaggaaaaggccagtagttgatgaatataatagggtactaatggattattagtaactataaattatgatccttaggtagtaattgtcattatactactataaaagttgtaaaaggaaaattctgtggaaagccatttcagatctataccaaaatgatggtttcaagtcattatttttagtccaattggcatagtaaatgataaagtaatgcagtagaaaattaatctgaggtggcctttgtaataaaatagcaaattggcaacactgttttttggggtttttttgtttctttgttttgggagtcggagtctcgctctgtcacccaggctggagtgcagtggcgcgatctca

SEQ ID NO: 117789 - DNA, 1041 bp, Homo sapiens
atgtgagaaagctgattggaaaaaacagagaaataactttttgtataatttcaggcatttattgaaatggcaaccacagaggatgctcaggccgcagtggattattacacaaccacaccagcgttagtatttggcaagccagtgagagttcatttatcccagaagtataaaagaataaaggtaatgtttatttttttcaagctgtatatcagtttaacaaatgattttaatagttattaactgtggttatttcaaattattgctaaggccaggtgtggtggctcacgcctgtaatcccagcaccttgggaggccaaggtcagaaggattatgtgaggcccaggagttccaggcaagcctgggcaacatagcaagacctcgtctctataaaaataaaacaattggtaaagactaggatgtttttaactgttaactaataattattgcacatttgtccttttgttgttgttatttattaaagaaacctgaaggaaagccagatcagaagtttgatcaaaagcaagagcttggacgtgtgatacatctcagcaatttgccgcattctggctattctgatagtgctgttctcaagcttgctgagccttatgggaaaataaagaattacatattgatgaggatgaaaagtcaggtaatatacataaggaagttttagagaagataatttattaaaatccttaagatttttcaatatggagctgggcgtcattcctcaacctgtaatcccagcagtttgggaggccaaggcaggcaaatcacctgaggtcaggagttcgagaccagcctggccagcatggtgaaatcgtatctctattaaaaatacaaaaattatccaggcgtgatgtgcctgtaatcccagctacttgggaggctgaggcaggagaattgcttaactggcagggggcggaggttgcagtgagctgagattgcaccactgcactccagcctgggcagcagagcgagactcccaactcaaaaaaaaaaatttgcttttttttttttttttttttttttttttaaagta

SEQ ID NO: 117790 - DNA, 1149 bp, Homo sapiens
ataagttattgaaagagaacaacctttttttctggtctttaatggcagaagtttttaaacgagtcttccctaaaggacaccttcattgctcttatctgtttaagtttttcatagcgttctgctaccagaatgttttattttccacttctctgttggtatggtcatgatgaatgtctgtaggcagcttaggttctcaaataaggttacgggaattgaataagctgagttgattatagggattgtctccaattattaattcactggataattgtgtattctgcaaatgtgttaacttctgcaaaacttttgtcttttagattccaaacagaggcattgatttactgaaaaaagataaatcccggtaatttcattttgtttttcatatgtgtgagtatattcaactttactttttcagacaacaaattaattgtggtgtgtccttttgatttcagaaaaagatcttactctccagatggcaaagaatctccaagtgataagaaatccaaaactgatggttcccagaagactgagagttcaaccgaaggtaaagaacaagaagagaagtccggtgaagatggtgagaaagacacaaaggatgaccagacagagcaggaacctaatatgcttcttgaatctgaagatgagctacttgtagatgaagaagaagcagcagcactgctagaaagtggcagttcagtgggagacgagaccgatcttgctaatttaggtgatgtggcttctgatgggaaaaaggaaccatcagataaagctgtgaaaaaagatggaagtgcttcagcagcagcaaagaaaaagcttaaaaaggtaaagaaagatacattgatttgttttaatagaacattagatcagatcagtatttcaagttatttacctaagcaggatcagatagaattatatgatttaaatcagaaaataaatcagatatgaaccagaatataaacatttaaatctaaactctgcaataaataattaaataagacattttattatagttggcaaaaaacatcagctcaaagaggaaacttttcagtaaaaatgagggagaaagactcaaaatatatgtgcttctgtattgtagtggtgtagtggtagcatataggtaggcagccttatagtgtagctttgaaaaaa

SEQ ID NO: 117791 - DNA, 1932 bp, Homo sapiens
gcactttgggaggccgaggtgggtggatcacgaggtcaggagatcgagaccatcctggctaacacagtgaaaccccgtctctactaaaattacaaaaaaaattagccgggcgtggtggcgtgcgcctgtagtcccagctactcgggaggctgaggcaggagaatggcgtgaaccagggaggcggaggttgcagtgagccgagatcgcgccactgcaccccagcctggtcgacagagcaagactccgtctcaaaaaaaaaaaggcaaagacgctatccgtttcccttcaagtaaagcagacagaagggatgctgcaggataattgttgcagagtaaatttgtctttcttaacagcgtcgttttccagggagtatggaaggttttgtcactctagatgaggttggtgatgaggaagattcggaacttcagaaacttcgtaaatcgggcatggcatttaaatctggtgacaaaaatgatgatggtttggttgaaattaaggtggacaagatcgaggaacttgatcaagaaaacgaagcagcgttggaaaatggaattaaaaatgaggaaaacacagaaccaggtgctgaatcttctgagaacgctgatgatcccaacaaagatacaagtgaaaacgcagatggtcaaagtgatgagaacaaggacgactatacaatcccagatgagtatagaattggaccatatcagcccaatgttcctgttggtgagatttaagtctttgttcttcaccttcctcactctcctcaaaacaaactcttaggttttaaaataagattttaaagttggtcttacataagctgtgatagcattttaaatttgctttgtttctatggggaacaatttataaatcttaattgatatattttcctctcatgcatgtctctgattttgtattattttctgttgttattccacaatgtgttcccttttttcgtaaaatttcttgcaagttacacgcttttgttttgcttttctgtgttgtttttctgtattatatttctttttttaagaatacagttaggtgagacctcaaacatcaattaggtaaaagcaaaatatggttcggtttttgttttttatcttaggctgtattggacttctcaaaaacatgttgtttcatttaaattatgttgacaggtgaaattgtgaatactaaataaaatcttcagtttaatttgtaagaatgtatgtttgtatttctaggtatagactatgtgatacctaaaacagggttttactgtaagctgtgttcactcttttatacaaatgaagaagttgcaaagaatactcattgcagcagccttcctcattatcagaaattaaaggtaaggttgaatgtaaaacagttcttttgtgaaaacttaacaagttatggaaataagtggggtatataagtaaaatgtgtatagtgttctctctagactcagtgcagtgctttctcctgaagataactttttatttacttttttttttttttttaaagacagtttctctcttgttgcccaggttggattgcaatggtgcaatcttggctcactgcaacctctacctcctgggttcaagcaattttcctgcctcagcctcccaagtagctgagattacaggcatgcaccaccacacccagctaatttttgtatttttagtagaaatggggtttcaccatgttggctagcctggctggtcttgaactcctgacctcaggtgatccacccacctcagcctcccaaagtgctgggattacaggcatgagccaccgcgcctggccttttctttctttattgatgggttatcaaaacatctgttgaacctcttgtcatagtttacccttgctacataacaatttagtgttttctaaccatattataaattctgtggtagaattaaacttattcaagtattctcagattgttgttgg

SEQ ID NO: 117792 - DNA, 2430 bp, Homo sapiens
gcctggccaacacggtgaaaaccccgtctctaccaaaagtacaaaaaaattaactgggcttggtggcgggtgcctgtaatcccagctgcttgggaggctgaggcaggagaatcacttgaacctgggaggtggaggttgcagttagccgagatcacgacactgcactccagcctgggcaacagagcaaaactctccctcaaaaaaaaaagaataaaagtgcatgtcatttaaacccatagttcttgaatagtgtcagttcagtgtgactgtggtctttgttttctcatctctaaaaattagggttaattataacatttgaaatacccattttataccttttaccattttttccccgtgccttattgtaatgtcctgaaagtttttgtgtgctaatgaggattaactaattgttgaaaatattgacaaaattatagtttaagtccctaaacttggatataggatatttgattttggaattaatccattttgctgcatttctcttaggtgacttaatggctgtaattctctttctttatagaaatttctgaataaattggcagaagaacgcagacagaagaaggaaacttaagatgtgcaaggagatttaatgatttcaaagaaaataatggttctttgtttttaatgttaaccttttttaaatacaatactgatagttagaagaaaactattgtactcttttgttttagtggagaaataatagatgtctgttcatgtgttaagtgttatagcaaaaaaaatacacatatggttaagttaatgaatagtttttgttttatcagaatggcaacagacagaagtactttgtagagattgacttcctaagctacttaagacaacttgcaccactaagaaaaaaatgtagaaccatttggaaaaatgaaatttagtagttccaagtttcaaagaaatgtcaacattttattccattcaataaagaacaaaaccaatagtgtttttattactttcatctgaaacattccatgttttaatctgagccttgcagactttcatttggagtttgaacccgttttggttgcatttcatttttggagaacttaattaacgtgagattggcaattgaaatgcaggtgcagttttctgttaatgtcatgctgttgtttaggtaataagaaatattaagtaattggctttagattttgtaatttttttccctgagttcctgctagatttcgtattctagtagtcaatgtattttcagtgaaatgcaaaaatattcccgttatctttgaccagtattaatttttgagatcttactgcttgtcacttgaatcccgtgattgtcatacatctctggtataagcaacatttgatttttgaagtgtgtagaccatctcttcatattttcaagatgtaattttacatttctgcatttttaaaacagtttggccataatcctagatgcacgcttctaattcatgtacctgcacatgtgacctttgtgaacagaaatttgcatgtataatttgtgtttacttgtaactttctggttatatactgcttatatctgtggattcaagttactgaagtgaataccaataaaaagaaaaccctaggccatgttaattggttatacatgtttggaatgttaaccaacgtatttgtcagttgtggtttttattcgctcttaaactttgtgcatgctttaacaatttattacttttaaatctagagtgaattctaaagactgccgctaaagatctgagttttaaaaatgttgttgctggtggatttcttgttcctgttacataactaaaagtgaggccatttgtggtttttaaaaaccttatgaattaaaaatgctacaggtgaacaaacagaagcttatgtttagagatattgatgacttaacagtacaattggaagtaatacggatgagcaagaattagttctgcagcttttcaaaataattacgtagagactcttggtatattggattatctgttgtaaacaatttttttttcttccctgacacagggtctcactctgtcacccagactggagtgcagtggcacagttctctgcaacctcagcctttgggctcaaatgaccctcctacctcagtctcctgagtagctgggactacaggctcatgccactatacctggctagtttttggtttttttgtatagatggggctttgccatgttgcccaggttgatcttgaattcctgggcccaagtgatctgctcgcttcagcctcccaaagtgctgggactgtaggcatgagccaccatccctggccaagaaacaaagttttaatttcaaaaaaatctacaaaaacaggataggcattgtctttcaaatgttcagaccccagtttattaaaggatacttcaaatagttggctaaattttatgatctctcccgttgaaaagtaggtgatgattt

SEQ ID NO: 117793 - DNA, 2567 bp, Homo sapiens
tcgttggctgccgtccccgctgctgtgcattgggtgaggggtcctctcgggcagagtggcgacaggggtgcggaggtcgagggacagcaagtcggcgacggcagaggggcctaaagggttccctgggtggttggccaccgagtccattgcggcctccgttgttcattgcctctttccaccaagtctgagggatgagcttgggccgacttcgtctctgtcttctccgagacatggccgtcgcttttttttcattgtcattattaatgatttggatctcgcagctctctatccgggtcctcagtggcgcgagggttgccgggatagcactttctcctgttcctcattctcccggtcctttatccctccgccgggtaccctttcccctgcccccctcccaccgcctcggcaacaaagcttattgtttctacccactttacgcctgcgcgtcgccacgcgcagcccctacttgctgcgcgtgcgcgcctcagccgaggctggggtttggggagagaggggcggagggactggcgggctcttggcgtcttgggggaacgctgcaaccgtcgacgggcctgatcagaagatcgtctttctcccgtttcttcgccatcgctaccccttatttttggttgtattgcagctcatgccctggaaaaaagaacctttggggtactgggaacccttaccctaggagggcgttgagttagatgaactttaaggtcctcttaccttttaataattttctgtgcttactctcctccttccccaccatcgccaccagaaataaataaggcttgtggtgaacttaggtcttcaaaacatttgttgcagcagccagcagtgatattttttagggactcctaaaaggggtcttacctgcttccttttgtttcttttttccctgatttggcacccgtatcaactcataaaaaccccaaactctagaaagaatttggcttccaatttgccttggaaggtgtagcagctgacagcctttgacgtttatttcaacggaaagtagatgttcatgttgggtgtgctggctaatgttgaaacgtggtggcattgttttttcacagatttcattagcacagttagatcaggtgttggtttatattttcattaagtcgcttttgaaatttcttctggcgtaggttgtgtttgcaataagtaaaagttctctacaataatttttaatgagactccactatttgcttttgtgattctgtttccagttagtgaaagacaggatatttggggaaaattagtctgtttatactacttgtcagttgtgaacttgaataaaactttttcacacacacacaaaatcacaggataggtaacttgacaagaactatagaacccacttgtgtttctttaagggatggaggttagggaatggagatttcctctaatgattcaaggctgtgcacgttgctccttaggaactcaaattgaggtaggtaatttcaccctcttttggtcagaatgagtttatagcaggcttttccttaaataagcactctgcactttattcaggtttatcactttatgactctagagtgtgatgctccagttttagtgaaaaacttgaacacttagcacagcaatttggttgatactgtgggagattaaagaatgtggaaggcaagacctctgcccccttgtaatctaataaccttttgtgcttttaaaacattttcttgtaatttacatcctattgtcattcattatcatgaaacgtgaaatgggcagagcaagtttttttttttttttttttttgagatggagtctcactctgtcgccaggctggagtgctggagtgcagtggcgcaattggctcactgcaacctccgcctccccgggttcaagcgattctcctgcctccgcctccctagtagctgggactacaggcgcttgccaccacgccggctaattttttgtatttttagtagagacagggtttcaccgtgttagccaggatggtctcgatctcctgactttgtgatccgcccccgtcggcctcccaacagagcaagttttatcttgcccatttgggaattaaagaaatagaagcctgaaagattatttttatttagcaaatatttatataacaataatgccaggcattgttctcattgcctttacaaatattaactaatttgatccacaacatagctagaaggtaggccctactgtaaaatgaagataacaaatgagacgtgaagtaactttcccaatgtcacagagctatgatagtcggaattcaaatccagatagtccagagattctatgctcttaaccattatgtggtgctgtgtgatttagtgacaggtctagggtactttaaggtggctatgtagcatagctgggatttgaacctacgtcttctgactgtggtctaagattaaagttgtccaagtcattgcctttgtgatctagaccacctgttgcacaggtgcatgaatagtttgcatttgatataggctaaggttcagttccaaaaaactcccttttttcttaattttttcattgtttagagtggtgctgtccaatgatgtaggtac

SEQ ID NO: 117794 - DNA, 1033 bp, Homo sapiens
ggatcacagtggttcaaaacagagtccaagggaatgagaaaagatggtgcctatggaggtagattaatgaaagaaacagaagagaactatgcttgaatttttttttttttttttttgaaacggagtcttgctctgttgcccaggcctgagtgcagtggcatgatctcatttcactgcaagctccacctcccgggttcatgccattctcttgcctcagcctcctgagtagctgggactacagacgcttgccaccatgcctggctaattttttgtatttttaggagagatggggtttcaccgtgttagccaggatggtctcaatctcctgaccttgtgatccgcccacctcggcctcccaaagtgctgggattacaggcgtgagccaccgcaccaggcctatatttgaattttaatgagaattcttaaaagatgaaactagtggagaaagattgtaaaacctaaaagatttctgtattttaaaattccatagacaatataaaaggacactgctggaaaccaatatgtctaagaggcatttcaggaggggaaaaacagctgaagacacaataaagccctaagttgataaattgaaagggtttgctgacttccaggcagtagtactgggaaaaaattgctcttacctatccaaaatctggtgaaatatatgaatttgttaaaacatcttaagctgtcgtctagaacaggatttttaaatttttatttatttttttgagacggagatttgctctgtcaccaggccggagtgcagtggcgcaatcttggctcactgcaacctccgcctcccaggttccagtgattctcctgcctcagcctccccagtagctgggactacaagcatgtgccaccacgcccagctaatgtttgtatttttagagacggggtttcaccatgttggccaggatggtctcaatctcttgacctcatgatccacccccttggcctcccaaagtgttgggattacaggcgtgagccaccgcacctggcctatttttattttttgagatgcagtctc

SEQ ID NO: 117795 - DNA, 1887 bp, Homo sapiens
agatgttttaggctgtcctctcctgtttcttaaaacattaaaatcatttggaaaaaacaaacatgaagctttccaattattcaacttaccgtgtatttttaatgtatcatctgcctctaacacctattcatgatgcctgctaataataaacagatgctcactaagaactgaaagaatcagctgggcctggtggctcatgcatataatcccagcactttgagaggcttgggtgggaggatcacttgagcccagaaatttgagaccagcttgggtaacacagaccttgtttctacaaaaaataaaaaaaattcagccgggtggtgtggtggtgcacacctgtagtcccagttacttgggaggctgaggcaagagatcgaggctgtggtgagccatgatcacaccattgcactccagcctggatgacggagtgaaaccttgtctcagaaagaaaaaaccctgaatgagtaagtaaattaactgtgctgttgttcttttaaggttaaaaacgacaaccaacatcagccatgaaagatccaagtcgcagcagtactagcccaagcatcatcaatgaagatgtgattattaacggtcattctcatgaagatgacaatccatttgcagagtacatgtggatggaaaatgaagaagaattcaacagacaagttagttttttgtacaaacatgtttttatagtccattctggccctcaatatgattgtacttgtccctgaaatgtgtttatcttgtcctttatgtataaagtatgtagactgatgtgccaccactcctgtttatttggctgctgattactaccaggcttaactgcttacggaaataacctggggagcttgtttcagggtcccaccctagagatgtctgaatcaggaggatgagggtggagcctgggaaactttttcagagctctcagatggttccattgagcagtcagatgtggaaaccactgccttatgccagtaagattgctggttaccgtgaaagtcaagagaattcaggagtcaggagcagacaggcacagaaaaaagagacaggcatctctttttacttcttccctgccaccctcaatggaaaaaagaatgttctactaataaaagtaaaaacatagaaaaaccctaaacagatagatcttcgccggtcattatggtaagcattttttttccttagcatggaagcagaaaagaaagtatgactttgtgcctttaaatggtttagttcaagatattttaagccattcctagtgatatctaccaagtgtgctataaattatcctttattataaatctagatagaagaggagttatgggaagaagaatttattgaacgctgtttccaagaaatgctggaagaggaagaagagcatgaatggtttattccagctcgagatctcccacaaactatggaccaaatccaagaccagtttaatgaccttgttatcagtgatggctcttctctggaagatcttgtggtaaaaagttatttttcatctttttaaaacctagtgcatcttttgcataagtggaaaagccagctcccatctatttaagaattctacatctctttccccttcagaaattgtgctgcttctggccgggcatgtggctcacgcctgtaatcccagcactttgggaggccgaggcaggcagttgacttgaggtcaggagtttgagaccagcctgaccaacatggagaaaccccatctctactaaaaataaaaaattagccgggcatggtagcacatgcctgtgatcccagctactcgggaggctgaggcaggagaatcgcttgaacccgggagacggaagttgtggtgagctgagattgcaccattgcactccagcctgggcaacaagagtgaaactctattaaata

SEQ ID NO: 117796 - DNA, 1101 bp, Homo sapiens
gggacgccgaggcacgcggatcacgaggtcaagagttcgagaccagcctgaccaacatggtgaaaccccgtctctactaaaagtatacagaaaattagctggttgtggtggtgcgtgcctgtaatcccagctacctgggaggctaaggcaggagaatcgcatgaatctgggaggtggaggttgtggtgaaccaagatggtgtcgttgcactctagcctgggcgacagagtgagactccacctcaaaaaaaaaaaaaaaaaaaaaagcggggtggggggaattgtgataactaaacatcagcactagagtgagaactggctgggtccactgaactaatctgtacaccatgattacctatgaagcattaaatacaaaaatcagttctttagttacatcccaacatgctcagttgtctgggcatgttaattttttaaaagtactacagaggatttattatacagccaacttgcctgagtcggtcatttggaaaccattcttctaaaggatggtgtagagagcactgaagtttacattgtggtatatagcctttgttgcagtaagtgatggtaacccatttgagcagctgtatgatctgaatagtctggaggggggtatgattacttacggctacattagtcaccataaataatccagttgccctgcagagtaacactcttggctgagcataatgtataactttaatctggacccagtataattccatagtacagaagctggtttgttcttctcagtctatttgatattactttgtttcattcttctgttgctcccagaaaattgttcatttaagaacactgtgcctggatgtggtggctcatgcttgtaatcccagcactttgggaggccaaagtgggaagattactttggcccaggagttcgagaccagcctgggcaacaaagggagaccctgtttctacaaaaagtttaaagttagctgggtgtggtggcacaggcctgtggtcccaggtacttgggaggcagaggccagaggatcacttgagcccaggaggccgatgctgcagtgagctgtgattgttccgctgccctccagtctaagcaacagagcgagtccatgtctca

SEQ ID NO: 117797 - DNA, 1065 bp, Homo sapiens
ttgcttaagtgtaaccagaaatccagtaacttcacataagttaaaggaatagcacggaacaaggaattctgttaatcgaactatggtatgtagctttctttaaacactaaataccaaggaaccatgttaaacaagtgttgaaattatgattaaagtaactggggaattgctgattttactttagaatcctcactaaaaatgtggagttgtttttctacaattgccatcttctaattcccacaggaagcatggtatataacaggaaaagaaaactacatggggaaccagaagacctaagcctgaaatcccagccctgcccctaactaacttctgtgtaaactcagataagtcacctttctctgggattcaaatttttgcatcagttaaaaaaaaaggggtgggggggaatgggccaaagtctgagtcttagagacttgtaccaatgttatgctatgtctctaaatctttactctcctaagtagacttgtcagcatctaggaagaacagctagaaattttcctctgtgatattttagactgcaagttgaaaaaaataaaaagaaatgagggcaggttccagggcctgaaatgtaggtatgctgcaaggcttttacattgaatttgaccctacatcacttcaagactaatgcataatattaaacatcatgttgaagaaataattttagtttcgtaatttatacatagcagtttctttggacaggatatattctcccttcccccaagggaaataatgtatctacattttaaaagtgtgaagtttaagaaaaaaaagcagcattccttttctctttttttgagacatggactcgctctgttgcttagactggagggcagcggaacaatcacagctcactgcagcatcggcctcctgggctcaagtgatcctctggcctctgcctcccaagtacctgggaccacaggcctgtgccaccacacccagctaactttaaactttttgtagaaacagggtctccctttgttgcccaggctggtctcgaactcctgggccaaagtaatcttcccactttggcctcccaaagtgctg

SEQ ID NO: 117798 - DNA, 1092 bp, Homo sapiens
ggactggcactcatctgctgactaacttgtagcctcagtaatatgacatacttgcctttaacaaattatctcaaattaactaacagaccttcagaaaatggagattctttttgatggggacataatcaaatttaagtctgagaaatatgcttaacagttggaactcaaattaaatgtactgattttaaagtttagacattaacaagtgatagattagcctcaaaaaaagacaatttggtaaggtttaggtcttttaatttggtgcttgttcacaacttgactggtgcttctttccttgctgtcttcacatcaagccatggggccaattctattttcagtaaatgtttgacagctttttacttagtaacagtctcagcacttttattaagcatgcaagactaacaaaaactttggcaatgcataagtgtaacacagtgacaagagagcttttacaattaagtcttctaatactgccttcacagtgtggaaattgtgctacatccaccaaaagagggccccgtctactcaaatatttccgtacttcaccccaggaacaaactcctttgcatttggattcagattgctcttgacctggaaaataagtacataaaaaagcaagttcattaacacagtttcaggtactaattcaatctagatcctcatgcaaaaacatcttccaaaaaaaaaaagacaaaagaactcagtctgtaagactatactaaaccccaaaaaggaagaaccagatgtaagctatatatcatattaaattacatcaactttttcttttctttttttgtgacggagtcttgctctgtcgcccaggctggagtgcagtggcacaatctaggcttactgcaacctctgccacctgggttcaagcgattctcctgcctcagcctcctgagtagctgggactacaggcgcgtgccaccacacccaactaattttttgtatttttatttatttatttagttttttttttatgagacggagtctcactctgtcacccaggctgcagtgcagtggcgcgatctcagctcactgcaagctccgcctcccgggttcacaccattctcctgtctctcatcctcc

SEQ ID NO: 117799 - DNA, 1853 bp, Homo sapiens
atcgcttgaacccaggtggcagaggttgcagtaagcctagattgtgccactgcactccagcctgggcgacagagcaagactccgtcacaaaaaaagaaaagaaaaagttgatgtaatttaatatgatatatagcttacatctggttcttcctttttggggtttagtatagtcttacagactgagttcttttgtctttttttttttggaagatgtttttgcatgaggatctagattgaattagtacctgaaactgtgttaatgaacttgcttttttatgtacttattttccaggtcaagagcaatctgaatccaaatgcaaaggagtttgttcctggggtgaagtacggaaatatttgagtagacggggccctcttttggtggatgtagcacaatttccacactgtgaaggcagtattagaagacttaattgtaaaagctctcttgtcactgtgttacacttatgcattgccaaagtttttgttagtcttgcatgcttaataaaagtgctgagactgttactaagtaaaaagctgtcaaacatttactgaaaatagaattggccccatggcttgatgtgaagacagcaaggaaagaagcaccagtcaagttgtgaacaagcaccaaattaaaagacctaaaccttaccaaattgtctttttttgaggctaatctatcacttgttaatgtctaaactttaaaatcagtacatttaatttgagttccaactgttaagcatatttctcagacttaaatttgattatgtccccatcaaaaagaatctccattttctgaaggtctgttagttaatttgagataatttgttaaaggcaagtatgtcatattactgaggctacaagttagtcagcagatgagtgccagtccagccttttctggtatgttattgttagaaatattgagttctaatgttacatctgaggaagtatgtaatttgagaattgtaacttctaagggattcactgcatcatagctatgcctgtatggagtctaacatatgaccaataccaacccataatccagctgaacaaagatactgtaacatgatttgagtggtgcttttccttgctttgttaaccatcacgagagtctgcagcacaacttttaacaaagctagaacagttttggcttcttaaacttcatatttgggtaggttaagctgccatacgtgttcagtgtgaatagtgtttaagttgaaaatattgtaaaaaaattatattttttcaaaaatatttaaaaaaataaataatagtagaactgagcagatggttgtgtttattggtgctggaatgtactgtagtggtgttactcacttgagtatgggcccagtgcctcaggacaatcttgctggcaaaatgtgctaagctttcaggctttgttagattctaacaggtatgttgccatgcaagtacctttccagaatatagcagtagaataactccattgcccatccttgcttcttaatcacctcagacttcagtgtcaggggaatcctagatagtcatgtaagaaactttatggctgaccaatatgatggtgaccttactctaatagaacctccattgttttttgttcttcacaagggctttttttgagcttattaggttgaaaaagattaagagagccatatagtcagttctgactcacattcttctggcagtgggtatgggggaggttctttggtgtgggcacctgtaccccagtgtgtggttggttggttggttggtttttggagacggagtcctgctctgttgcccaggctgaagtacagtggcacgatctcagctcactgcaaccttcacctcccaggttcaagtgattctcctgcctcagcctc

SEQ ID NO: 117800 - DNA, 1118 bp, Homo sapiens
ggggctattgggcacgggcaacgggtccacctcgtccagtcccaacattggcgtcctgggaattaccaaggtgtcgcgacgagccagagccaaatcctgccctaattccgtgggccgcaggccccgccccaactcggtccccactttggtttagccccaccctgtctttgagaggcctcgcccccgcatcaagccccagccggtttatgcctcgctcttataacaggccccgcccctggaactaaccccgccccagcctcgtccccaggtctagcttccccgctggctccccggcaggtgggcagccggcgcgtggtgcagtatggtgcggctatcatgctggtcctgggcaccatcggcaagttcacggccctcttctcctcgctccctgaccccatcctggggggcatgttctgcactctctttggtgagtgtctggcgcgggccacgggtcgcggtgcgggtcgccgagtgggactcacctggattacgcgtgtgcggcgcctccagccgttctcttgcgcccttaggcatgattacagctgtggggctgtccaacctgcaatttgtggacatgaactcctctcgcaacctcttcgtgctgggattttccatgttcttcgggctcacgctgcccaattacctggagtccaaccctggcgccatcaatacaggtgcctccagctgtttactgtctccaaaggcggggtgggcccaaaattttgagcacagccccctccctcaaaggctccacacagctacagccacaaatcgtacccaactctgggtgtcaaccagcagctgagagcttgggtcacagctgtcctttactaagacacttcctgtggacagatattgacctttacatgtgcttatttaattttcaaaacagctccatttatctacatttatcatttctccattatcatttcaactttacagatgaggaagatgaggctcagtgatttgtcccaggtgaacaactagcaactggcagaattgggacttgaacccagagataggaaagacagagataggtttgagacagggctttgtactgttcctttgccatagctgcacaagaggaagtccctcaactctgctctccagattgggcc

SEQ ID NO: 117801 - DNA, 1988 bp, Homo sapiens
ggggaaaaggggaggcccagagacctggaggtctgagcaactgtcccgggtcaacaccagggtgcagccatggcagcatcttctctccctctctgtctctgtacctggtccgtgtgtgtatccctgactctacccccagaggagatctacggtaactggagtctgcccctgaacacctctcatatttggcacccacggatacgggaggtgggtttgcatgtaagcatagaagaggccgggtcctgaggaggggctatatgggagtgagggtggccgctgagtttggggatttgaggaggtggtccaggagctttgttcctgctagcagcagccaggtcatgacctttacatggtgacttacggctgatgtttgcccttccaggtccagggtgcaatcatggtgtccagcgtggtggaggtggtgattggcctgctggggctgcctggggccctgctcaactacattgggcctctcacagtcacccccactgtctccctcattggcctttctgtcttccaagctgctggcgaccgagctggctcccactggggcatctcagcttggtgagcaggcaccaggcctgatccctgcccagccccagcaccctaccctcttcatgtccttggtccttcttcccggctcctggccccagcctggcctcccatccacttcctgattgtgcctctgcccccagctccattctcctgatcatcctcttctcccagtacctgcgcaacctcaccttcctgctgcctgtctaccgctggggcaagggcctcactctcctccgcatccagatcttcaaaatgtttcctgtgaggacctggcaggcggctggggctgggactatggccagggcttgggctgaggtgggagcaggttagcctggacagagacctccagtgccttcagtgccccctcacccccctccttcagatcatgctggccatcatgaccgtgtggctgctctgctatgtcctgaccttgacagacgtgctgcccacagacccaaaagcctatggcttccaggcacgaaccgatgcccgtggtgacatcatggctattgcaccctggatccgcatcccctacccctgtgagcaacaccccttgggcccctctgcccccaactgagaccacctatgagacagactcctggtgaccccaatccagcaggtgacacacctagcattagccgcacatttatagtgcgcccagcagagtggtgttttacttagacaaagcttcagtcccacttcctggctctgagtgactcaaataagctcccacaactgtatagctcccatcccagcctgaggtctcctgatctgctcttgctccttccagcactgccctgtctattcctaaccatcacagtctcctcactgtagccaccatcctgtctccctccgagcacaggtcagtggggcctgcccacggtgactgcggctgctgtcctgggaatgttcagcgccactctggcaggcatcattgagtccatcggagattactacgcctgtgcccgcctggctggtgcaccaccccctccagtacatgctatcaacaggtagcctacctgccctcctcagtatctgatctcctcaggcgccacccaggaagcacacacaggaacggggtggaggcccagggggtaggcttaggcaagtcgggaacacgctccagacctcattctccttgtttgtgcgatgggggtgccctctcatcacccctctgtctttgctgggagtagctgagaagatggtggagtccaaagggaaccaccgtcattgacagccctccatgtgcccggctctgactgtgcattcttatgcaatctttgaagcattttgtgagacgggcaccggtatttatcccaggaggaaattgaaggccagaattacccacaggagtaagtgccagggcactaggactagctctggagcctgagcattctggcctgtagtagggagtgctacagctgatagctgca

SEQ ID NO: 117802 - DNA, 1366 bp, Homo sapiens
gggcctggccatgggcacagcgacccagaagtaggtgggctctagagtgctggggctggggcagcccagaggggaacagaatggggacctcaggcccagccctcaccagctgaggagcctgagttcttagggcccctccccatgtccccctctgccatctcaggccctagggccaggctgggctgggcctgccaggaggggagacaggctgggcataggactgccttcctgggctaggtgatgggcagtcacacagggcttggtgcatagaaaggccccacgctccatctaatgctcctgctatctttaaattctttatacttttggaataaaggcctcacattcttactttgcactgggtcccagaaattatgtggctgggaggggaaagggatctgtgccctgacacagagtgcagacccggctgggccagcctaggcagctctgcctgcagaggcccatctgctgcctgcctcagggaccctgaggggtgcagggtggtgagggcaaggcagctcagaccaacctgaattttaggattggtttctgcaaacttgctatctgcatggcttgggtcaaatcacatctactgaatctgtttccttcgctgttaaaggggttaataccgcccagcacaggggttacttgggacagtgcagatccatgtttcttggcacaaggccaaggccattcctcaataacgagaatgactatgatgatgatgataatgatgaactagttattaatcagtggggaagggcctcatacagggggttacataataagtgcctgtttccactccctctttctccgctcacctggggcttggtaaacttctggtcctcaccccctcgactctggccctctcttgggaaacaagaacaggtccagcgcccaggcgcagatgtgggcagggaagggcacatgtggcagaggcttgggtggcttttactgtcctagtgagagttaatacattacctctgcccgggcccccctttcgcaatccagagctgggcatctggttacagatttacttcaaacaatgcctgatatgtggagtaaagtcctcctccttggcctttgtcaagtcatcccctcttctcctcaggaactgctcaaacctgtgccccaaagatgagggcccaggaggacctcgagggccggacacaggtgctgggggctgggggtgggggctagggggggcagggggggtggggggctggagggcctgtgcaggccttcttcctggaggccagagataaacgttctgatgaacttgataagagtgactgtcccaaattgaatgtggcaactgggggatgggtggaggtgggggtgaaggagcctgcagctttgggactggctg

SEQ ID NO: 117803 - DNA, 1045 bp, Homo sapiens
ggccctggagcaagagcactgccccctcctgtgcacttggcctcaaaccgacccaggacaggctacactgggctaatctgacccctgaagtgggtcctctgcctgggtgtgtccccatgatcacctagggggcactcggtgatggcttctgaaaaaatgttgctgctccatcccatccagccctgcctgtgcaacttgtgcaaattgaggtcccttcccagattgtttctccaccttaaaaccacacacagcattgtcttttctcttcctcccattgtgaagctcccgtttgggggaggtgtcagcaggtgcaaatgcaatttgcaggtataacattattgtcatgtgatggaaactgacttcccaaattccttgtggttctggaacccactgtctttgaagtttctggtcagggcttccggccctgtagtcaagttgggaagttaaatttaccaggacactgggagtggggtggaatattactgggtaaccagggctgtttatataggaagggattaaatacccaaaggaagcggtggtgcctaccagacaacaaagacccagctcctcccctaggctacaagcccccaccttgtggacccctaccactatccaagagggagggaagtagcaggggctagaggctggggactcccagagcagagaaggcagaggctggggattacagccagagaacaggaaagcggcggccattttatttttccctgggatgctggtggctgcgggcctgacgtgtccctgaggctttcttatgcttctggtccagcacctgggccatgtagctctcctgctgcttctggatccggaagtcagacatgtgattcctgcaacggagccggctggtggtgggctgtggacagccaagggtaggtaggggccagaggtctggctccccagtgtcatcaacaacccccagccgggcccagacccctcacctgaagatctgtttctgctggctgataacttgctgcaactctttaatctcattctctttgccattaagtatatcttcttgctttataat

SEQ ID NO: 117804 - DNA, 1042 bp, Homo sapiens
cacagacgtgcctagcatggctcatcaacatctgaacggttgttccctaccatgcctctgcaggcattccacagagtcaggagatgggttcacaggtaaagattgggggctttagtggcttgtaggggacaactgctcagttgcagggagagggagcatttctagaaatagccagattttgctgcccaactagatctgtcctcctggttttagggggcccttcttgatcccctctgagtgactgagggaggttacattgtaaaatatgtccatgagccaaacaggcttatggaaagttcttctacacacaaaaaaatcaaagctctcctctccccatccccaaccactgctagaaaattggccataatgaaactgacttgacaggttaaaagaccctgtcctagatgcccaggaatcaggtagtcacacattttatggacttcatggcagcgataagtaatctgtgatgatactaaatagaagcaataataactaactccattaaatgtcacgctgattgtctgtttttatagcaccgatggtactgttttatttattgccaatagaccacaacattcacatctgtttttcctcaagggaaccgtatttgcttttggttgaaggatttatctatttgatactatccagaatattgtgaagctataatttcctgggttatattttagatgggttgtctgcatggtggtaaaataagctttttcctctcgcctacgtcctttggaagatctcctgatcatacataactaggtagggcttattcttgctgccggagcttggcacccagctctagactgtttctttgagcattactgcagattggagacgtgtgtgagaggagcagcgctcagaaatagggcttgaggctcaagcagaaactgaagctctcattcaaatgaagatgctctctctaccgcacgatcggcagtgagaaaaggaggatgaaaatccttctcatcacaaagagcttgaaggaacccacgtccccagattagcaaccctagagttcatctgctcaggccgg

SEQ ID NO: 117805 - DNA, 1649 bp, Homo sapiens
agtgccctggccttctgtggacgcacacccggcagcagtaggctctgtgtgccttcgcacatgtgagttatgatgcagcaatgcaggagaagaataaagcagctgtctgtttcagatgacaggaataggccactggactccattctctcccagctgctgttggaatcccgtttgtaggaggctatagggtggtctcactgcacatgcgcaggtttcctaagtctggtgccaaatgttttcttggtaagaactaagtccagtgcttttataagagagcacagatactgttggactgcagggtcacaggtgccctttaatcctccacacctggtctagtacctaagacgtgttttgtgaataaatgactaaatgtttcttatatttaattgtaagaaaaagcttgaaatgaagtaaaaggagctttgactccagaaacattgaaatgaaacaaaggagttcagctcttgatgaattggttacctcttttatctttcagagtcagagctgacaaatttggcaggattatacagagatgaacgattgaaacagaaagcagagtcgctgaaacttgaaaactgtgagaaactttccaaactcattggcctacgcagaggtggctgagaggataatggtcctacgcagggctggggttttgctacttgttcctatttatgttcctgattccattttataatacaaaactaggtaatgatgaacactttactatttgctaacttcgttggttgggcagagtggcaggagcatgggcacgagagccagatgtgtcttcacaggatccttcctggggagtggctccagggaccaggagtagttcatctaagttaaattaatggcaaggcattggattccgtctccctgctccatgcctaccctgcctatgtgaatggagttcagggcatcccagagcagatccatgctttcttccttcttcccttcttcagtgaagtcttaagaaccaggcattcctaggcttagccaaagcttaatattagttatttacactgtctaccaagaattatacctctcccttcattagagtcatcatctccgccaagatttagcctttggaacatgttcctgcccagctttccattttctaggggaatatggagaaatttaaactattgtagtcaatagttttctattattccaatctctgctcagttagtagcattagcaaactgcctaatttgagattcctttatttccttaaccctctctcctttagagagtccagaaattaaaactactgagcagcatctggaggcgggggccagggcgaaggtataatgcaagaccgagcctcatctcctccacgaagcctccctactccatcatagaacccagagaatgtcccttcggtcatttcccctcagtatcatcattggtgtcatcgcacttaggctgagttcctacatcccacagaggcagatggtcagacccaggaggaggcattgccagctctccaggctgtttgctcaagcctagagatagaggagacagatcctctctccttggatatgggggtctagctttggccccagcagccactttgtttaacccagtatcctatagtttgtgatttgagatgatttttcattcattcaacatttattgagtgcctacta

SEQ ID NO: 117806 - DNA, 1318 bp, Homo sapiens
agtctcactctgttgcccagcctggaaggcagtggcatgatctcggctcactgcaacctcccaaagtgctgggattataggcatgagccactgcacctggccagaacacattttttatgaatgagagtgctgaccagttggagaacatttccccaacatgcctgggacttgtggtgactgggaacccgaactgaggggggcttcctaacttctaggacagctgggatgactacaggactgttgattgggagttaactcactgcagcagaagttcttaattcctgtgattccaatgttgttgtttctggcgatcagggaaaacctgaagggcaagcactgtggagaactttctaggcccaagcatctcttcttgggcccctgcgaagttgtccagcacgagtcacctctaggctctttgtcactgctgctgtgatcactctcagccatagcaaagactgtgtcctcatgtgctggttcttgttggttgcagcaataggaaatgcatttgcagtcctgagcaatcctgataagagacttcgctatgatgaatacggagatgaacaggtgactttcactgcccctcgagccagaccttataattattacagggattttgaagctgacatcactccagaagagctgttcaacgtcttctttggaggacattttcctacaggttagtctccccaaattatcattcttaaacatatttctttatttatggctctcagcaagctcctgtttgaaaatctgaatagaggtacaatggtatgatggaaacagcaaggatctagaatcagttgagcaggagtttgaggcaagtctccagcccccagctgtgcataattttgaccaaatcatttagtctctctgaccctgtttcctctcctgaaaaatggggctgttaataatacctacttcacagggtcactgtgaggattagatatttttaagtgccttataaataagtaacaaaatgcctattattgttgtgtaaaatagcacttacaaagatagaagataggaaagtaccccccagcaagttggaagttggtataattcaatgcccaggaagtaaattgaattttatgagttgctattaaaagataccagtgacacaatatggtattgggcacggaagcagacgtgaacatgccagataggattcacggccctaatgctctctctcttctagcctttcggggttctctctcactagttgcaaaggactatttaaatgaagtcaggagagctcagcacgctttagctccagctggttcacttggcttgcctattgtcttatttttctactgggtaa

SEQ ID NO: 117807 - DNA, 1765 bp, Homo sapiens
ctccgtcgggctcgcggcctccttggatcttgctgccggtgctggcccctcggggcggcctccataccccactcccagtgatggcgcccgtggaggccccggcgcgcagcccgcgcttaggccggaggtgctctcgcggcctcagcgttcctccccggctgcccttccaggcccgcatggtgtggactcttagggcttctctccagtctgggactgccgctgcacttgagggccattgtcgggccaggatggcggggttggggccgaggggggcgctggggcgttgggcggccccttcgacagaggtcgaaagggcttctcgccccatttctgttccctcctcccacacctgccctagctccctccacaaaaccgcctgagctcgggctgacagaggaagccgttttgcccgatccacaagtatatcctgagttcacttacctcttgggtggcagcacacatcggtccaccctgcttgtccagaaactgttaagagttggaagttcagaagaaaaaaaaaaggtgacttaatgagggaggagggaagtagagggagaatcattttattccttgaggttgctgtatgtagttagaaactaacacttccgttttgcaggattggatctaatagaaaagctgtacattggcaaaggtagaggtagaaacctgaacattgaaaaccaccagagaaattatacaaaagttcctttcacagcctcttcgcaaaatggacttgacgctattaggtgatatgtttaccgagactcttaactgggaaggggttttactagattttgtattaaaaaggatttctttgctctttaaagtgaagggttatttagttatcaataaggaggttttcctaataatacatctagactataagattggcttaaaatttattttttttccctttctgatgttgtaacctcttagtgccactttcatgttttttttcttagaagtagggaggcaccactattaatttctgtttggtgtttcacttggctactcagattggctatattaaaccggtagctacttttttcttcaatacatctttttccttttagtggagaacggggtcttgccgtgttgtccaggctggtgtggaactcctgggctcaagctagcctcctgtctctgcctcccttaagtgttggaattacaggcatcaatcagccactgcacacggcctatacctgtagctacttagaagtaggtactggggttatccattctgaatgatgggatggggatgcaagaggaagagaaccagtttttagcttgtcttaaactaagtcagaatacagattgatgatttaaacacctcagctcagcggttggtcctcatttcatttttgctcaaagacagtgtggaatcagtcccattggttactataattaggttagctccttaacttcttttgactctgatttctaacaaatgaagaagggcagattttagacaataaatcttgtactaaaatgaaatggtatttgttaaataccataaagaagcttgaaccttaagcaaagatgtcttaaagaaccgtttaaggggcaggggagcacactgaggagtagtcatccaaaaaaaatatatacatatgtattttaaaggcttttaggaattgctaggtccttatagaatctaactgggaagttatcaaatacctgtagaagcttgtcctcttattttataacctgagaaagagcaagtgggtataatgtgtaataatttacagataaagaaatgtagacc

SEQ ID NO: 117808 - DNA, 1753 bp, Homo sapiens
cttttttttttttggagacggagtctccctctgtcgcccaggctggagtgcagtggtgctatcctggctcactgcaacttccgcttcctgggttcaagcgattctcctgcctcagcctccggagtagctgggattacaggcactccgccgccatgcccagctaatttttgtatttttagtagagacgggatttcaccatgttggccaggctggtcttgaactcctgacctcaagtgttctgccaccttggcctcccaaagtgctgggattgcagatgtgagccacgtcatctggcctggcctgaacttttagaattcaatattaaccattttcccctagtttattccctagagctcttcacaaagtatggcttgacttctctgagacagctagtgataagaaaaatgaagtttattttggtataccactcaaaaagattgtgaaaacaaaatggagattaattttttttttccaaactctttgtaccacaattttaagttgaatagctgacttcctaggcatggataagatcagttctatcttatcttctgtcctagtaatgtgtctgcagtggaatccccattgcttggcttctataattgatcttgaaccttcccaattatcattccctgaaaaaataattctacttaaataccttcttgacttaaatgtcatgagttgctacatctgggttctgataagatttttctaagaaaaactacatttgacatgtgacatcttcaggaattcaatatcttgtttctttgacagagggacgctattcatgtctgtgaatttggcagtctttgaaatgccatgtcttttttggaaaaagcttttgatggactttattttgatatacatcttaaggtcccctgacctatactataagcagagcatagcaaagagggtcattatgaacattgtgtgtagttctgggcagggcttgggatcctttgggattgttggtatctacaccacatggccccaccctgctatgttttaaggttttctgctgactttttaggtcttcagccttgattttgatgctttgagtgcctgcctctagcagcaccacccccagcccttttccagttggctgcatctcatctgttgtgggctaagaaaccagatcacagagcttattaaaattgtgtctaaaataagatccagtaggctcttgactgaagagggcttcatgtgctctgtgaactgtgtggtttccttggctgatcggagacctttctgacttgcttcctgtttttcttctttacttttgctatacagatgtaggaggctttttggtgctcttagagtgctgtaatgttgaagtatttggttaatttctctattcttgggaagggtaaaaggctaaataaatatcttgattctttgaggagttgaagactgaccagagttggatactaaaagcttttcttaacagtaatagtgcattgtacattttaatggtgtcctactagttgcagataacgtttggcatacatagctttcaaacaaagtaatgccaggattatcacttgatctatttctgtgatagagattttttttctttctttttttttttttttgaggcagtcttgctcaggctggagtgcagtgtcatgatcttggctcactacaaactctggctcccagggtcaagcagttctcttgcctcagactcccaagtagctgggattacaggcactcaccaccatgcccagctaatttttgtatttttaatagagacagg

SEQ ID NO: 117809 - DNA, 1010 bp, Homo sapiens
atacttttgttcccctacttgctatagaagtagaagtagttttactggaatacctacgattttcctgtcctgtctctctcattcacttagttattttctgccttggctctggttgccaaaattctaaacttctgttttgtgttttgtgtgtgtgtgtgtgtgtgtgtgtgtgtgtgtgttttgacagggtcttgctctgttgtccaggctagactgcagtggcacaatcacggctcactgcagccttgaccctctgggcttaagtgatcctcccacctcagcctttccagtagctgggacagcaggtgtgtgctaccatacctggctttttaaaaaaatttttgtagagatagggtcttgctgtgtggcccaggctgctctcaaactcctgtattcaagtgatcctcctgccccagcttcctaaagtgctggaattacagacagccaccccactctgctaaacttctgttttgttaggtatatgatcccatggctgcagtatcagagaatgaggttattgcctttccatgtaccttatttcgttgactctgaaacacatcaattgaaagatgtaccattattctactaagaaggaaagtatatttagtgccaattaagctgacatgccattgattatatgcagcttgatttcagctatgttttatttttgtttatttatttatttatttatttttgagacgaagtctcactctgttgcccaggctggagtgtagtggcacaatctcagctcactgcaacctctgcctcccaggttcaagtgattctcctgcctcagcctcctgggtagcttgaattacaggtgtgtgccaccacacccagctaatttttgtattttaattttttaaatttttttgagatggagttacgcttttgttgcccaggctggagtgcaatggtgcgatcttggctcgctgcaacctctgcctccccggttcaagcaattctcctgcctcagcatcttgagaagctgggattacaggcatgcgcca

SEQ ID NO: 117810 - DNA, 1411 bp, Homo sapiens
tccagcctgggcgacagagcaagactccgtctcaaaaaacaaacaacaaacaaacaaaaaaaacagtatttttggctctttaatacataatacatgttttttgtttgtttgtttttttgaaatggagtctcgctctatcacccaggctggagtgcagtggtgcaatcttggcttactgcaacctccgcctccctggttcaagggattctcctgcctcagcctcctgagtagctggtatgacaggcatgtatcaccatgcccagctaattttttctatcttcagtagagacaggcttgttggccaggctggtctcgaactcctgacctcaagtgatctgcccgcctcagcctcccaaagtgctgggattacaggtgtgagccatcacgcccggcccataatacatgacacatgttttaccttcctgattgtatttatttgctaagctctgaacaaagcaaaaatgacccactttaaaaaaatacacattgccttgaagaatccaaaataccttaaagattcaccaatctactcatctcttactctgaaggaatgctcttaagagagtttcaccagcaggacagagaatattggtaacaatataaactttagtaatggataaaaggtacatttatgttgaatatatttcttttctttcttttttctgtaggaattgaatgatctggcacgggaccctccagcacagtgttcagcaggtcctgttggagatgatagtaagtatttaaaaggaataatggagtaatagcataacagtggttattttgtgtgaagaaacaattatggtatagggaagaggcagtgtttaacccttagtggcccatgaagggagcaactctatgttcatcccattatcatctgtgttgttcattacattttgaatcttctgccaggtattggctatgtagttgttctagtcctctcctaccttaccttcatcccttctgggtattttcctggagtgaaatatttaagcttttacctacaactagctattattcttgagtaagataatactaaggatgatagtatgtgtgtctgtgtctgactttctactgactcatacttgcgaaatcaggtctttatttatttttttcttgagacagggtctcgctctgtcaagcccgggctggagtgcagtggcgtgatctcagctcactgcagcctctgcttcctgggttcaagtgattctcgtgcctcagcctctcgagtatctgggattacaggtgcatgccaccacgcctgattaatttttgtatttttagtagattcgtggtttcgccatgttggccaggctggtctcaaactcctggcctcaggtgatccgcccgctttggcctcccaaagtgctgggattataggcatgaaccaccacacctggccaaaagcaggtct

SEQ ID NO: 117811 - DNA, 9430 bp, Homo sapiens
aaaaaaaacgaacctggcgtggtggcctgcgcctgtaatcccatctactcgggaggctgaggcatgagaatcacttgaacccaggaggcggaggttgcagtgagccaagactgcaccattgcactctagcctgggtgacagagtaagaccctgtctcaaaaaaaaacaaacaaaaaaaaaagtttttgtagacaagaggagtcacgtgaaacaatcagggataagactggcatcatctacttataataatactcaatgcatatatttctcttttctagccccaggagagtatattaggacttcactttaaatatctggccgatattcagcccttaaacaagaaagatttgtgacaaacatctccatcccaccacagataactttccatcttgaggccatacttacttttctctatctgttttgtagatccgagcaatctcaggcactaaaggatcatctggattgggatcacacaacagagaacagatggacaagagtactagaatgaaaaaaatcatataaattagcagaggatcaaagcaaagggttgagagaaacatgagacgccaaaacatgagaaaattctaagaatttatactgtaatgcctagcagctttgtaagttttacttaactttatattaacagtaaccaacaaggattattattattattattatttcttttttttttagcagaattggggtttcaccatgttggccaggctggtctcgaactcctgacctcaggtgatccacccacctcggcctcccaaagtcctgggattacaggcttgaaccaccatgcctggcctaatttttgtatttttagtagagatggggtttcgccatgttggtcaggctggtctggaactcctgacctcgtgattcacccgcctcggcctcccaaagtgctgggattacaagcgtgagccaccacacctggcaaatagttttttttattttttattttttgagacggagtctggctctgtcgcccagactggagtgcagtggcgcggcgcggtctaggctcactgcaagctccgcctctcaggttcacaccattctcctgcttcagcctcctgagtagctgggactacaggcacccgccaccacgcccggctaattttttgtatttttagtagagacgggggtttcaccgtgttagccaggatggtctcgatctcctgacctcgtgatccgcccaccttggcctcccaaagtgctgggattacaggcgtgagccactgcacccagcctaccaacaaggattttaagaagcttaaacagactttaggttaggtcattaaaaaataaaaatgaaggctggctgcagtggctcatgcctgtaatcccagcactttgggaggcggaggggggtggatcacgagatcaagagattgagaccatcctggccaacatggtaaaaccccatctctactaaaaatacaaaaattagctgggcgtggtggtgtgtgcctgtagtcccagctactcaggaggctgaggctggagaatcgcttgaacctgggaggtggaggttgcagtgagccgagatcgtagcattgcactccagcctgggcgacacagcaaaaaatccatctccaaaaaataataattataataaaaaataaaaaataaaataaaacaaatagcagaaaattaatgttaaatgacatcttggtctcccagatacaaatataagcccctttgtgcaaagtctcacaacaatcccatgatgtaagaagagttgatatgactgtctttatgcctgaactcctaagggagctggcccagacaggtgcagtgacgtgttcaatgtccctggctagtaattagaatagaattagaactttgtctaaattctagaccaagaacatttttcagatcccataaagttcaattttttagaagcccatattcaaggataaatggctttcaaaattccaagtgcgatggctcactcctgtaatcacagcactttgggaggccacagcagaaggatcgcttcaggccaagagtctgagaccagcctaggcaacagagtgagattctgtctctacaaaaaataaaaatattagctggatgtggtggcacactcctatggtcccagctactcaggaggctgaggtgggaggatcacttacgcccaagaggttaaggctgtattgagctgtgttcacaccactgcactccaatctgggtgacagagtgagaccctgcctcaaaaagaaaaaaaaaaaagacagccacactactgaatattcttagcaaaaacgacaaccataaaatccaacaatcactgttttccagtggcaggcaccacattcagacaattgttttgtttaattttcagttgaaaacaattcagtctaaatcaagaacataaatgcaaacacttgcccctaaatggggatggtcatacactcattacagagaatacaacatacttctatgaatgtctcaaattctcttcagtgacaatttagaatctcatctaagccatttcctcggtgacaacctgggatgtagcagacaaatctcaatagtgtaatttcctttgttcaaatctgtcattaacttatgttttaaaatatttatttatttatgtatgtatttatttagagacagggtctcactctgtcgcccaggctggagtgcagtggcatgatcttggctcattgcagcctaaacctcctgggctcaagtcatcctcccacctcactctccaggtaagactacaggtgagtgccaccatgtgtagctaattttctttgtattttttgtagaggttgggttttgccatgttggccaggctagtcttgatctcctaggctcaagtgatccacctgcctcggcctcccgaagtgctgggattacaggcgtgaactaccacacccggccatatctatcattaacttatgcattccttactgaatgcaaagggggcataaagtcactgattacattaagttcagtagcctctgacaaaataaatttaaatccttctatactaatgctaatagagctcagccatctttcttttctctaataggtgttctgtaccaagagataataactctcagcccattttactcccaacacataaattcagcagggaaaggattcgctcatattcctaccaaatctatcctatagagatcaagggcttctgagaagtaaagaaatagttggcatgccctattcagtttggtaacaaaaatgctatttccttgccttaagagtatatgaaaagtttttttaaaaaatcaggagagatgttttctgactcttcattcctgttacccacaattctggcagctggcattccaaaaacattttcctattgtcaggtgtcatcacctgaagccctcttcaagcatagaacattctaacatcaattaggaaagacttcatgtatttcctggaaatgacaacagggaagttagaaatttttgaatgttcctttaacttattcttctaaatattctaataagtcaactttaaaggacaggttttaaagaaagggcttttctttctttccaggaaaggagagtactggctatctggaccttgtgaaaagatttttagtacactacttagcttcttgatttcatgaagaattcattttggtttctaatatactgatatggtttggatctgtgtccccacacaaatctcatgttcaactgtaatccccaacgttggaggtggggcctggtgggaggcgactggattatgggggtgtatccttcatgaatggtttagcacgacccctttggtgctgttcttgtgatagagttctcatgagatctggctgtttaacagtgtgtggcacctcccccatctctctcttggtcctgctactgccatgtgagacaggtggctccccctttgccttctgccatgagtaaaagctcccgaggactccgcagaagcagatgctgccatgctttctgtatagcccacagaactgtgagccaattaaacctcctttttttttgagacggagtttcactcttgttgcccaggctggagtgcaatggcgcgatcccagcttcctgcaacctccgcctcccgggttcaagcgattctcccgcctcagcctcccaagtagctgggattacaggcatgcaccaccaagccaggctaatttttgtatttttggtagagatggggtttctccatgttggtcaggctggtctcaaactcccgacctcagtgatctgcgcatctcggcctcccaaagtgctgggattacaagagtgagccaccgcacctggcaaaacccttttctttataaattatccagtctcaggtatttctttatagcagtgcaagaatggactgatacatatactataccttcttctgtaaagatagtaactcttatttctataacctgtatagtctcttcactgaacttttacctatatatattcttcatcagtattactttttttttttttttgagacagactcttgctctgttgcccaggctggagcacagtggtgtgatgttggctcactgcaacctctccctcccaggttcaagtgattcttgtgcctcagcctcccgagtagttgggactatagacacacaccaccctgccctgctaatttttgtattattggtagaaatcaggtttcactatgttggccaggctgttcttaaactcctgacctcaagtgatccaccttccttggcctctcaaagtggattacagtcatgagccactgcgcctggccagtattactttttcactagtgttacagcaacagttactttcacttctaaaaacatataatcaaatggctttatggcacacttatctgcttcccttcagtttttttcagtgtttttgtttttgttttttaaatatttaggtccccatcacggaccttcaaagtagagtgaatactgggtcaaaatttctgtccttgaagacagactatatgttaaaggaataatatcatatacaggattaaggcatttcatagaactacttgcccatacattcaatttacaaaaagggactcattaaaaccttaaatctgagacagttaatacaatcaaattcaacaaaatggcactgcaactattttaaaggatagctatccagatagagagaacctaacaaatcagacttgtaacagtccttatcatttggaatagctgaaaaaaaatcaacgctaggcaaggggaagaacaaaaagaggtatggcaataatttcagctatcttgtgtctccaacacctcaccccaccaaacacacacctctcacacaattctacttatcttggtcccattactagatttacatctctattgctatttggtgaaggaagtgcaaccaatgggaccctcaccaggccaggcacaggtccacaaacactttctcaagtagctcttgaattgtaagggggcctaccaaaagaaaaggggacacttctctaaaaaactatttcattaaagttgtaataactttaaaaaaatgtggttctctggcatcctgtttttatttctgcctgggactccaaaaattttaaattaatgtctcagagttttgtttgctttaaaaaattaatttgtggccaggagcagtggctcacacctgtaatcccagcactttgggaggctgaggcgggcggatcacctgaggttgggagttcgagaccagcctgaccaacatggagaaactccgtctctactaaaaatacaaaattatctgggcgtggtggtacatgccctataatcccagctgctcagaaggctgaggcaggagaatggcttgaacccgggaggtggaggttgtggtgagccgagattgcgccactgcactccagcctgggcaacaaaagtgaaactccttctcaaaaaaaaacaaataataataataataatttttttttaagattgagtcttgacatccaagtgataacatgacaaatacccaacacttttgacaactgtgcctttatccccagtttttggagtacttacaaggaaccagttaactgtctgtttttgcttctttaatcttcgtaacaacaatgaaatatgtattattgttccttttctacagatgaaaaaactgaggaatacaggggccaatgtgtctctagcctcatttaataagaggtggatctgagatctgaacacaggcaattggatctagaatctatgttctttaccatgaaactatgttgcttcctgtctaaatacatgcattaaacaaatggtaaattataagcagataatttctacttaatggttcaaatggtaaattataagcagataatttctactaaaaatacaaaaattagccaggcgtggtggtgggtgcctgtaatcccagctacttgggaggctgaggcaggagaattgcttgaacccgggaggcggaggttgcagtcagtcaagatcacaccattgcactccagcctgggcaacaagagcgaaactccctctcaaaaaaaaaaaaaaaaaaaaaaatcacacaccacatttcaccacacaaataccaaaactaacattgcttgtctatttctggacactcaacatacttttatatgtaactcttgttacagtgtatatgccttttttcttttttctgcttttctcaagcacagtattttcctattttcacaatatttgtaaagatcaatacttttttttttttggagacaaagtctccctctgtcacccaggctagagtgcaatggtaccatcttgactcactgcaacctccgtctcccgggttcaagtgattctcccgcctcagcctcctgagtagttgggactacaggcacgcaccatcacacctggctaattttttgtatttttagtaaagatggggttttgccatgttggccaagctggtctcgaactcctggtctcaagtcatctgcccatctcagcctcataaagttctgggattacaggcatgaaccactatgcctggccagggtcaatactcttttaaatgcatgtgctggaaccgatctattttttcctctactgtaagtaacctccaattttcagaactaaatcacaatgtcacaaatgtacttgtatacaaagttttttcagcatttgggattgttttcttagtataaataaatgaaactagaattattgggtgaatgggcatggatgattaagtctcttaacacatactggcagactgggctctacaaatctatacctctacttgaagaatatgagtgttcatttcaatgtacctcattagtgttttgtcttcttttaaaaatatctttgttaattaaaaaggtaaaaaataggaacgtaacattcatttatttattctttggttcccctgtgtccattcatctattgggatctgaatttttttctgatttttgtacttcatattttaaacatattaatccattaccatatttgatttttctcttaaacaactgatttcattttcacaaaagtacatccagtgaactcttttatcacctttcagagtacagcagtgagatctgataaatattcttgtttttgagacggagtctcgctctgtcccccaggctggccaggctggagtgcagtggcgcaatctcagctcactgcaacctccgcctcctgggttcaagcgattctcctgcctcggcctcccaaagtgctgggattacaggcgtgagccaccgtgccaggccataaatacttgtttttgttttcctttataaattctagattatttggctgggcacggtggctcatgcctgtaatcccagcgctttgggaggccgaggcaggtggatcataaggtcaggcgttcgagaccagcctggccaacatggcgaaacccagtctctactaaaaatacaaaaattagctaggcgtggtggcgggtgcctgtaatcccagctacaagggaggctgaggcaggagaattgcttgaacccgggaggtggaggtttcaatgagccaagattgcaccactgcagtctagcctgggcgacagagtgagactccatctcaaaaaaaaaaaaaaaaaaaaaaaatctagattattgtaacgcaactgtgatttcatctgggaataatgttgaagggttgtacaatttcaaatcaacacattaagacaacaactacatcactcagttcattgatacagaaacctaaagacaagagctggtaaaatatttacctatattttgttcttcaagaacctaacgtctatgtttacagcataggcatttgtctaaagggctggtctatttcctattctgcaatagtatctatctttttccattcatgaatctcaaggttggaagagatgttaattgtgctctactttatgctctaaaaaaacattcataccagtgtccatcttcttttttttttttgagacagagtctcgctctgttgcccaggctggagtgcagtggcacaatctctgctcactgaaacctctgcctcccgggttcacaccattctcctgcctcagcctcccgagtagctgggactacaggcacctgccaccatgcccagctaatttttttgtatttttagtagagacggggtttcaccatgttagccaggatggtctcgatctgctgaccttgtgatctgcccgcctcggcctcccaaagtgctgagattacaggcatgagccacggcaccaggcccagtgttcatcttctaacctatgctagagtagcacaactgacagactagtcactacaccaaggaatacttttgcttgaaaaatccaactcgttttcagttctcaaggtccatttcagattaagaagaattgctatctcttcttaaaagaaacataagtaatcttttcaaaaataaataactctaaaaagacaaaagacacggttgctttatcttgatatcaaatacccactgttaccttttgaaatagttagtgctggagaccactgtgatcgtagaatatcaagacaaatgctgccattactgttaatatttggatgataaattcttgttgtaaatgcaacctacagaaagaaaggaaactttctgtaaactagtttattagtattatagaaagtacattaaaaactgccacattccaattaattaccttaggtggtttgaaggggtaatctgttgggaaatgaattgtcaagaaaaatactccaccctgatagggactgtcattctgttgataacaagaaaagtgggattaaaatgagtaaattacataaactgtttattctgaaattaatctgaatacttactggccccattattgtagcttgccaatggaacactgaaaaataacaagaaaaaagtcaccatgtaacaatatctacattgtatctacgccatagtaacatatcattccccttctaatccaaattcatttataaataatatgataatgagtatgagcaagatgaggaacataaattaacagtc

SEQ ID NO: 117812 - DNA, 1051 bp, Homo sapiens
atttaggggcaagtgtttgcatttatgttcttgatttagactgaattgttttcaactgaaaattaaacaaaacaattgtctgaatgtggtgcctgccactggaaaacagtgattgttggattttatggttgtcgtttttgctaagaatattcagtagtgtggctgtcttttttttttttctttttgaggcagggtctcactctgtcacccagattggagtgcagtggtgtgaacacagctcaatacagccttaacctcttgggcgtaagtgatcctcccacctcagcctcctgagtagctgggaccataggagtgtgccaccacatccagctaatatttttattttttgtagagacagaatctcactctgttgcctaggctggtctcagactcttggcctgaagcgatccttctgctgtggcctcccaaagtgctgtgattacaggagtgagccatcgcacttggaattttgaaagccatttatccttgaatatgggcttctaaaaaattgaactttatgggatctgaaaaatgttcttggtctagaatttagacaaagttctaattctattctaattactagccagggacattgaacacgtcactgcacctgtctgggccagctcccttaggagttcaggcataaagacagtcatatcaactcttcttacatcatgggattgttgtgagactttgcacaaaggggcttatatttgtatctgggagaccaagatgtcatttaacattaattttctgctatttgttttattttattttttattttttattataattattattttttggagatggattttttgctgtgtcgcccaggctggagtgcaatgctacgatctcggctcactgcaacctccacctcccaggttcaagcgattctccagcctcagcctcctgagtagctgggactacaggcacacaccaccacgcccagctaatttttgtatttttagtagagatggggttttaccatgttggccaggatggtctcaatctcttgatctcgtgatccacccccctccgcctcccaaag

SEQ ID NO: 117813 - DNA, 1038 bp, Homo sapiens
ttttatcatgttgcccaggctggtgtgaaacgcctgggctcaagtgatccacccgactcagcctcccaaagtgctgggattacaggtgtgagccaacatgcccagccttctgtcggtttaatcattattagtatatgagttcaagaactatgtaatgtagaatcatataatttcaagtactttaaatgaatgaattgagtggacatcttttgtagaaataggccaatcaagtatggaataaggtatatgccaacaaatactaaaatttaatcagaaccctctataagtagcaattaaaggagactttcacattttacagctccttcccattatcattgaattaatccttatcagaaatttgggatagaaaggggcctttccttgaatgtcctataagctactctcttcaagttacttgatgggataatgaatggaatctgttgcttactgactccacacctatgttaagccaagcttctctttgtgtgtacaggtacaacagaatagctcgggaatggactcagaagtatgcgatgtaattaaagaaattattggataacctctacaaataaagataggggaactctgaaagagaaagtccttttgatttccatttgactgctttctatgagcccacgcctcatcttcccctgtgcacatgtttacctgatacagcagtgctgcgtgttgtacatacttggaacaacaaactagaaatactgtacttctgtaccaacattgcctcctagcagagaagtgtgtgtgtgacaagccagttctacaggcattacctaggtgtgagactaaaagcttttcttattgacttaaatttggataacagcaaggtgtgaggggggtggtgggtatggtgtgtgcttggatgggaaagaaaaggctccactcacctataggagattatttttaagtggaatccatttaaactcaaaacagttatgaaaagcaaggtgaagaacatgaagctgtgtctgtattcattttattccgaaggagctacgtcttaggtgaaagttatgacca

SEQ ID NO: 117814 - DNA, 1309 bp, Homo sapiens
aagggtgaaaattcatttgatggaaatacttgtgtatatttaaagacccaattgctcctctggagcttgtactttcaagaatgattaatctgtgtaataaactggttactacagtcattacatataattttgtgtgaataggctttttcatttttaagaagtttgtctagctgagattagtggtggattttctcccacttctgaaatgttcatttatactggttgcattttaagatcatgaaacaattccagttacattgtaaaaaggatatcttacgagtaattttattgaacaagttagaggcataagcttaagagcatttccatgaaacaacacatgcagcattccaggaacttgattgttaaattcaataagaaatttgctttattaatgaaactaagctgcatttcatcaaaaccttgtgacattcccttggtacataggacataaaacacagaggcattgctatttggtaagttaagcttctgtgattgtaattataaaagagcaacattgaccaaacctgggaaacaagagcacagtcttgtttggagagtctacataattactttgcactaacatttgcaggatgttcacacaattttaaattgtactgtatgtggctttttgaagtcttcccttgaccctagtaaaatatagcttgaaacttgtaaacaactgtgtttgccagaaacatcattcatgtgaactaggcaagttaccttttttccccccttcttttcctaattgtaaactaggccaacctgaaagccatggctgatgctctagccatcaggttctttcaaatgcatctttacactcttgcacaaaagttaaggaataaatgtccactgcttttggttttaaacttgttcaccttgtcttatctctcactgtcactgctcctccaccttggaacttgtgtgataaaacccaaaacctcttacagttctcttataagcatttcaagcatctcttattagcatccttgactttgcagaaaaggcttaactgttaacagttgtggggaaaggagttagaatttagcttaagcctaaaatcaccctgtattctcagtattatgggcaagtgggacttcatctttttttttttttttttttttttttaagagagggacagggtctcattctcttgcctaagctggagtgcagtcggagtcatgacagcacagctcactgcagcctcaaccttctaggctcgaacaatccccctacctcaacctcccaagttgctgggacttatggtacatgccaccacacctggctaatttttaaattttttttagag

SEQ ID NO: 117815 - DNA, 1053 bp, Homo sapiens
atacagggtgattttaggcttaagctaaattctaactcctttccccacaactgttaacagttaagccttttctgcaaagtcaaggatgctaataagagatgcttgaaatgcttataagagaactgtaagaggttttgggttttatcacacaagttccaaggtggaggagcagtgacagtgagagataagacaaggtgaacaagtttaaaaccaaaagcagtggacatttattccttaacttttgtgcaagagtgtaaagatgcatttgaaagaacctgatggctagagcatcagccatggctttcaggttggcctagtttacaattaggaaaagaaggggggaaaaaaggtaacttgcctagttcacatgaatgatgtttctggcaaacacagttgtttacaagtttcaagctatattttactagggtcaagggaagacttcaaaaagccacatacagtacaatttaaaattgtgtgaacatcctgcaaatgttagtgcaaagtaattatgtagactctccaaacaagactgtgctcttgtttcccaggtttggtcaatgttgctcttttataattacaatcacagaagcttaacttaccaaatagcaatgcctctgtgttttatgtcctatgtaccaagggaatgtcacaaggttttgatgaaatgcagcttagtttcattaataaagcaaatttcttattgaatttaacaatcaagttcctggaatgctgcatgtgttgtttcatggaaatgctcttaagcttatgcctctaacttgttcaataaaattactcgtaagatatcctttttacaatgtaactggaattgtttcatgatcttaaaatgcaaccagtataaatgaacatttcagaagtgggagaaaatccaccactaatctcagctagacaaacttcttaaaaatgaaaaagcctattcacacaaaattatatgtaatgactgtagtaaccagtttattacacagattaatcattcttgaaagtacaagctccagaggagcaattgggtctttaaatatacacaagtatttccat

SEQ ID NO: 117816 - DNA, 1198 bp, Homo sapiens
cctcccaaagtgctgggattacaggcatgagccacctcgcccagcctattttcttttatattgtgcatgcacttagatgaaaactggctttctccatcccacaaaaaccttctttaagtgtttccctggcactataaccttttttaatcaggactggtataagtggttgatattcaggcccctcagtatatttccagaccaatttctcagatgggcttagaaatagggaaatgagacgggatcacattgtcagggttactattcatgaagcaattccttcattgctggcatattttaccttagtcaatgtaaggagaaaagctcaatggttaggactaagtaagcctttaaggcctttgtcctctggctgaatgtataatacaatcaccaaccagctttgctctttctatgtctactcctggtctgggtaaggcaaaggcagacatttttgtgatgagcagtcacttttcattaaattaaactatttgtggatctttatctgatcagagacacagcgtaatctgcctcttagcagatgtaaaactatatgaataccttagtgccaagacagcagcttaatagttttccttgattgagtggtggtttgtgtgtttgttcttaacgtcctgtgtaagttgttattggtagaatggttttttccagagctgaggagcctgattgcccaacattgtactctgaaagcaaatggttgatcccatttggaaaagccaagaagaggccattgagtgtccagcccaggcctcctgtgactgctgtacaggaaagagcagcagcagccttggtgaatgtaccatgttcctttcccaacttctaaggatgcgaggagtgacaactgccattttcccaggcacacctctccctgccctgagccacttgttctcaattctgtttaaacttcctttttggtacttaaaaatcttaaatcttaaaaagatgtcacccttccctaaactttagagcctctggaaaatgtgagtggggagggtttggttttttgagttaaaacctagtcttcaaattgccagctttccttgggtttaaagttctccatagaaaatgagattgctttagaagctccaaagctcctgggccctctgacttggaggtttctagaaacaacccacaaatacaatctgacatttgggacgcagagccagcaccatcttgggtaagagaa

SEQ ID NO: 117817 - DNA, 1864 bp, Homo sapiens
gccattgcatccagcctgggcaacaagagagaaactctgactcaaaaaaaaaaaaaaagggcggggggcacttccttttgaagtttcagatgtatattggagggagcagaattcctttgtgatttcttccttaatacattgtgtccctgaggtggtccctgttcttcctgtctcctgtcagccccctggctcagaggacggctgaatggagttgcatttcagtgcccacagatggaggtgatgactgaagtgtgtttgcttatgtggggagtgagatgatggctttggtgtctgagtggatgctagtgccttgagtggccagcagagggcagtggtgacccatagctgtgacaaccgtgaggcgtgtggtcagtgaatctgcatgggcacaacctgagaggggcttttgttggagtggggagattctttcggacttaagctttgtgcgtggtatatccagaatcagatgggccagtgccaagttcagtcaggttctcagccttacagtgaaggaaaaggttagtgacttgtatttcagcccaaagcctactggaagtgtcaagctgccagctcccctctgccctccccgttgctatggcagccatgtctctgtgtgtgaataggtgaaccaggctccaggttaggacctctgcccacctagctccaggttacatgcaggaaaagatctgtctattgctgcatgtgaacaaggagatcccatatttctagcaggtcacagaggcagcagtccattatcacttgcctgcccacctaccctgggcaaccagcacatggctccttagaccttgaagatggaggcctggggacagaaggagcagagttgggggctagtgatagggcctgggaaatgttcttgtctgtttcaagtttatcttgtattttggggccctggtctcctcagtcttccagcccaacaggtgtgagcgtccagggccaccacccggaagccagctgcctcttcatggggaaatctttgaaattcaaggcttggccatctggatatgcaaatgttccagatttgctgagcccaccaagtggctgagccccccatgcctggggcctgtcagccacattctccatggctccctccttctaacagggacaggggcaggcagggaatctaaattcccaggtcaaggagtttatttgggagccccaggcagggctgtgagaattagctaccactgcccctagatggggaaagctgcctgggtgctgttggtacctagaacctaagcttttgcctactgatagactctaaggagaacggtgtattgagagctccacgagtcctgctgtagtgcctaatcatgtgagggattttgctggatccaaaggaatctcaactaagaaagtttctggaataaggagggaagccttgggtctagcctcgctagagggtgggagctacctgcagggaaagctgctgacttcctattatgtcaaacccaggcaaataactggagcttaggcagttggcccccagaattgcttattctcccccaggcctccctctggggctggttttctggctgtagcaggaggtatgtgttctctgagtgggaaaggagtggggtcagggtcagggcggaaacccgggaatttagattccctgcctgtccctgtccctgttagaaggagggagccatggagaatgtggctgacaggccccaggcatgggagagcttaggccagcctgtatgtgtgtgtgcagaaggggactgcacatgtgttcaggagcttgagagtgagaattgtgagcatgtacactccttagtgtttatgcatcagggtgtgatgcataaacacgaaggctctgtagcctttgaagaacaggatcaga

SEQ ID NO: 117818 - DNA, 1116 bp, Homo sapiens
agttccatctaaccacagccccactgctgcactctcccttgctgtagtctctgggcctctggacacagttgcagtctctgggcagtggcctttggagcctggcaggtagggattctcttcactttctcctccttcccctggattgaggtgggtgacacaggaggccagccagctcaggaccagatcccctctctctagctggagcaatagccagccctcctgacggagctcacatatatctaaaacatcgtcttgtagatcttaatgatttctcaacagcccctgattgaagcatgcccaatttagcaatgccgtaagtaactttttatatttccttagggaatcatttcacttatgaatcttttctgaatctgcaatctcgattaaaagttgatgttgttttttctcgtctcctcggcttctgagatgcctccctagtgaaaagggtggtagcaccatcaatcctcctcattagtctgtctggagaatttttcttgagggtggggtgggggacagcaaccaagtctcctctgtcgtggcacctagcggggtgtgacctgggggagggttgccctcggggaggggctcggagaggtggggggggcattgaccgtctcctgcccacatacactcccccatctgcccccatctcaggggcccctgacagtgtttccgtgggagagaggggttgtccagcccattctgcctttagggtgtgtcctcacacctgtagcttaggaatttgaggagagggctgaaccccattcaaggctcagcttgatagcacaaaactggaccaaatccaagctctttcctgtacagccgccatagcctgggtgaatcagtcattcccctctcagagcctcagtttacttatttgcaaagtgggaatgagattgctaaacagatgacctagcatgctggtgaagggatcacttaacacagtgcctctacaaagggtcctgtcccaattctgaacagtatctagttcttttcctcatctcattcaccttctagtcctggtgacgcctttgaggtggagtgagtgggtctggcataattatctccaggaggagaaaggactggtgggattgggacttgcccaggggttgcccc

SEQ ID NO: 117819 - DNA, 1022 bp, Homo sapiens
tgctggagactgaaggagcttcttcctgacttgaaggctgattggttcaaaaaactcagcaaaaagtttaatagcaaggtgagacttcaattctcctttttgaggtaggcagaggtgggagaatagtgaaccaagcttcccttcttcttggggaagggggctgtggtggggacagtctcacccaagggcagagatcctcaccccatccttcctggatgtcccccgcttgtctcattggcatctgtggtggagagttctttgtggatggcttgcacatgacattttctgtttctgtaacactttctgtgtggacaattctgtccttttcctctgtggctcccatatgggttggataggtgacagtctaggtctccctcccaaggtgttaatttccagcaagggaaaactccaagatccaccccctaaactgggccagacaagtcaacaccccttccctgaggaagccatcaccactgggaccacctggccttcctccattgcagcctgtggatccctggcctcccgcctgagttgggggtgggggtggaggcataagtctgaaaaaaaagtgggtaatagtcagcagttccctaaagtagaattactacccaccctctgccatggaccccagcataaagctttttgtggggcgtgcatgacctgactctgtactggcgttaggcttcaggagatctgtggaatagagtttgacttcatggatcctaaccctctgagacctgctgctgactcccagggagcaggtcctccctcacagtctgtgcctcagcttccccagaaaaggtagatggaggtgagttaaatgcttggagatcctacacctgggcttttgcttcctttttccttgcacggtcagtgcccaacacagtgcctgacattcacactgaggcccagcatacctatctttaagcagtttggaagtgatcttctgggggtgatgggcgtcttaaaacggtttccatagcaagcaccttacttttactcacatgggatgtttgtttgga

SEQ ID NO: 117820 - DNA, 1021 bp, Homo sapiens
gccccgcgtgggccacgcagcgtgcagagcctgggagggagaatgggggtgttcctctagctgcggaactgtggggggcgtacgtccccggcgcctgccacgctgcactggccccaaatttacccatgaagttcggcccgacccccctccccttcgcttccccggagcggagtgaggggctgaaccgccgcgagaggaatgtgttaattttctggctgggggaagttgtcctcgcccggaatgggctgctttccggcggggagcgcggggtgcgcctggctttgtttatttgtaggatcgacggaaagcgagtgaccccggtttttaaatggggggccaccttcgggacctgtcagaagagctgaaacgcccaaagtgggagcaagatctctttttgttcttttttcccccccgggaatctgaaggggtgcgcggagttgggctggtgcctcgggctgcaaggaagcaccagtaaatttggggggttctgtagtgactcattcggaaagacccgctccctgaagtctcccgcgacgggggtctgaaggtttggcaaccgcgccctcctttgccccctggactttgggtggtctgagagtcgcgccttcggatggggggggagctaagggggtgaccagcggaccagactcctgacccccacctttcctcgcgcggcgggcgctgtttggagcccttggatttgtggtgggccctgtcccccccacccccgcattttctttggaagcgttggggagggggcgtgtgtgagatcgctcggccctcgcccccgccggagccgccccagggccgccggcaaacagagtccctttcaagttttccgctggggccgcctggcgggggctgcgagcgcggtcgctgcggacttgtttggagcgcgatttgaacgcccggctccacctcagctgccccaggccgcggggtggggggcgtctgtcctttgcagttgggagtatttaaattagacgtcttgggggacctactggcctaagcttcacctgat

SEQ ID NO: 117821 - DNA, 1069 bp, Homo sapiens
cccaccgagcttcttggttggctctggccccctccatccctggctgtgtctgcaaagccccccgggaaggcagggaggaggcgcagcaggctcagaacagcgggtgcccgcgcagccaagtatttgctcgagctgtcagagacagacaggcatgtggggaatttggtgcgtgtggggctgggggaagcagccgggtgggcaggcaggcaggaggagggaagctggggctgcctcccagcctgtggaaccctgcagagaccacctctccccagtcctagaggcaagctgcatccaggcaccttcctcctgcctgtgccagtgcagtgaggggagcgggatgatcctgtggggtctgataatagctctgacacggggaagggggtgccttgtcgagggcctgcaggctcaaagaggctctggtggagtgtggagccaggcaggaatccgggttgtgcccgactgtggcctccaggaaatagcagctgtcatgctcccgcccctccaccccaagcctggcacaacttgtttcctggccaggatccggccagggcagattggaggagcctggtattgcccggcctgggcaaggaacaggcaggatgcaggggccatgtttataagcctaaaggcgtttggggtgctctggggaggggacctcagcccttatctcctatgcgaagaccccaacccagtcacctttgtggtctacactccaaaagcacccattaggtagggtagggcccagagctgagtaatgcttggtttttcgtagcttgagagcccagagagggggatacgctgccccaaggtcacacagtgggctcctcagccttcccctctaccctcatgtgggtggggccactgggaattggtgaacatgggggggtttgctggggtggggggcctatatttagtcagtcctgcagagccagggcgcctctgggagcagctgctggggttggggggagtacacagacagaggcctagagctgcatttagtctggacagaaatatcctccccccacccacccacccactggctgggaggccaggctgcgggcctgtcccc

SEQ ID NO: 117822 - DNA, 1019 bp, Homo sapiens
ggggatgctgaggtacctgagtgaagaggctgagctgggggccaggggttgggggagggatgggaatgggttggacccagggcaaaggaacccatgggtgttgggtggaaaatcctggaggcttcctaatatcagagggagcagagagagccgactgtagtttcaaggctttctctgtctcccaccccctatgctcacacagcaaggctatatgttagacttgagcagggacttccaggtggcaaatggagcctttgcagggtggcgagaggcttgggatgtgcctttgtggcagggctgtcagggctgtgggagatctaagaagagccgacatgagctggcagggctgagggcgagggaggtaggaggaaaggctgtctagaagtgtaggtaggccttcttcctttgggcagaagaggagatgcaagcctggccagtggggtgctaccctcgttgtaaccttcaggcttctaccacatgtccatccccccatggtcctgcaggctagacggggaatgctttgtatttggggctggggaaactgaggcatgaaggattgcctcagagctcaaaagcaaatggtgagagaaccagggccatgacctgggttacccaacacgcctggcctgacttgtccgtgacgttcacacttatgctggcagatgtggacagtaaaaacaacaacatggctatccttagttgagcacctactgcatgtggacgctacactgaccccttcacataggtcctctccaggacctgacgaggtgggggctgtcagcggctgcatttcactggctaggggttgggctcagcgagggtcagcaacctgtctgaggtcacctaggctggaggctgcagagctaggagaggaatcctgactccaaagccccacttggaccctggcatggcctgagcctgtgtctctgagatgaggggctcccctcgccccattacacacaagatgtgtagtgttcctagttgagccagccccctcccccatgcccagctccttaact

SEQ ID NO: 117823 - DNA, 1023 bp, Homo sapiens
gggcaggtcccttagcttctctaagcctcattttgctcatgcgggaaatggggatgatcacagatgccattcagagagctgcggagaggtgcagggacgcataaccacttgaagtggtgctggctctggcgcaggctgtttcactgcccagtggaggcaggctgggtggaagagcagtgagctgactgagactgtgctgtggctggggcctgaggaccagtgggttttgagaggggagcctggtgcatgtgtcagaggaactgaagaatacaggagatgatatttgtgagaccctgggccctgctccaacggagtcagcccacccagcatttaccctctgacttgtttcttgtgttccctcacctccaggatttccaggggccaggtgggccctgctcagtttagtatgcctcacctcccatagctgttcaggatcaaagggagcatcatgggcaggctgagctgggcactttgcatccctgtcactctgatgtggtctgtagttctgggtttcttcaaggtccaaccccagtcttgggtttaagtgggtcacacccactccctgagcatcctgtgtaggctggttatggggtcagaggagaggcatttcctcctcccacctcacctcctccaagaagccctctgggtactgctccccagcactttgcccattgactgagcactcagggttctctgcacagacttttttaaacctttctctgtgtgtccctacactgggagctctctgaccacggggtccatggtatctcctgtctatcctagtgcccagcactgggttagcactcaatgtgggggcatagggctcttgtgcccctattttacagatgggtcagttaaggccctgcaaggtcacacagcctgttgaggggcagagccagcctggttcaggtgggtgtggggccacttggtaccggctggggtcttctttcaggcctcaggaccattcctaggcttccttaggccctgcagctcctgaccctcctggcactattcctggagggt

SEQ ID NO: 117824 - DNA, 1024 bp, Homo sapiens
tcacagacttgggtcgcacacacatgcctccactttaccctcagggaggtcacagagtcaaagatctcccccagcactgctacatgatccccatatatgctttaatgctgtggtctgtagagggcgacatcttgagactacacactcaaccgggcacattcacagtccactggacacacacacagttgtgcagcacacctcccaggtagacacgcgaaaacacactgtatgcattgctctcgtcaccatacacactccagccccctgagcccgctcccaggtgcccagcatccttgggtagttatgccacccgaggggcttttgtcccccgaaatactgggaagtgagcttgaggcctcagcttgctgagccctgtgtccagggagcctcggagagtgggaaatggtttgacaaggactgcccggcccctgcccaacctcactgtgtacaccactttaggcccaagagcgccaggatggcgtgggatggggcggggggttccaggtgtgtcatgatgggcttggtggctgctggcagaggcagactctggggggtgacctcagctctgtctctgggtccctcctcccacctccagcccctgatttgggtgtgtaaatgttggaggaatggggtgtgggcagactccaggcccccagggtctctagagtggccctggccatcccctctcttcctcctccagctgtggactgctgtgactgcccccgggagaggagctagatggaggcttagcagtggctgggcccccaccccccaggaaactcaaaaccctgggccagccgcgggtggcgggttggggcaggcacaaagagggcctctgtgcggccggctgggctgcccacaggattctgggggaggaggccggagccggtttccgtcccgttctgcttcctgcggaggctgcggaatgcccggagctctggcccagcctgccccgtctggcccacccgcagccccttccccatcttttccagggccttggggtacagctgcagacttctctgca

SEQ ID NO: 117825 - DNA, 1051 bp, Homo sapiens
tccccagactcctccccaccctcctccccaggcctcctccgcagattcctccccatctcctctccagcctcctccccacctcctccccagcctcctccccacctccccccaagccctcctccccaggctcctccccatctcctcctcagtccttctccccagtgtcctccccaccctcgtccccagccctcctccccagactcctccccatctcctccccacctcctcttctcaggccttgggctacacagtgggtctgatctggtctcctcgccacttctcctctacccttccctctgcctccctctcctgtgggcatgcccagctgccttctgggattccctccttagggctgtttccttgtcttttagaccctcaagtccctgagcctggacaaggtgtcctgggtccctgggtctctgaaccctgttaccccagacactgcttcccatgacactgtctccactaaccttgaccctctgccccttcctctccagctccccttttctctgatcctcccctctagttctctgtctcatgattctgtccccaccacctgtctctattctgcccccgcatgcccctctgccccccagctttccatgactcgtcccccctcagccccccgtgctctgtccccgcccgtcagcccctggtcccagctcccggctggccggctcctgcatggacaaaggggtcctttgtgggctgaccgcggctggcggggcggcggggcgctggctccgcattgctgatgaaacggagccctttgttgtccctcctcaggcgcagtatttctttttgggggctggatgtgttcctggcagggccgatgatggatgcgcccgccgccgcccgcctgcccgccagctttccctcccgctcattcccgctccgcttcaacgcagccctgactcctcccctgctgcctgggcactgccaggcccttcctggcctggaaggggatggctgtgtgccctagagtagaagactgggacctgggagaacgtcccctctatgtcctcctcttccatgagtagggcaaatgggg

SEQ ID NO: 117826 - DNA, 1034 bp, Homo sapiens
tgagccactgcacccagctaataagcatctccaacactctcccaccccagcacaagaaggactgcctgcttctggcaggtcttcctagaccctagcagagcagatttgggctgtggaggcctggactagggcctccaccatgccgcttggtggctgtgtgttcatagactggtagttctcctaaatcttgtttccctcatctataaagtagattaccagccactgcttctagagttcttgtgggtcttaactgagatagtacaaataagaaatttctcaccaggatggatctggtgcttaataaatgcctggtcaagcacatggtggtcaggatgacaggaccgttgatagtggcggtggtggcgatgttgaagggggaggtgttcactgctgccctgaccctgtatcctcttgtgacagagtgaagacatttccacctggacacctgaccatgtgcctgccctgagcagcgaggcccaccaggcatctctgttgtgggcagcagggccaggtcctggtctgtggaccctcggcagttggcaggctccctctgcagtggggtctgggcctcggccccaccatgtcgagcctcggcggtggctcccaggatgccggcggcagtagcagcagcagcaccaatggcagcggtggcagtggcagcagtggcccaaaggcaggagcagcagacaagagtgcagtggtggctgccgccgcaccagcctcagtggcagatgacacaccaccccccgagcgtcggaacaagagcggtatcatcagtgagcccctcaacaagagcctgcgccgctcccgcccgctctcccactactcttcttttggcagcagtggtggtagtggcggtggcagcatgatgggcggagagtctgctgacaaggccactgcggctgcagccgctgcctccctgttggccaatgggcatgacctggcggcggccatggcggtggacaaaagcaaccctacctcaaagcacaaaagtggtgctgtggccagcctgctgagcaaggcagagcgggcca

SEQ ID NO: 117827 - DNA, 1050 bp, Homo sapiens
gaggggtggctgctcttcctccatgcctgtccctccgccatgaggccatccatgggggaacgtctttgctccaggcctacccggaccctgactgaactctctccttgtttttgtctcccgcccccgccagaaggtgatgcttccgacgggagccgccttccggtggtttcagtgacggcggcggaacccaaagctgccctctccgtgcaatgtcactgctcgtgtggtctccagcaagggattcgggcgaagacaaacggatgcacccgtctttagaaccaaaaatattctctcacagatttcattcctgtttttatatatatattttttgttgtcgttttaacatctccacgtccctagcataaaaagaaaaagaaaaaaatttaaactgctttttcggaagaacaacaacaaaaaagaggtaaagacgaatctataaagtaccgagacttcctgggcaaagaatggacaatcagtttccttcctgtgtcgatgtcgatgttgtctgtgcaggagatgcagtttttgtgtagagaatgtaaattttctgtaaccttttgaaatctagttactaataagcactactgtaatttagcacagtttaactccaccctcatttaaacttcctttgattctttccgaccatgaaatagtgcatagtttgcctggagaatccactcacgttcataaagagaatgttgatggcgccgtgtagaagccgctctgtatccatccacgcgtgcagagctgccagcagggagctcacagaaggggagggagcaccaggccagctgagctgcacccacagtcccgagactgggatcccccaccccaacagtgattttggaaaaaaaaatgaaagttctgttcgtttatccattgcgatctggggagccccatctcgatatttccaatcctggctacttttcttagagaaaataagtcctttttttctggccttgctaatggcaacagaagaaagggcttctttgcgtggtcccctgctggtgggggtgggtccccagggggccccctgcggcctgggccccc

SEQ ID NO: 117828 - DNA, 1056 bp, Homo sapiens
aaaccccgcaaataatgcagccccagaggcaggccaggctgaccctgaggtcatgtttcacttgacagcctgggcaggcacacgtgaacacaggagacccccaggcgggggcctcggggcctcaagaagtgggtttgctctgaagggagtggcactgggcaacccgcagcagctccgcactgccccgcacccgcactaccgcatccagcagacactgagtcactcttggggacgggggcgaagtcaggacattggcagctaggagcagagaagttctctcagaaggcctccaccctgccttccccactgcgtcggccccgcccacccatgctgggaaaagggccccctggggttgccattcgcaaatcctgcccagtctcctggcccacactcctccccaggcgactcagcatagatgactcaggacttggagtggggctgttaatgggcaaatgtggtggtaggggggcctgagtgtgtggccgaggctggaaagtccctccaccatctgcctgtggcaaattgagggacaggtaggagaattcactctagtggggttctaaccctgccccaattctttcacagtgacacagcctggagacccagctctgtcactcaactctacatagccttcacccagagcctgacagtgtatatgaacaagaggctgtgcctgtgagtacttgcgtgccagcagctggccttgtgacatgcccctgtgggaccttgggctgcagcatcaagtgctagggcaaacaccttgtttgcagaagacccaaggaccccacagccagtgccaggacagctaagagactccaccacctgccaccccccagaacttaccctgctaatgaaccaaacttgctgtgtgactttgagtgcagctcgcacatctctgggcctcaaacttctctgtaaaaccatgccctcctgaatgtaccattcccagtggtggcagctgcagagaaatcacaatagcaggggcagggtccaagaagggcctgagaagctggttcagcctgtggtctgggagccaagtggggcagggacaagatt

SEQ ID NO: 117829 - DNA, 1060 bp, Homo sapiens
cctagaagcgctctcaagctgtcagcggagaaggtcatgggcatgaacggggcaaacaagaccaagggctcctaccatgcctgagctgcaggctaagctgagatggattctgcccctccactccacccccacgccccagtgcaacagaaagcccagttccagcacagacgaaggggggcctgggctctgccacttactaggggtgctctggggtaagtcactgaactttctgagctcgtgtcctcataggtaaaatggcaatcatgtccacttcataggagtgctgtaagggtgaaatgaggtcatgcgtggcaagaactcagcatgagcctggctcacagaacactctcagcagcagtcagctgccacaaccagcgtttgttggtgttctctcccagctaaggagtccgcctggtgccgcgggtgcagtttccaaaaacaccagcaggtggcgccccgaccccaaaagagcccccgtcgctggccttcccagggccgggaggggctgggctgggcggcctgttgaatctcggccagttagacccgcgatctttcccgctgcacggggacccgtgcgtgaactcctctcaattctctgtggtctctggcacaaggaagagggggtctgggtcaccatgggatagttggggagcctgttttccatccgtgttgtgtaacggcacggccttcggagacagcctgggcaaagttgaggaaatacccgggttggagcggataggagactttgagaacgggcgggatcccgacgcgcaggctgatttttgagtgcctgcggctgaactcggggcgccgctgggcctggtgctgcggtaggaggatgacccatatgacctgtattcgcttcctttcagagtgcgggcgagcggggctgcgcttcgcggaagactccgcgcagtgctgggcactgggacgcggggagtctggaaattctgcgtctggccagcagagggaggcggagagcccgccccccccgcgcccccccccgaacccgtgcccaggcctggcccggctcccccagcccgagctccccctgcgggaa

SEQ ID NO: 117830 - DNA, 1023 bp, Homo sapiens
agactggggacaaccctgcccagcgggccccctcggaggaggaggtattcagctgttcctagaggatgcagggactccccggaatgatcactgggggcattgtttttgcataggcccagggggccactgtctcaagcccacccctttgtcttggggccatcttgggggggccaggaagagaacagggagcagaagcagcagtcacaatggaagagggcctaagactcctggcagcctggggataagccaggctgaatttgatggggatcagcgagagggctcaggatttggccagggcaggtgggcagcctgggtttggactttcctgggttccccagttcctttttctagatcctacaaacaagagctgcttaatagtggttgggggtgggggggttcactgggctgggactgcctccaaacccaacccgtggcccagggcagttgcagtcgttctttcattcttccaccctctccccaggactttaggaacctgtctcccagggaagctacaagttctggggcctgggatctccgaatcagtaaaatgtgcctgctgtcctcccagcagcccctttccccaatatatgcgggaagcagggaacaggggcttttgagtggggctactgcaaagtttggtcctggtggaaacatagcaggtccctagggtttggccagagcccccaaaagattcccacgcagtggggtgagtaggtgggtgtggcccagctaaaggaggatgactgggttgtccttggaaggcctccctcactggtgcctcttgcaaggttgaagtctcaatgcttgggtgaattgcaccctgcagcccagggatgcccccagaggcctccccgctgcagcttgtcctggtctgacaactatggggtgcacgctccacaagcagacctgacaaatagtgcctcccagggtcttccctgaagggagagagcaaagatagctggaaggaatgacttcctgctctagacaggactgagagagagagtgtggctggggggtattacc

SEQ ID NO: 117831 - DNA, 1062 bp, Homo sapiens
cttagagggtttggggtgtgtgaaaactgggcagacagaagggaggaggaagcttcttggtttctgtctcttggctgttgaagcagactgtggggagctactcagaggtggagctctctcaggtctgcctctgcccaggtgttgtatccgaggctgggctggttgggaggatttgcacttggtcagtccattgtagctctcaggattcaactctcaacccacaggctcatgttagcctgtgggctccatgagcctgtgggttgaagcagtgtgagtccagtgccctccgaagttggaggaaggtggcccagtggtcagtctggctgtgaactctcttgaccaagacagcttagtcctttgtggttcctgataactgagggttcaccccgtagggaagtcagttgggcatagagtcaccagctgtaaacatgatttgaaatttgacagcagactttgtggatttcattagtgttaagggctcttcaaccagcatgcagatgtacgcaaatgctaagcaaatgagggtgccaattggctggggggttggggagagaagcaagctgggagatgtctaggaatgacctttgtggagcaagctccaagggcccctgagaatcccagcagagcacatgcaggataagatgcaaatgtgcatgcagccccggggacttctgcctgcctgaccatgagaacatgagcccaaggcaagggctggttccctgatggccacactgagagaaggaaagcaggtgggggctggttatcactccaaacaggcattacctgaaagggatgggcatctttaaagagggcgtaggttcttggcccttgccctacacttgtgtgccctgagatggaaagataggagtgagcctggccttgggtgagggtgttgggagggcaggacagtagggacctcagctgccttgggaaagggaggggatgccctctctggcccccctcctggccccacgggagtctttgatttgcctctaccctctagctgggcttctgaagcccctgcctcagaacttgctctgacagctgccaaggacgcatatc

SEQ ID NO: 117832 - DNA, 1039 bp, Homo sapiens
gctcccacctcagagccagatttcctcagtctggacaattcagaagctcagccaggtttgcaaacctcctaggatcctatgccccaggctgatccccacgtaacagagaagagcctgagacttaactagattggaatcactcagggtggcacagcagcaggtcagtgcagaactgactcttgagtcagggtccttttatctaacccttcaatgatgtgggggtctccgtcacagggtcctgaaatcacacattcaaaacaggatcccacttccaagactgtaatttgtccaccagttgaggagctcagacattctacaagtgaacccacttgtctcttcctgtgagttgcagtttgctcttctgggtagtgaaatcaggctcaggcaccatggcccagccctgtaggcttctagggtgttgcggtgtcaagtagagaagtgacctgctatctggagcctcatcctcttcctcttcccactccctcccacagactctgaggctccccacccgggctcccagtacgtggacaggccagctaggcctgtggggcacagcagggacatggggccagtctggggacctcatgcctgcactctgaacaaaaaaaaaaaaattgggcccccaatgagggagctgggcaagctgtctgcaggaaggcttgagagttgagagtgctgaaggcctggcactgatgctgggaggagcaggggggctcctgagacccccacccccacttacctttcctcccagggacatttgccaactgactcttgcgcctctgcctcgccaccaggtactaaccccacagctcatctctaaagagcctgccctgcctgctgtttctaacatctctctctaccctccttggggctcttggggactgggtgtcagggaaggagctcaggaggctgggaggggacactactaacctgctttcacctcgcaggatggctgcccggtgtctgaggagtcctgaccaacgtttctgtctctctctctccccctgtccccacccacctgtctctctccctccacccc

SEQ ID NO: 117833 - DNA, 1034 bp, Homo sapiens
agatgtagagggtgtcctgcgctccttagaggagacggaaacacccccggcacccccacctccacatgtgggctgtacctcctgggcacagtaatgccaagttctctctgcagcagccagggccacacccaggcctcctcccaacttctggggtcgggcagcctggccagaatgggaggaagcatttgcagagccctcccctgctccgaaggctgcctgagggtaccaaagggtctggcagtgagtgtgtgtgtgtgtgtgtgtgtgccgacgtgtttgagagagaaaaaaagttctcagaaagcccattttccagtctggccagagtttgtttgttttgagggtttggaaatggggtagagggaaggaaggggaattaagggagagcaggacccagggcaatgatttccatgaataccagagatatttatgtggctacaggatggtgggagagggggcgggggttggtgctggagatgctaaaaagttgaggaaatgaggaattgaggggtaactggtgactctctcagcacctctgtggtctgaatcctcccatctaggattttattcccttcctttcttcaacttatgaggttggagctttcccttttgcacagtttgcaaaaaaaaaaaaaaaagaagaagaagaaggagaagaaagaaagaaaagtgagccccgaggcccaaggacccagccataattatggagtgcttttatttggggcctgagagcagttccttccagcaccaccaggtggaggtggagcagaacaaaaagcctctggccggccattgattctgcttgaggaccaggggtccgctggcttgcaaggcctgtccccagttacccatcccatcctgcagagcaggctaggcccctgcgtgccccccgacctcctcttctccagggaggacagctgggccccatgaggagtgtggaaccaagtgtccacatggcactggatactgggaggtagaactctgggaggtgctaaaggtgggatccaggggaccatgtaggtagccttggagaa

SEQ ID NO: 117834 - DNA, 1111 bp, Homo sapiens
tcactggggggagcgcaaattggtgcaacctttccaaagggcaatttggcaatgtacaaagctgagaaagattgcataccttctgacgcagcaattccacttttaggaagatcgccttaggaaataattgtgaataataataataatagctaacctttgttaaatgctctctatgtgccaggctctacatgcattgtctcatataatcctcacagccatcatcccaagaggtaagagctattatttatctcctgtattttacagctgtggaagttgaggcgcaaacgaatgaagttaattcttggacacaaatctaacaagtagcaaagtctggattgaaagccagacagcctgagtctagagccatcctcccccatacagcagtatacatggggtgtgtgcaaagataaagctgcaaggatgttcttttggggttgtttgtaatgggaagggggagggggcatgctaaatgttccacacaggaatcagttacataagttatgatacacccatacaggaacattatgcaaccatgaaaaatgatgctgtaagaaaaactgagtgtgtgaatactcgggggtgcgggatttgtatatgcataaaatatttctgaaaggaggtcaaaggaacccataagattgattatctcctagaaagacaactgtgtggttgtggccagaagttagagagagacttgttttttaatccatatacctcttttcacttcttgaattttgaatcatgttaatatctgtcaaaatatatgtttatatatatatattcaatggaatcattgttgaaatatatatatacacaaacaaatacacatataagtcatagaatttgttccacataactttcatttccttgaaatgctaccaagagttccaagaaaaaaggtttcaaggcccccacttagagaacgatactgaagttgatagatacttctttaactatgcttaacccacatgctctccaaacccattttcccatggaaccctcttgtcaagtaatatctgttttcatctctccagatactcctgcttatagaatacactttgggaaatgctattattaatatttaacacccaggcgaaagggttacactgtt

SEQ ID NO: 117835 - DNA, 1061 bp, Homo sapiens
ctggaaagccatttacagcctatttggtaataagctcttaaaaataaaattatgattgtcagataatgattttacagcacaacaagagcccccttgcaaccatttccgtaattacattaagccggtttgtctgaaagaagcttaatgggaaacaaaccattaattataatttggtcttttctcccacagccccttcccccttgaattactggagccacaccctggggccatgtatgggagtgcagggatcgcaaccttgaggatgggaaagatgaggtgacaaaggccaaggctcactgggagggaagaatagagagcaatggaaggtacaaggttgtggtggcccctgtaaccagctggggggcctacaatggcccccacctaagtggagccagtggtgctgtgtgtccacttctttagacctggagtgaaggaactgggagctgtagggcaagctgagcccaacatgggcatgttttcaggggcctcagagctagtgggtggggcgggcacctgggcaaacagaactaagaaacgggcaggaatgaatcaaagacagcttaaatatgcagaaatgcagctcatacctctgggcaaaaataatcccaaacagagttatgtaatgggcaggtggtatatgataggaggaatgaggctatgaggtatgtatacaggcatgagtgaatgagagaggttgagaatggagtgggagtgtcctggggaatttggcagaggagcttatgaagctgttgcttggaggtgggtgtgcatgtgtgtatatacacatactgggaaccctggaaagcagcgagaggaaggtagctctgaacgaggctgagttccacgcctggggtggccttaaggccactccagatgtgtgcactcctaattcttgaggtggtagggacagagaaagacctgagggcacaggtgtggggtttggagcaccactgtttcccttataagttagtgtacctccttctgaccgccatactcccactcctagcttgctcgcatcccacctccagacctttctgctaattggaatcttccccttcctt

SEQ ID NO: 117836 - DNA, 1075 bp, Homo sapiens
tcactgggcttgcatggaagtcctgctctgtgcagtccatggtctgccctcaaaagagcacccaatagatatctacttactgatatcccacctcactgataaaagagacgtgggaagacactgggttctaatctcctgaggagacaagtctggcagccatgagagagttaacaacagtccaaggcacatgttaagggcagagtgagcaccacagcccctcccatgattacccactgcctacaggactgggccccagtgtcctagcccagtttatgtagcctttcaccttctggctgctgccaaacctctctagcctcagctttcactattcctccccacagtccattcttaaccttcctgagctcattgtagtttccatatgcatcaccctccctctcccctctgggcctctgccgctgctgctcctcctctctgcaacacctctccctccctccactctgctaactcctatttggctttcaggtccccacttgtccgtcacctcctctgagaagccctcctgtccctcaatactgaccctgcccctgttccttgatggcgttgaagtgtacgtaccctaagctcagcacttgcacaccctgtaactgccttttactgtttgactttctcaagactgtaagctcttcaagggccggggataaccctctcattctccattttctccatgctgtctagcatgatacctagcatagcagaggatgcctgacaaatattgtttaaacatacatgaattgagttggcaaatgcaagaagaagggtgatgacaatcgtgagtgggcaggtcagggacacagtgccctacagagaaggtagaacttggggtcagactggaaggatcatgaatagaacaataataacaacaccaatagctaatgtttactgtgtgccaggctctgttccaagcattttctaatttatccttacaaaaaccctacgatgtaggcattattactctcccaatttcacaggtgagtggaatgtaaaaggggaataacaatgatttgatagagacaaaaaggcattttaggttaagaaaagtgcatgagcaaagaga

SEQ ID NO: 117837 - DNA, 1048 bp, Homo sapiens
ccttgggaggctggggggcatttgcatggggctgcctcggcccccacattatactgggattgaggctggatgagtttgcatgtccccaagctaatgccaagtcaggacagtggctattgcagacgattcctgaaactggattgagctgccaaggagagacctcttcctttaggagcctgaggatggcctgatagcagctgcttttgctttgccagccctgctttcacctccagctctcagcagggagcagggggccaaccacaatctagagactgagctggtgacacatagtgggaatggccctgttctctggtcagcctcccatgagaagttccccaggaggagggagggacctgcagcatctgaccagatgtggaggtcacagaaggagtccagccccatgctgatcagcccctacggggttgctgtcgctgggatggtgggagagggagggcctggccttgaagaatgttttattcttctggctgcagcagccaaagaccatggctcccacatgtttctaaacaagcttgattgtcctctagagtgatgtgtcacatgcagggctggagcctgagtcctggcaggaggggaggaggggggcagggatgggggtgaggggcactgaaattctcagagagacaggacagtagaggctcaagtcagggagagaaggccctgccgaaacctagatcatggcagatgcacttatgtgcagtagcagggcaggcaagggcaccggctggggctcccccttctcctcagaccacagacccaatcaaccctcccgaaacccccactaccaaggcaagaaccgtaaacagcctgagtcagagctgggcggcagcgtacaagcgtgttggttctgtcattagctgtaatagcagcatctcacctggctgcctatgcctttcatccaagcctctcaaagaacttgacagacagcaaagggttctattatcttcatattactagtggagaaatgaaggccccaacgagcctggcagcttcttcagagttcatggaggagctggcaggaggctgggaa

SEQ ID NO: 117838 - DNA, 1029 bp, Homo sapiens
ggttgactctaaatagctttcttgaatcccatgatccctggccccagcaccggccattgcctcctcttcctttccagccactcccgttgaccctatccccgtgggctatgcagtgtggagactcctcacatgtgattcccacatgactggcatctcaggtctcctgcaatcccctgggtgttatatctcggagcaaggggcaaataagttctattgatgtggagccactgggggaggctgggggcctgcatgacccctgtttcctcccaggcctttttttgagcagttcctgtaagctccttcccatccattagagataggagaagcctcactagccttctgcatgagcaggtatgctctgagcttgcttttctgtgcacttagggaagcttctaaatcacaagcttagattcttttacctttctgtttgtagcccatcagcagctcaccacacagtttcccaggccctccaggtcctcctgcttgcatttccaactctctctctcagcctctcctcatcacccctgaccatgccaaacttcccttttctccttttttaagtcgcatatgctctcatttctaaactcttgcatatactaacctctttttgtgaaatcttcttttcttccctctttcctcctccagtctttgctgctagttcacaccacccctaagagctcatcttagaatgtccctcctctgggaaagcttcccagctcccaagagtagggtgggtcctctgatcttacctctgatggtgcttgtcagactgaattgtagtcatttgtttcttaatatcccttccttaccaaagtcatacctccgtaagggaaggggccagtggttttgtttatttgtttcgtggagggatcctcacattccagtgcagtacctgtcgcgtaagtgctcagattagacttgtacaatgtggtatgaatgcatgggtgggagagctggtgggccttccttgaagaacttcctgccatctctgatctggattctctgggtgtttaggtgcatcactcctgt

SEQ ID NO: 117839 - DNA, 1041 bp, Homo sapiens
tgtatcaggaatgcaggtatgacttagctgggtgcttctggttcaaagtctctcatgccattgcagtcaagctgtcctccaggactgcggtcatcttaaggctcagccagcgttgcaggatcagctttgaagctcactcatgtgtcgttggcaggatttggaagatctgcttccaagcacactcacatgaggctctccacagggctcccttataacatgacagctagcttcccagggacaagcaatccaaaatggaagccagtctttttatgccctaatctgcaacatgacatcccatcattccccacattctatgtgttagcagcacatcaataagtccaacccacactcaagggagaagattacacaagaacgagaatcccaggagatggagattttcgggaggctgacctagaggctgccgaccacgtctctcattttggcctcatagcaactctgtgctctagccagggagaaatcgtctgcaggtaaggaggaaaaggaaaaggagctctagggaggtgaggggctctactcgtgatcaaagagttgtgaagtggtagatttagaatttgaacgtaggcgtccatctgacttcagacttagtagtctttctctttttttttaaattatactttaagttttagggtacatgtgcacaatgtgcaggtttgttacatatgtatatgtgccatgttggtgtgctgcacctattaactcttcatttaacattaggtatatctcctaatactatccctcccccctccccccaccccacaacaggccccggtgtgtgatgctcccttcctgtgtccttgtattctcattgttcaattcccacctatgagtgagaacacgcggtgtttggtttttttgtccttgtgatagtttgctgagaatgatggtttccagcttcatccatgtccctacaaaggacatgaactcatcattttttatggctgcatagtattccatggtgtatatgtgccacattttcttaatccagtctatcattgatggacatttgggttggttccaagt

SEQ ID NO: 117840 - DNA, 1054 bp, Homo sapiens
ggttatgagacaagagtgatagaattcatcttcttgcgttagtgatggggggcagggtctctgttccctgaaaagcttattcagatgacctatttggtctagactctgtctgtctcagcaatagctgtcatctgaatgtcactttagaaggtttgggtgcttccttttccttctctttcagcagtactatattacaattcgaatgctaattagtatgttttaaaagtaccccttttatcacacatttcccaaatctaaaaccttttatctctcctcattgcctctaggctgaagttcagactcctcagcctggcctccaaggcctttcacattttgacccaacctcccttcacaacctccttccatctcctcatcttcttaaaacccttgtagttcatcagagccaatccatcctttcattggccccaaatacatttacaggctggcttctgcatacccctctctgaatcaccctccttccttttgtggaacccaattctactcttctttcctaggccagctcagtccttcctcttgaagtctacccagacctcttgagtgcacagtgatttctcttgagctcaactcttttagcactatcttctatacaagtctataccacttcatttggcattaaaaaaagtgatagtgaagaacacaacacaaaatttgccatcttaactatttctaagtatacaattcagtagtattatgtgtttatattgttgtgtaacagatcttcagaacttttttatcttgtaaaactgaaactctatacccgttaaacaacaactccctatttcactttagttggcattttatccagaaccatgctgtgatatcacatatgctgaactgtttaattccactagccttcactaagcaccagtgttccaggtaagccactggtagattctagaggaatacaaagctgaataagacacagctaccaaatgtgaagagtttgcaattgttctcaaataagagtttgctcttgtattcatgtgtctcatgtccctaaatagatgaaatgagaacaaacttcttatgagcc

SEQ ID NO: 117841 - DNA, 1052 bp, Homo sapiens
atgtcctccaagatattttttaaactataaagggtaagatagtaactttacagtggagaaattcagcagatcaacaaggttattgtcaccagtaagatgccctcggaaagacacagcatcatttctgaattaatctcaccaaaaaggcataagttcacttcaataatgagaaaatattagacaaactcaagctgaggtacagtacattctccaaaataactaatcaacactcttcaaaagtgtcaagatcatggaaggcagggaaagactgaaaaattattacaaattagaagagacaaaggaggaataatgactatatgcaacgtgggatcctaggtaggctcatggaacagaaaggacacaaatagaaaacttgtgaaattcaaataaggcttatagtttagttaatagtattgtaccagtgttaattcctagctttgatcattgtactatggttatgtaaggtgataatattagggaaattgggtgaggtttgtacagaaactctctgtactattttttgcaacttttctgtgaatctaaaattaattccaaaaaatgtttaaaaagaaagattaagtctttaaatctaccattgattaaacaccattctgtaacttaacatctttcccttggttttacctgtaaaacaaaatgaacctgacatcttctcaggggatgtagaattgggtggattcccccacctcccctaaaaaatgtctattaggtcttgaactccctggggccaaaagcgaggatttgaaagggaaagccccaaagcttgaagtatctgtcttcccatatataagaactcctcctgtgaacatcaaaggacctgataataggtctgacattgccattaatgacacctatcagttcaccagagacctctactctcagttccactgccagagaaaggtggtcacggactagaagctggtgcttccccatactctcacgcctcagcagcgtggcaaaaccaacactgatcctcctccccagcactatgaacatagactggtcatgcttctactcacagcactatgcttctg

SEQ ID NO: 117842 - DNA, 1096 bp, Homo sapiens
ttgtcaggcacattaagggctcatctttggctcatggatatgaatttaaagtgagaccagtctaggtgattgtgtgcatttctccagctacattcaattgcatgggcacaggtactgggttggatttgactagaattgtggttttgccaaatgaagaaatagaattattataaaaattgatcatgaatgaatggaagaaagaaagagaagggaagaaagaacatcatattcactgtgagaatcagtaaaaaggtggtagtatcaatgaatttaaatcctgttaagatagaagaattgctggagtccaaacagtagagggtgtaagctggaaggtaggagttggtaggtggagagtaggatgcatgcatttgatatcatggaagggttgcatttcttggtaataacaaggtgatgggtagagatgactctcaagtatgaatgagcatgagagtcagtgggtagaatgaggtggagcacaagacgactagagaagaagagttcaaggaactgagaagccagggtattggaatgaccacttatgagtacaatgaaatttctgaaagttaagacaggattactttgtgtatatagtgaatgacagatgtgtgccctgccctcaaagagcttacaatccagcccagaagataagcaagtcagaagcatttggcatgatggcataattgctgtgattggaaaagtacaaggtaagggggagcacaagtgaaggatacctaaaccccgccttgggattgaagaatctttctggaggaaagagatttgagttgggattttgaagaacaagtcaaagttaatgaggtaaaaagacagggaaaagtactttagaaagggggaacggtatgtgcaaagggataaagatgagactggggcacactgaagtaactgaaaggagattcattgccccaggtgccatgggcagtggtgcaagagaagtttgggaaggtgagctgaattggatcatcatgtagggccttgggggctgtattaagtagtatgaattcatcccatgtgcaatgggagaggtatagatggactaggggagaagaaagtattaagaaatgtttaatagattaatgat

SEQ ID NO: 117843 - DNA, 1039 bp, Homo sapiens
cctggaaactctacctgtgcagtcagatgctgaagccttggttaaagcctgcagggaagccctccctgagtgaggcatcccttcctccattgtgtttactggaccacttctttctagtaattgagaattatatcctgaaagatccagaaatggaaagctccaggctgggagtggccatgcaggaaacaggatacttagacgtggaccctagaatgctggtaccgcacagatccagtcctacctcattcattttcaggtttttttcttttaattaaccaacacttatggaatctccgttaatgtcttgggtactggggacacaaagatgaatatgtcacatccctgcccatgggacactcacagtctagtgataaatagaccatttatttctccattcattcatatataagatattttgtaggcatctatcatgtgctaggcattacattgggcttatccattcattgagtaatatttgagttcctcctatatattaaaacttcttccaggtgcttggaatattgagaagacagaaatctctgccctcatggaatttactttctggtagtaagcgaccaataatatacataataaataagcaaattagataatatttagaaagttataaatattataagaaaaaaaaatggagggaggtaatgggagtgcagaggggtggattgcaattttaaatagagtggttatggtagacctaaattacaacgtgacattagagcagagaactggaaggaggtaagggagctaggcaggtagatatcatggtgaaaggaatttcaggcagagggagttctccctaaggtggaagcatgcctggcatgtttggggaacagcaaaaaggcccatatggctacagtagaatgagcggagtttagagcagcagtggtgccagatcaaatagggccttgtgggcctttgtgaagacttggccttttatttcagtgtaaaaaggatctgctggagggtttgagcagaggagtaatataattttacttatttgaaagggatcacaaagtgtgct

SEQ ID NO: 117844 - DNA, 1064 bp, Homo sapiens
ttactactgcaaagtctccccaatccaattcttttcattcatgatgctctagttggaacttttattttctttctttcttttcttttcttttcttttttttctggagaagagatcttactgtgttgcctaggctggagtacggtggctgttcacaggtgtgataatagcatactacagcttggacctcgtgggcttgagcaatcctcccacctcagcctcccaagtagctgggcctgcagtcatgtgccactgtgcctggcttctagttggatacttacatctcacctagcctgccttagcggctgtaaatggaattccctagtttcagactctctgttctcttctattatctattgctagaattcactttctaaaacagagtaattatctcttcccaaccccaaaatcttcaatagcttcctatttcctgtggcataaagagcaacttcttcacagggcatgcaagaccttccacaatttggcccctacctatctgtgatccttcagtccactctttcacacttactctttgccatagctaaaatgatctacttgacaatttcaaacaaattttacatttgtatcctttagtgcttttgctcattctgtttccttggcttagtatgcctttccatttcctcttctcagtcagtttcttgcctcctcttccttctgggcttagctgagattccacttctcctcaaagctttttctgatcccctcagtcggaatgaatcatggcctcctgtgtttctgtagcagttcattgctcttctgtaaacataaaggcctagtctatcacttggcatagtcggatgggggaggagggcaagtgtgtgtgcggtcctccagactgtgagcttcctgagtgcaagatggagctgcagcaaaagatgtatcttctttatctttttgtgccttatgtaagttaaccagcaactgctgggtgacttgaagagaatgaccttaggattttatcttggaattaaaactggccattgggaataagcatctggctcatggaaggaaactgaccttaggtatgtatatattggtagaaatat

SEQ ID NO: 117845 - DNA, 1028 bp, Homo sapiens
ttgggggttcttcctttaaatatttgttgtttattattacccctcaggtccttggctggccatcaatcccctgacctcaagaagtagtgtttattttttcttattcttaaagtcctagtatttgtggcctatattatgtatataacacttatcatttaatgccacacattgctaattatcttttgatgggccagtatcttatctcgtttacctggtggtaagatctttaggggcagtaatttaaaatatggtgaagttaatatttgattgctggtattgccaagtaaaaagggagcagtgggagcatttgctttctctactgcccacttttttcctagacacatttcaagattcatcaaatgacagcccaggctaagggacaaccatggaaagtacctttggacattttgatgagggcggaattttgcttcttggtcatgtttcagttctattttttttttctctcaatagtccatagtttctttattttcttgcaagtaattgtcctcttttattgagttttagaatgatttctaggtacttttcctcatgtatgtcaatattttggcttgtgttctttttctgtgttttggttagttggcattctgcaaaatttaccagtttcacttgccacctgagctttttggatattccttattctggtctctcactggaatgcctagctacactcttaatctggcctgttcatgcttcaggctgaataccttcagaggtaagaggtatgaccaggttccttttctgtagtaagctgagatcacgaattaggagtagcacctttttgcctagtagacaatttgggggcttctggaggccagtgctggtcctttgatcactggtttttgttttgaaagggggtggtgggagctcaatcctttctcctaatgtttctcctttggcatgttcattcttacaccattcccttgaaatgaggcattttctgccatgtctgcttggctgaagtattgggtagggtgtgggcttctcctccagctccaagttcccaagga

SEQ ID NO: 117846 - DNA, 1113 bp, Homo sapiens
ggctgcagactgcagtgagagagtacaagcactcaatacctatctggaaataagccctaggttatacgtcaggtctagtaaaagagaaatcaggtatctctgagctcctctactcctgagcccctaataccagagaagatcctttttagctatcaccgtccaaagactcactggttaattaatggtcagcaacttagctgtctgcataaaaaccagcgaccacttaatatgttacttttgggagtgggatctctccttgacacaagtttctgggaagagtaaaaggggcaagcgaacctgctttaatgaatcccgtaaggaactgcgtttcccaggaaattcctgacatttttagctcatgaatttccgaaagcctgcttggttttctcctccattctgggtccttccagaaaggaagaagagtgggctagggtctgaatgctcacagggcctggttcatccgcagagctggccagcaactcaggctgggctcagccctgagcagggtgccccccttccccaaatctcagaaggaggagggggaggcgggcgggcaggcagtcagtcgtggtcccaagggggactggctgcaggtttttgggtgagtgtggagtttctttttgattgttgcatgtggggaagggcagagtcgacgggaacagtcactgcgggcaccctagccctggtgcgtctactgtcctctgctcggctccccccatcggtgagtgcgcccgcccgcccgactgtgcggggctgcggttggggggaggggggagcgggatcatctgaggccagagccactgccgtgtgtgcggggagggggagcggcgggagagagaggggagggacaggctaggtgtctgctgctccacgccactgctgccggcgccccgacctcatccccagcagccccctctgcagctaagggttaccaccgcaccacctctcttctttgcctgcctcagcggccaaggctctgcggtaggagacaacccagccgggtggcgggtgggcctgtctaggtttgggtttgggtcttgctgaggcccgcatgagagggggtggccgtgactcggtgtcccctctttgcagggggctctgctgcgccgcgca

SEQ ID NO: 117847 - DNA, 5301 bp, Homo sapiens
cggcgggcgggtgggcgcgtacagtagggcgccctgctactgtactggggagtcagtgccctgttaccgggtctcgtctgtctcgtctctcccgcagatctcgcgagagtggctgactggctgtgggggttgcggcggcagcaggcggagccggggagggaaagcagcggcggctgaggcgactgaggcggcgggcggagcggcaggcggcggcggcgcggcagcggagcgcagcatcatggcggaccgagacagcggcagcgagcagggtggtgcggcgctgggttcgggcggctccctggggcaccccggctcgggctcaggctccggcgggggcggtggtggcggcgggggcggcggcggcagtggcggcggcggcggcggggccccaggggggctgcagcacgagacgcaggagctggcctccaagcgggtggacatccagaacaagcgcttctacctggacgtgaagcagaacgccaagggccgcttcctgaagatcgccgaggtgggcgcgggcggcaacaagagccgccttactctctccatgtcagtggccgtggagttccgcgactacctgggcgacttcatcgagcactacgcgcagctgggccccagccagccgccggacctggcccaggcgcaggacgagccgcgccgggcgctcaaaagcgagttcctggtgcgcgagaaccgcaagtactacatggatctcaaggagaaccagcgcggccgcttcctgcgcatccgccagacggtcaaccgggggcctggcctgggctccacgcagggccagaccattgcgctgcccgcgcaggggctcatcgagttccgtgacgctctggccaagctcatcgacgactacggagtggaggaggagccggccgagctgcccgagggcacctccttgactgtggacaacaagcgcttcttcttcgatgtgggctccaacaagtacggcgtgtttatgcgagtgagcgaggtgaagcccacctatcgcaactccatcaccgtgccctacaaggtgtgggccaagttcggacacaccttctgcaagtactcggaggagatgaagaagattcaagagaagcagagggagaagcgggctgcctgtgagcagcttcaccagcagcaacagcagcagcaggaggagaccgccgctgccaccctgctactgcagggtgaggaagaaggggaagaagattgatcaaactgaatgaaacccccacacacacacacatgcatacacacacacacacagccacacacacagaaaatatactgtaaagaaagagagaaaataaaaagttaaaaagttaaaaaaaaaaaaaaacctgttaactccaagggagcaccacccacagaacctccaccaactgacagtttctcttcttgacttgccacccatcgctggatgttgtccactttatccaccatataaaacagtaagcagctgctaaaaacaaaaaaaatacaaaaagtaataacattatatgaactgtgtttcctacttgattaaaaaatataaagaactgagtgtttatttccctaattaaccaagaacttttgtacacgtttaagctattattattaaaaagtgtttgcaaaatggtcaagattataatattgctgaattatataaaagtccttttcatgttgagctaacatttgactttagcacaaaaaagagatattttagaacacgtaaaataatatttttagtttttctcattttgttaccaaatttcaaaccttacatggaggttattatagtatatttgacaccctatatacctgtgattagagatgtgtatatatatgagggctaggcatgctgtgtgtctgagctttgtctaaatgttatgcagaagtttgtagagttaaaggtacgtaggtttaattcatgcaaggtaaacaataagtgctctcttttatacaatatgcattgcatctggaccttaaacttataaaaatggtcagtgaaacttctgtgaacatgaagaaattattaaaaaaggcatttaaatgaaatttgctaagttgtgatttttatggttggaaccaaagttattcaaatagtaaaaggaaaaagaaagaaaaaggagatctcccataatatttttctgcatctgtttgctttgactgagtaggcgttttgtcattattgtgtatatgagatgtacttgtatcgttcataatatattttttttattatgtgtagaaagattttaaaaaactaacgtgcagcaatttccagtgaacctgtacttggacatcaggtagtgagtctatttgtggtcactagcactgtctcctaaacttgtaagaggtctgaagctattctttgatttttgctagtgctattaacttatgtagacctgttaaaaagcagagcaacacaattatagttatcctactgagccatggattctgagttttgttttaaaagtgaaagccaagttggtgtatgtaaaggatttccatgtagctgtggtgctagttattactggctacattatatgctaagtgtatttgtgttccccaagtgtacaagccttctatcaaaagtatgttctataactcatatattcaaggtgtagggtatgaaaatgcaaagtttaggagagcactttaccaagctggtgtcctccaaactgaaattgtttgtaacgatagtcttttacaggttttcctttaaagatgtttgtgtgcttttaattgacaactaacttcttgctgctgtatagtaaaatattaatatatttttatcattaaactgctgcatgactatcatctttgagtgaagagaaaatgttataaaaaagatgccttaaacagtacattttggtttggaattctgtagaaagtattttggtaaaaaaaaaaaaaaaaaaaaagggtcttgtctgacagagagttctggggatggaattgtttcttggcaaatccagccatatagatctaactgctgtatgtataagacaccacctgtaggagcgggaaggtatcagtgcttcttatattgtaaagcattggcctaggaaggcaaacagttgtctttttgaaggatttttttctgctggtcctttgggttttgatttgatatttttatgctccctggttgagtgtgttgtcttcgtttttgagatctactgtatgtgttgaataacaagctattttcattgtactgtgcattttcccattaaattgtttgcttttaatattcaatgttaaatatgaggtgaccgtacagtagttaggagtttctttacttacaaaatcactggaaatgattaaattgcttttccccctccccagaggtgcatttttcttatttccatatagtaaagttgagcttttacagtgcataatgtgacatttggaatgcttatcaactgcatgtaaacattaataacctgcacttttttgtcttaaggtttgttgagctgttttgttcactgtactttaactgtgatatggaaaagactgcattctctgtgctgttactaattaggaaagagaattgctttgattttgtctcttgtttactatagcttcttaaagttaagccttgtactacaggttgttggagtactcctagatcactgtttcatagtagccagcaataagtagtgcaagtcaacaaaaacacagcaaacttaggcaaagtgtcctttctttgagatgcgagttctttcatgaggttttctttagggccagagttacctaaagtgaagcctttcttatctatagacttcagattctgcttggaatcccaccggctcaagaagcacatgtattgtgcaattaattgtctttacactaaaacagtttaatacaatctaactacgattttgaaaccagtgtctgatttatggtcagtgggtttaaaaagaaatccacatgcagatcttttaagacttaaaaagtgatcatagaaaagactaagtgactgtaaagatgctctttttttaagcatctcactttacctccccaagcaccctcccaaaccttgtcttccctcttctgttgcatcctttccctacccttccctcccaggtgctcggtactttacctagtttctatatatcagtgttttatgttggaatttttccttgtttttattttactagttggtaaaccctgtttatgctgaaacaaataaggaaatggtatatttgaccatatgtgttattcatagaagacagtatgatcaaatgtgccaaaaacaagcaaacaaaacttaattcctgagaagtatgccttatttttattgatctgctttgtcttacaattaaggtccaagagcttggttaaactgtattatttgcctaagtataaaagaaaacttgaactgcattgcaatattgacgttctttaaaatgagagacactgtcaagtaatttaatccagagatcagccaccagatttgaaatgcttatgtatgtgtgtgtgtttggagttgtttttttcttttaaatcaccaaattttttttaagctactttttatttgtgcctcctatttatcatgctgatgttagaagcagcagtcatccagccacagagggagctaaagttaactaaccagaactgtagaaatcattatacatgcctttgacaacaaaggaagttcataagaaaagccatgtcggcttttcctctactagatacagattggaggtagatgaatatttgccaaatggaaaaaaagacaatgctagtcagaaaagacaaactgttttccagcttctcaaaaagccatggagagtagaaaccaaaaccaacagggaaataaaaaaccttgaaagtctcactttctagttgtcccatgcaggggttgaaatttgattccaagcggaaagtatattatgttttttcaggccttcacatctagagagatggataacttccaatttgatttttcaggtaatagagaaagctgctagtaattttaacccctgcctaaagaagacatatacttcatttgggagcaaatacttattgccttgaaaagtagcactgtaatagcctatgataattagttgtagaataacctttatccctttcaaactatgcaaattattaaataagtgtaaattaggattcaattaaagatagttgattatattgcaatcagatggcattcacaaacttaactggagcatatacaaatatattagtctaagttttgtatgctaacagaaagatataatttagctacctattctaaaaatggtgaatattattaatattgtataataggagtgggaagactgcctccttttttgaagagagagatta

SEQ ID NO: 117848 - DNA, 1058 bp, Homo sapiens
agcactttatatcattttttaagtcagttaagatttgatatattttaaaagatactatgtcaacttttttcttcctattttcttatgtaacttgacgtttggggggattatctcattcatttttgtttgtgtgcttttaacattttgtgttttggccctgttcaaactttctaaacacatttttcttttatgacattttgggttatctgctagacctggtgaccccaccatatgggcatgattatttttatcttccacacatggttcaccttcttgtctacaatattcccactcattttttcaggttatatatacacacacatttccagataattttagaatggggctatctgaaattgatggtctagtagctttcatagctccacaattcattttattttacatgtgaacataattttaagattttcttcaccataaaaagtgagataccaagtctaatgacttttttccctttttaaaatcttttgagtatcagaatgagaccttgctatctatgtaaaaggatgctaaaacaagggcatctgtagcaacttaggtttggaatagttggtgatgactctgagtataacatttatagtttattatccctaaatttgaatatcttcataatttggagagagatgtatacacacacatacacatatatatgtatatatacattgtgtgtgtgtatatgtatatagatacacacatctccttgagagtggaataagtaggagagataatttattggaattgcttacatagataaattcaccaaagttatttgtgtagatttgttaaagtgtatcaatttttaaatcacaatatttctgttttcttcattgcatattaaccaaattttggccattcataagtatgctataaaactaaagtgatcactgctattcacgaattattatagaatcttctttgcagattttgtgatatattaagaaaagctgattttaatattaatatttaagaagttatttgatcctgaaaacctaaatttaaggtataggccatttgacacgtcctttttgaacagaaatttc

SEQ ID NO: 117849 - DNA, 1809 bp, Homo sapiens
atgaaataagaaataatgattggtttcaagccaatgaatctgctaagctaactaccaagttttgatgttgaatggtccaggcaatttatgtctttaggaaagctgagtgtggcaaaggtcacttgttaacatttttcttaacaagaatgtcataactactcattcatttttattttgtccccacgtttggtatttgttttgttttgtgtttttccttcctgatgtcctttgcttttgtggaagattgtcctgttgataggcagaaacatggtggtgatcctctatgtaaaatatagttgcttcttacacatcagaagtatttcactcattttggaatcacaggattttcatgttttcataaatacacacattgttttgataattattagcaattagcttattttgtagcattagatggaaaaatgtttaagctaaagagtttaattttcttgattttggttccactttaataattcaagaggcctccaagttcaaggaccaagtccttctattttagaattgtgaaaaacatggaaatactcttgttagtgtgtgttttggtctaaggtagattattaacacagaaggatcctaggaggatttaagaaaatatgtccttatcgtgaagtggcagttaaagttatgggacaggtgaattacctattcatcttgactagctcaaacaatgatagccatcagctaatgacttatcagacacatgttgagtttgggtcaaactcccattcagctggagtggattggcaattttaaatgcaggtagttggtggtggtacttgacctacctccttaccatgtacatctggcatcttctctctcctatcctttttctttgtttctctctccacttttactcttgctgtaggcctaccagtggcactcaagcttacttcttcagagagaagtaaagaaatttctgactcctgccttagaacatagctaactgatgatccagaacaatttcagtattatgaggtaactgggcagtttttttctgattgctattttccccatagtcttaagctggcagtttgaaggtatctaaattaatgttaagaaacttgtgaactgaagagagtaagaagtatgtgtattttaggtaagttactgggaactgagacttactggtttggaaattggagagtaggacgaggagagctgtttaatgtgtttgtggatgggggtttgagaggtatatagagaatggtttggaaataaagtgagaggaatttttactagaggtaggaaaaggtactatgatggagtccgaatgagagttatttgctaaggaaatgaagttgatcttcactaaggaagtttcaataaagccagagaaaatgggtccctcattgattatgagaaagctgttagttactatagctagagttatgataatgatcatgcattatacaagtctgttttcatgtataggatgtctgcttttctgggacaaattagcacaattgtggaatgacagcttttctggtcaaggcaagtggatgctggggagttattattttgaggaaaagaaaatttcaagcttttcaccattattctttttaaactatcagaaatatttatcacacatactatctattttcttgggctcttgttacaatgtagtttacctttacttttcaaatggtccttagatcaaattatttgattttgtactccacaaagacacatattattccttgcttttatagaattttgagactttggcccacacaaatttcttagaagacaataaaccaggtaaaaacactaacttgcaattttaggtgtctt

SEQ ID NO: 117850 - DNA, 2890 bp, Homo sapiens
gataggagtctagctgggtacatgcttaaaaagctggaagtgaagtgggtggcaagtggcagctccctctttcatgtagttttccataatgttcatatagtttccttatggtctaagtgttacaactggttttcaagttgttatattgaatattcctttttggaattcagggttgaatcactttgagggggaagggaagcaagggcaagagactttattttaaccagatgcggtcttatgacctcaaagatgtgctctagaaagaaaataacaaaaagtgtacctgtgaacatattttttgtcttggtgatattatgcaacacagtgttcagaattgcaaaaaaatttaaaaattgatagttttatcaatggaacagagagatgtgtttttggctaaaattattttttgtaagttatttggttatttcattttatattccctttcccatagctttgtacacacctcatacttaaaaccaagtgagaggcctcttttcagatctggtttatttttggaatgcctgagtgtgtttccagattggggggggagaggtggtgttttactttttgacatgctcttagcatgttttgctagtcattctggatcttatgtttgcaaattctgttgaacattcagtgatgtatttgaaatgagaaagtcctttataacatagtgtgaatgtttgtggccaattcaattgtggaatcttatggctttgtttttactttgggtagaagtttaacttccattgttcagattttaggtttatctagtgaaattgtgccaggtagttgtctaaatatggaccaattttgggaaatgaagattaataagtgtatatttgattctagataatcctttactcaaaatcataagttaaagattcacatcattaagagttatctaacttttatgttgtcaaatctttaaatgtggatgatattcagcattctatctatgaatttcctttaggaaaagagaaaaattcagtctccaaaccttttcttggagacaaaatttaccacatatcgaaaatgaaaaaaatttagaaagcgatttgattattttttaatggagtttaaccagcttaattaatgatttttccagtttgaagcacttattttcccaatgtgaataaagggaaaagatcagcaatttgtccctggcctttttcgaggccatttttagttttctgcccccatttcccagtcctggtataaaatgaattacgggtatccctctaagtccctataaccctttttgggggtcacagatatctttgataatctgatgacagtgtgatggatcctctacccaagaaaaaaaaaatgcccatccctggataattttgcatacaacttcaggggcatcacacatcttctgaaacccaagttaaagatctctgctctaagtaaattgtagagaattttagtgcaaatcgttgataaaattaggaaccaactattggcttaaaacctttcatattggaattattgttagatggtggcccctactagcaaaatgtgacattgcaaccagcttcgttagacattataacaaccagagagaagggaaaaaagcaaagttctgaaagctatttataaggagtcagggcatctctagacatgggagccttcctggttcaaggcaggggtcagggtgcctgacaatttctagcagggtagagtttgataaaccacaatgctcaggatgccaaggggttagccattatcttaaccccttcctcaccaaaagattttagttttgtctgttgggaaacaagatgtcactagggaaaaaaagatttgccttacaactttgctggaacacatcagtttggtgacgttgggacactagtgttatttttgagaaggcgcataaaaccaaagtaaattattctctatgtagaacatttatttactagtaacatttgtttgcgtgtattcgctttgacaatttttaccagtaaatattggttttatttaaaactgggaatccagttgatatataggatagttgatacatctgttctttcccccatgtaaagcatagttaaaagatttatgcatactttttacttttctctcttaatgccatggggtggggagggtgggtgggggaaagatttttgagtctacaactgacaaaatgtcttcttcaaattaaaaaaaattgagaagcagcactttaagtctaactctacaccattttattgcatgtattagttttattaatgatttttggtgcatgcctttgggcttattcaaaagtgtacaataggaaagtatatttcctttcttagaaaggagatgttttctactttgcaacatgtgattacaaaaatcttcctctgtgggaagattaaccatgtattgaactactgaaaagtatatatttttagatatacagaaggaatctacatggagcagcattcagacctatatagaagtcatagcattctgtataggaccaaaaaggaaataacattaaacacttaaacagacgttgttgggtagaaatacctttagatcttgcatttacttccaaaaagaaaaaatgccacagaagtttgctgaaaacttttgtcgtttgaattttctctgtcagtgtatttagcccaaatacaacagctttgggttagcacacacataagaatcaaaaaaacaaagctcactaaataaatcagtctggtttgccaatccagcttgactgaaataagtaaaccaatcacttgcaacatgaaaaactgtccaactcctctaaggttctgacaaaataaccttggctgatgtgggaagactcccactttgattactgacctgacagtgaagattcatgcttgacatgatttcagacttgacaatgtctgtttaaggagctatggtacag

SEQ ID NO: 117851 - DNA, 1275 bp, Homo sapiens
ttgctaattcaatcccagatacctgttgattacctgtgagatctagagtccaaagtagccagcagccatatccctgagtgctctgtgcccatcagatatcttaaagtaagcagggttgggacaggtcacagcttggatgattgacctcaggtgccgtagacagccccagattcaagaattgtatctgctttcttggcagtcgtcactgaactaatgtcccatactgtgttacttactgtagatgctctcttttagaggaggcccagagcacacatcctaatcgctagcggtactcagagagggggtgctaactctgatgccctggccaaattccagtttagggatgtgggtcttcttcttgtcattctaattggaaatgtgcatcacttcccatttttcttactgatctcagtgcaaactacactagtctgtttctttgccctggtctcaagtctctaagacgctggtgtgtattatgtgggctaagttcatgtgttatcctaaggcacaagagttgaggaatgggtgagcttggtgtcagagcactgtgtggttggagggtggactcttgtgatgctgtggggatgaaattggccctcttttagcataagttggggagtgtgcactggctggaggcttccagaggcttccagccatgaggtgtgagctgaaaccaatttttcctctttccttatagcatgttgagaaaatctgttgggttttcagcagtcagggaaggccggagttctgctttaatctgggtaactgaggctaatatgagcaagactttggttaattaactgggttctcagatgccacagactccgtgagaagtcaccattattttcaatggttgtgatagaatttcccccagtagccattattttaagattatattgcagagttgctttattttgagctttttgtgtatacacaatcccaaactggaagaaattttaaaaaaaggaatcctgctgtgaaaggtatatattactctagatttttcttactgtaaatattgtaagattgtaatactgtcgatattttattaaccaacaaatgttaatctatgtgaaatcagacttattttaaatgtgcttcttatttactgtgtgtggtccctgttgctgacagtattaagttatattctgatgtaagattaactttattaaagaatgtaaacattaatgtttccttatgggaaaacaaataaagtataaagaagacaattcttttcattgaaatatactgtgtatttacacttgctagacccag

SEQ ID NO: 117852 - DNA, 1005 bp, Homo sapiens
agtacactgttcagaattttagttaacacagctgacatggttgtgctctgtttgaaagtctaagaataggtattgttggaatatacagtttgtatttgtctgctgtgaatcataatcttgaaatttctaatcaagtttgtaaaatttttatagtgaaacattttaatgacaatttaaaaatttatcttctctaaagaatggtcaaaacaatatcctttcagaaatagaattgttctttaatatctttccaaaatgactttggttaaatggaccagatgtatattagttaaaatttaggactaagttgttgatattctttgagtttacaagttaatccttattggagatgtgccaatatacagttagaatatcattaatttgcactgtttggggaccccatttaagaatgctgaattttgccaactaagaagtaagcaaatgcaatttaaaaagtaaatttgagcattctgtattaaatatgtgcagttattatcacatgaagaaacgcagtgtgtcgggctgtaatattaccatatttgctgtcatgttctcccatctcagtgctgggaaatcaccatgtggaaaccaagcaaacgtgttgtgcatcagccggcttgagtttgttcaatatcaaagctgaaaactagcgaggtctgctgtactgcttattgaagtattgtgattattttaggcattgattcttacaaaatatatactgtaacagtatactttgtacagatttaaattttatttgaaaaaatgaaataaagtaggcaaaaaaataaagatgtttatttttcatgtgactgtataatcagatcagtcttttgtttcagtgctttttgggggaaggggtctggttgcgatcttggattttttttttttttgataggtggaaactttttaggactcagtagcaggtatacttatgcttatgaattggctgcaagcattaagtgtgctctcatactagagaactctatcttctattttattttaaggtag

SEQ ID NO: 117853 - DNA, 1051 bp, Homo sapiens
gaagggctacaggaggagcatcccagacagccaggtcggaactacacggcaatgctggtagggccatggggagcccctcaagaaaggaacccagcatgctcaaacagaactatttgtcatttttcttcagtctttcttttctaagatgtaattggtggtctcttcctacatccacctccaatggatgttaactttcatttaaccatgtggtatatcatttattttggtattttgcatggcttttagaaatcctttgttcctagtctcagtaacaatttatttctaagcagtcaggactgttttatcttgggtactgagttttggaagaggtcctgctctttcaggacgagaggaaagagagttctcttttcagtgtttgcctcctaggtcacctcagggccggcacacacctccactgttctcacttcagcaaccccaccccacccccgccctgccttctagaacttcaggaggaggagccacagtttttcccctgaaactggggattctacctaaatattgcaaatcttcagagtgtttccaatgacattgatacaattttcctaccaatattgattttcattcacttcgatttcctcacatcaggctatttggcacttaggttggcagtgagaaaatgtcacaaaacagactcactgaatgttgcaaggcttaaaagaataggatatcattaccttacagccagcaggggtgtctagttaaccccaccatcgtaggcatcctggctctccctgcatgctcatctcacacctcagacctctgtcagccttctgtggagactagcagtagctgtaacatagctccactttctgtttctggcagtgtcacttagagtgggtctgtactgccactatcccaaatttcttcatgctcaccacactttattttttaaacattgagtgcttaaatattcaaggcaccaaactaagcattttacctgtgttattttacttcattcttactataactctatgaaataggcactattattaccctcaatttatagatgaggatactaaggcacagaacg

SEQ ID NO: 117854 - DNA, 1052 bp, Homo sapiens
cactagctcaagtgattctcaaactttagcctgcatcacctaaagggatcgttaaaacatataccactgggctcatcccaagttgctgattcaaaggtctggggcaggagcctgagaatttgcatttctaacaagttctcaggtgatgctgatgctattgatctaggaacaacaccttgaaaactactgccctaatctatcatatccagagtgtccctatgtcccactttgccagagaccatctggttatgcctgttgtccctgcttaattatttgtagcacccctgtttacctgcacaactatcttggtctggatgacaaatgatgtgggcaccaattttctcacctaacagcctcctcactggtccccctattgccatgattgccctatgtaatccattcacacagtagctagagtgatcttctaaaaagtactaattggatgatgtcactccctgcttcccattacacttagaatagaagtctgactctactatggttacaaggcctctatgatctggccctacttaactctccagctttctctccttcctctcacccacttgttcatttctctcaagcaatagtggttgcctttctgttttttaaatgcacagagcccaccgccacctaagggcctttggcgttgcttttctttcttccttgaatgcacttcccccagatcttcagatggctagctagccctttttcataatcaagcctcagatctcatgttctttcttcaaagaggcttcccctgacaaccaaactgaaatggtcccttccagtcactcccttaccagtctgtttcagttttcttcctagtgcttatcactgtccagattgtctttctcatgtattgtttttttctgttgatggcctaacactgagggcaggattcaccattgcatctccaatgcccagatgagtctggcacatagcagacattctgcaaatatctgatgacaaaatcattggactccagtgagtccagaccatttttgggagtcacctgtgcctctggggctgacttcctcatccactttgaaggt

SEQ ID NO: 117855 - DNA, 1059 bp, Homo sapiens
tgattgagtaggccgcacctgggacactgtgactggaggacgccggaatttaaggaggggacgagggagacgcagctctgtttctcgctgtaccccctcacccctccgaagcagccgcgggcggtgcgcaggccgttctctgcgtcctcgggctctgggtgaggctgggtgcagcgggagagacccggggcgagctgctgggggctgtgtggccggccccaagctggccgcgcgcacacgctgcgcacctgttggagcgggcctctgcctgttcggacccgagccgggcctccacgacacagtccccttgggcggcgaaacggccacatctagctttaggtttgaaaggaaaacaaaatagggggaaaaaagtgggtttacagttgcatacatggactctctgggtcagctcttgatgaggaccaaatatcagtaggtcttttggggctgcagccaacaagctggcagctgaggacagagacctgctccctggccttggcactgctggagatctttcagcttgatgagatgcagttttcacagaaaaattctgttccttagaacccaagtgagtctttctcaaaactgccagagttggtgataaacctgtgttaaaaaaaaaaaaaaaaaattcccctgtgtgtccacatactagccagtatccactccaggtaaaagtttctaccattgagtaaaaggaagttatgtttaggaagtttttgaaacagcccctctctacttgtctgctagttaatcacccacattttgttttggtttggtttggttagatttggtggggttttttttatttgttttcgttttttgcaacttaaagcaagaattaaaagttaattctgaagcttcacatatgctttggcttcaaatcctaacattcagcacaggtttccacatggggagtgccaggtctgacatctgtgtcagtccttattttgattcagggttggttagatagatgctcaaatcattgagggagggaagtcctggatgagggcactgcactgcccaccagggtgtccatgagacactttataacctaag

SEQ ID NO: 117856 - DNA, 1047 bp, Homo sapiens
taaatttttcttacacagtattacatcatacctcaaaagcataaatttaaaacaactgcaaaaaaaacccttattttttttcttggatattttctttccttggatatttaggttgtttttttccttcctctgttttgttttgatctgttttttatgttggaggccttcctccaatgtctgataatctttgtccattcatttatgtatgaggcagtaaatagtccattagaagttcagtgtgcataggctttactgtggagtgactgggtgagtcatttctttggtgtctccccaattattagtatctgtcattttttttccactgggactgttcagttttccagaggaaaattttccactttactgtctgcagagtcagtgccagtccatctagcaggtgtcttgtaatttaaaaaaaacaacattgaaatatattgctttttttcctccatctctactttgatgaggtcttatctccactgaccactttcccaaagaatagtttctgcccttctcattgtgtggttgaatgactgctaatcccgtgactctgagtatgtcttgaatgagatcgtgggatagcagtgttcagtgcagtctattaatggatcttgactgcagcactattttagctgtcccttttagagttctgatttgtctttaatgctacaatttacactgtttgcatttgatctgtagtaaaacacttcactagagtagggtttatattttacctgaccaaatttataagggaaagcagtcatgttacaaagttcagtatcataccttaaatttaaagctcttttgagttttggttatgtaaagtggtttgtactatactgtgtcagtgttaggtaatcttttttgctttgcttttcttctttaccagcttgggaacaatggattcccactggatgaagtcctgtttttcaaatgccagctctaggatctctcatcctgcacacgtgctctttctgtgacttttgctgttctctcactgggatttttttcttgtttagaggaaactgaaaatagatccagattttt

SEQ ID NO: 117857 - DNA, 1039 bp, Homo sapiens
aaatatcttgctattcatttaacacatttatttaggggactgccttgtaccaggcactctgcagtgctctagggacatggtggtgatccaaaacttacttgatatctactgtcacagcctacagtctagtggaggaaatagacaaaaggcaaataaatatataagataattgccaattatagtgatggtgagaaggaaacaaaatgggcagagctagagatttgcacaaggcttgatacaccttgaaggtattttgtaaatgatcttatgggttaggattttattcctgatgatttccacagttaaatgcaaataattttcattctttttgtctcttaggtgcactttacaggtccccgatgaaccaagagaaccctccaccatatccaggccctggtccaacggccccatacccaccttatccaccacaaccaatgggtccaggacctatggggggaccctacccacctcctcaagggtacccctaccaaggatacccacagtacggctggcagggtggacctcaggagcctcctaaaaccacaggtgtgtgtctctgaatatgtgggtgtgcagtcccgtgtcactaaaggaaatgtttgcatgttttctttggcagagaagaaattctttccagcctttgcaacttgtgcttgatgtccccaaagcttgatgatggcttagggtggattctcactcctgagaagaggcccaagtcagctctgcctgctacattcacacctcttgtcccctctggggctgatgacttcctggccaacgtgttttctgagggctaccctctagagcacttgggggtggggaaggaattagcagttgagtctttgctctgtagccagctttgtattttaggtttagtaattagcctcttgagtttattttatctgtcagcttgttgaccctcaagtcatcctcttgcccctgctactggggtttttcttttttttcttactaaatgttttcataattctatttaacctgccagttgagttttcaggaggctcttgagtccttcttgtgt

SEQ ID NO: 117858 - DNA, 1165 bp, Homo sapiens
gtttagaactttattgagtttgtttagaataagtgcttcctaggttcagtggactttgtccactgttcatgcagaaaatacagatttggtcatctttcttacctttcatgtaatttaagtattgatgtcagcctttttgatgaaaaataatttcttaattctttttagggttaaaaggctccttagttcagtgttaccaatcacgattgatttcacaaatgcagttgaaagctgtttaatatcctttcctatggatatacccaggaatttatttctctgtcattagcttgtgaattattaactgcccagatcctttctgcacccaaacatagcaggtagtgccaaatggtcaaattttgtcacctggggtccatgttctgtgaatgggactcttggaagaatgtagcctcactgagtgatgaaccctttagggacccattttattccttgctttggtattgcttgtgggattctcagtcagaattatgtgttctcatgctgtgtatctgagctctatatggaaatttaagctttttctttccagctgaatgattttagatttatctactactgtagatactctctccactcaagttcaagtgtgtggcatattatgttaatggatacataggtagaaatggtttctttttcaaaggagggaggatctcctttatccttaattggcgtctggtaattagttagggcttaataaaggtgtgatgaatggatgagcagggtcgggtagatggctaacctaagcagaaccttccttggtcatctgtttatgttttagaattcatgtgtcagagattgtagcaaaaaaacccaccttttgtttttttaagaagccaaccttttggaagccatgtgattggaagcagcaagtgcttgtaggaataaggtctcccagaagagcatacctgcagattatgtcaaggatctcctgggtggtttttaagaataacaactagtatttgttgagcaccatgcttggtgttagctttatgtaatcttcacaacaaccccatagtatcagtcccatgttataggagtggaatctgagactcagaaaggttgtttcagttatctgttgtataacatatcacccccaactcactggcttaaaacaacaatgatttattatttctcatgattctctgagttg

SEQ ID NO: 117859 - DNA, 1033 bp, Homo sapiens
tagagacagggtctcgctctgttacacaggctggtcttgagttcctgggctcaaaccatctgcccgcctcggcctcccaaagtactgggattacaggtgtgagccactgcacctggccttaattaaaattttaagtgagccattgcttttgaacccagtgaaggaaaaggtcttcctaataagcttcatgagcagctgaaaaatacatgactttttctgatggcctgctgagggagaaggttttggaaatttggaactataaagaactctctcctgactggacaggctgtgtttctgagcctctctgcagtctggggctagagaatctggatgtttggtaacaatttctagattaaaaccaccagaaccagaagagtttggggccagtggtttaagtttttaagtattaattattaaataataaatactagccaaataatagaaccagtatttgtctagtagttattatgtgtcaagcacttttgtatattagctcatctagtcctaagaacaatcctgcaaggtaggtcttcttatctccatcatatagatgaagaaactgaagcatggaaaggctaacttgttcatggtcacagagctaagaagtgatggagctgagattcaaacctagcaatctgattccagaggctatgcttgtcagcaactaccaccattttctgagcacctactgaaatccctgatacttggctgagagcattgtaaacacggcttccaagttttacaacagctcttcagggtagtggtatctcaaattttacatctgtggaaccagggtcttagagaagctataataacatcttgtctatgatcccccagatctctgacccagagcctgacatacttccatgtatcatgtggccttccatgcatgagtaaaaattgttttataacctactcttcccttttcccctggaacctcgtacagcaaatacctgttaaatcccttcagtggccaggtgcagtggctcacgcctgtaatcccagcactttgggaggccaaggtgggtggatc

SEQ ID NO: 117860 - DNA, 1055 bp, Homo sapiens
gataccttttcagcctggagaattttagagacagagacagcgcaagattatattgtgagttcttaatgggtaaaagtgactttttgcttttggagagaatgtatatcatgggtaatttgtttgtgaaggattaatatttctctctcctcctcctgagcctccaaaaaagccctttccaagtacctcaggcagctagtgggtaaccatgaactccccagggctgtgggcaagatgtcctggggctgcagatttgaagcctctgtgaaaaaggtgtatcctgtggctactaggcccactctccctggcctagctggactcaggaccctaagctccctctgcttgcttgattctcttccaagatcttctccaggcagattattccctttggaataaagtgatggccctgatatcaaggactaccctcagcccctttctagaaaattcagagtacgccaagatctcttctgaaggggttgacctgacagaagtggagtgactccctttcttaagaacttgagagcagttgggtctcatatttttccttatcagtgctttgcagttgcttcagagtgtcaccagctaagcccatatctgcagtttcttaataagacaggcttttccaactgaggtaaggagtacaagacaggttatttgtccatccactcattcatttagtgtgccaggcctactgagtgccctgtggtaggctgtgagcatacagtgataagtggcattgcagtcctcaacattttcatccagataaaattaggagctgagggtccccagagtttatcttggaggtcaaaaggaattgctaaataggaccatttccatttccctgttcaatcatgggagaaaagtggtgactgtgagagttggtagaaaggttcttggtgatagcccgctccagctagccgatatggtcggtgtggtaataaggatggctgtggttgtgaatatcattaggaggcagtacccctggccctcctggattatcactttagagcctagcatccacagggagttggactaaggcagtaccttagataaacaga

SEQ ID NO: 117861 - DNA, 1624 bp, Homo sapiens
gcacggctgacgagctggggtgaggggtgaggggacatccagaagggaaaacttcagccaggagcggtggctcacgcctgtaatcccagcattttgggaggccgaggcgggcagatcaactgaggttgggagttcgcaaccagactgaccaacatggagaaaccctgtctctactaaaaatacaaaattagcccggcctggtggtacatgcctgtaatcccagctactcaggaggctgaggcaggagaattgcttgaacccaggagggggaggttgtggtgagccgagatcacgccattgtcctccagcctgggcaacaagagtgaaactccatcatctcaaaaaaaaaaaaaaaaaaaaaaaaaaggaaaacctcttggctggccccatgtaattgtaggttcctgggtttccagggagcaggcctggaagccactccaggggcagcccctggttaccaaaaggccctttcctaggctctgggtaaaggcaggtgcaagatgtggcaaatgctcctccctgagcctatctctgagtgggactacggggagagtagcttggccgggagcccatgacccagctggagaacacctggccctcagaactggccgcctttgtagcaccctcactgtttgcatcaccaccagaataaaaaggtagattggctgctggtcatacattggatggtggccactagctgagatagatacccacattttataagcctcagtgagcagatgagtagttagttagacatggtaacagtccaggagacaagcacagactccaggtagcttagcttaggcctggaatcatttagacagacagttgagctttggacaaatttattgaaacatacaggcggctgttagcagagaaatcattccatgattgatgtgttacatttggccactaccttgaatgtataatttaaaaattatatttttcacaactaagcctttggccaaaaaagtcatttagcacatctttaaagatcaataagaaatggattttggacattaaaaagatcaagtcactgaattaaacagtagcaacccccattaatctagaatcccatagtgctgaaggtagaggtgtctgtgcaaagctagtcatttgttaacagcaatcagaagagatgggggcaggcacacctgtcagaggtggcagcagagctggcaggacaggacggctgggctggtctggtcaggtgagcatgtcccagagacagcagcaacagagagccgtccagcaggctgtgaggcaggtggatggtcctagctcatctcttctttggtcttctaccacatacactggagggagaagagggaagagggtgagaatggactggtgcaaaccccaggccctgcaaagttagcctcccaggaccacaggaaggctacaccaggggaaaactattgagcagactggtgaaaccgtgttcctgccattgctgctgctgaatggaaggagggtggctcagctcagctgctttctccctcctgccactccagactcaggacgccctcaccctcacagggacaagtactagagaacttgcagaatggccccatgccaaggcaaccagagttggccaaccctacttggtttgtaaaccaggtag

SEQ ID NO: 117862 - DNA, 1093 bp, Homo sapiens
ttctccctgctgcctgcccgtgatcacccatggttcggaggtgaggggagcactgtgggcaggtgtgtgtacctggcttgcagtatactcctgaaagttgcctgtcacaaaggaaaagccataaccattggacatcaaagctgtgtcttccagcccggcccattcactctggtcctaacctttgtctgtctctcatattgcagcagaaaaagtcctacctggagcgaagcgttaaggaagctgaggacaacatccgggagatgctgatggcacgaagggcccagtagggagcctctctgggaagctcttcctcctgcccctcccattcctggtgggggcagaggagtgtctgcagggaaacagcttctcctctgccccgatggatgctttatttggatggcctggcaacatcacattttctgcatcaccctgagccccatttgcttcccagccctggagtttttacccggctttgcctgccacctctgcccaggacactcttccctctcgggatgtgtgatgaactcccaggagagggaagatgggagccagggcaagataggaagctctgcctgagctttccactaggcacgccagccagaccaataaaaagcgtctgtcccactctgctaagcctggttttcttgagcagagggatggaacagagggtgagagaggcagtggccgtctccacctcagctcctgctccctctgcatcagagcccttcctttcttgggggatgggccttgccctcttctcttttcccttcctgtacctttgactaacgctcagcttccgggcctgcatgcagtagacagaagaggaagaaagaacagatgttcacagctgaatctcagtgaacagaatagcagtccctggatggcagtctgcctaaagattcctttccctgccttctcccatacattccaaaaggaagttcaacagtaagcagcacctccaagactgtctccttttggccaatatcataagatggacgccataatcctgaggcctcctagaggctgagggggcaacggtgtgatccagctggctcatcccagcccaggtgggccaattattcaattttcaaga

SEQ ID NO: 117863 - DNA, 1059 bp, Homo sapiens
aaacaaaatgtaatgtatatttaaacaacacttgtgtagtggattgtggtggatgggcaggagagtgggtaataatgataaattttagaggatcttggtatagggtcttttttacacattgtaatttctttaacctaaattaggttctatataaggacaaagtagcaagctataaccaattaactatctgaaggatggtgctccaatgagaacaattttttctttttagctagggaaaaagatgataggtaacagtaagcaaatctttggaaatattactttattatttttattattataatttatttatacattaagacctttagtgagatattcttcttgggctttggtgaaaggcccatcctgtgtatagtaaaagttagactggacaaaaagctggttatttcttagggaccaagatttcccaacatgtgggtggatacattgacttcataggtcatttcatctaatttctgtaagtactatttgaggcagaggatcagaatctaactcagccctctgctgaatttgggagctacaacttgtagcctcctgaggatttcttaggggcactgaattggcctggcctgggagtatgcagtatcttaggttacttaggcttatttttaactactgatagttgaaacaaacttgataatagatttgcagcttagaaaagtgtattgtaaaaacaagacaaaaaagcaaaaaaaccaagtaaagaaaaaacagcctgtgataaccagattgttgttgtgtcctattttaacattttaatcagctcaactgttctaagaggttcagtttgatatctgtgttttcactcataagaaacaaaagtatctttaaaaacccaaacagaatcatttcatgtagataaaacaaaatgcatttttgcaactgtaggtaaatatatttaaaattatcctaatgaataataagtagcaaggtaatatgtatataattctctttatgaaaacaaaaaacaaacatttgtgtatgaatattgaagatgatatgtaaggatatatattaaattgttaatactgtttaccctaa

SEQ ID NO: 117864 - DNA, 1080 bp, Homo sapiens
tggccgcattaggatataagcttaataattagtggagtaaaagaagttcttcagattttattaatatgtgtggtaaggcttagttatgaagaagaggggacaaggcagtttccttccaggtgttggggcatagctaattgccctttttggtctgtttttacttgtcttatatctataataacggactctcttgataagaacccacctaggcacaatgatgtttttgtggggttggcagaggaaactgcatgttgctaccttgatgtgttttctcgtttgactttttgttaagagatgatgtttagttctttgttgctgaactctgttagtgcaaagagaagaaaaatcttgcttaattaattgcaatattaaattgaaatatattttagcttccttagacagtcctgaaagagatttgcataactggggtcttcccttggttccagtggaggggaaatatttcagttcacttacttggggctataaaagtttgttcttcctttccctgaagcaagaattgtgaacataaagtcataaaacagtttcagtgttaatttttaaaacttctccatatttccaccctcatcagtggtaaataatgtgcctgatgtaaaatggaaaaagttgaaaatttccacttgtacattttgagcttttcagaggtactatatacactctggaaataataataaaagatactaaggcttatacagtgctttttgtttgaggaactcatataaacactaatgcattgatcctaacacagtgcttgattgtgactttaaaaggtcatgagttactgctgttacaaaaaaaaaaaaaaaatggaggggcgctccactttacaaatatagtttaaaaaatatctagataaaaattgaaacagataactgaaaaaacaaaacttatagggtatttgtttgtatgttgacttttctcttagcgtatgatatatttttattcctttattattttttcttttacatatgaatctacttgaagcctgattttcttttctttttttttttttttttaatgtttttaagacaggatcttgctctgttacccaagctggagtgc

SEQ ID NO: 117865 - DNA, 1712 bp, Homo sapiens
gctaaaaattacgacgtaaaaattcagtaactttcctcaccagtggagttaggcaaagaagcaagataggctcattcttttttttttttttttgagatggagtctcgctctgttgcccaggctggagtgcagtggcgcgatctcggctcactgcaaactccacctcccgggttcacgccattctcctgaagataggctcattcttatgtcttttctatgctgcttaatttgtgaataccctgaaacctaaatgctaataggatacgtttttagacaccctctaaaaatttcccacccaaagtgaactcgtcataagcattttgttgtttctgaatagcatatgtctaggtgaccatactttggaaattgtgtccaaaatgcagcagtgcaagtgatctgggattgtgttttgggcaggtgaacaatggttttgattcatactgagttataagaaagtggaagttgtaccaaactgcaggatgatttagaaaacggagtctgatgtttctcaaataatcaaaaccgaaagtctcagaattatgttttcagatggcataattacaaataaatgaggaagtgaaatagcaggttacaagtccttgagagtggacagtgcagaggcacgtggcactgatttccaggtcaaagaagaggccttttgcaaagcatcaactcgaattcaggttatataatcctgagtattttaagcatgttatctgcatattatttgtcatgagagaatactttccctcttcatggtttatttttccttattggtacattttgaactccagaattctttatttactatttggctttccataaacaatcaggcagaatgactatgagattctctacattgagcaactgtgtacataatatttgcttatgataagacttatattatcatgataaatcctttctcttcacatagtatctgataatccaatgcccttttaaacaataagaaagatgttttccaaagactttttttcagaaatcagatgtttcttggagccttttccagtcttcatacaatatatctttgccattttttaaattgaggactaaaccaaactttccataagtttttgtgtttgaatttttactgtgtaactactctttgaggtagacatttgcatttacccaacattcatccttgttaaaacttgcgtggctgagatgtccttaggtttgtagtagtaagttggccagcttcggtggaatctctctggcctttgaagttggcacagtccagtatagctacctcaaaggatatgtggtcatggaaaaacgtgtttttgttgttgagtgttcttgctttctagtaattttattttctgctcaagagatttagtatctgttcagatactttatttttaaaggccacataagtaatgacttgacctctaatcttagctttgaaattttcccagacactaataaagatgatgtctgatgaccttttatttgagaatagtactcattggccagctatcagtgctacttaaaaatgtatattttactcaaaaaattatttccatggctaaaagactttctcagtaaaatcacacatgtcatgacataatttggtgactcttgcaccttgttttagaatagtttttacataacattactgagacttagtactgttcaaaacaactcttctcttcaaatacaaatatgagttagttctgagaaaaatattctgt

SEQ ID NO: 117866 - DNA, 1322 bp, Homo sapiens
atattacagtgaaaatagtttatattgttgctctcagcagaatcaaatttggatattttatttagtgcatactacaggggaaaaaataatgtgtgagattacttttggtgtgagagtcacattgcaaatgccaatttataaattcattttataccctctttaaaggtattaatctgtattttagagaaagtgaagcaaagatagttgtcaaaagtaagatgagattactttttagattttacttgaagaaagagaagttcttggtgttcagctgcttttactaatagaacatgacccacccttcttgtgtttttatacagagccatttaaagtcatggctttcattgcccagagttctaagggaaaacaacaacatcttttcctgttgtgcagggaaaaatgacttaagttttgttgacgctgaatatgtatataaccccagatgggcacacattcctcttgcacagatttagtactctggggagaggagatttttaagtcatattcttaatttccttaagttgtcagtgatttaaaaacttgatgttcattataactctgctctactgctgtctagaatgacatcactgtttttgtgccagagggagttaacaaacatttgcgtaagaattacatagtcctgtttcttctgcagacgagtactttttaataattatttccctgcttcccctcccatatgccccagtctaaagattctcaccaaaacacaggaaattaattttgaaaatgttatgctaattagatgtctattgttaaaaaagggaaaagtctgttatcttggagagtacaaacatactaaaataaacttgctatggggttacttattttaggctttggacctgttttaaaaacataaatgtaattgattcatttagctacttggtggactttgcttgcttctgcatttcctgacatcaaaagacctggcctttttttttttttttaactgacaaaggattaaacaaaatcagcctttgttgtatgaaaagtagcagtcatttgcgggatactacagtgttttccagtcaatgataagcaactgagcgaaaggtgaaaagtaccatttgcttgctgttcctatgtaaaaatattaaggtagcagcagtcttgaactgttaactttgtcactgaggaattgtgtgctgtaactgacttaattagctgaatttctctgaaaacagtcaattttaagccataccaagaattttctgattttagctgccacttatctcatagtgcaaagttaggaataacttactatctaatctgagagagaggactgaaatgttcatgtcaaggaa

SEQ ID NO: 117867 - DNA, 1105 bp, Homo sapiens
gaggttaggggtttgagaccagcctggccaacatggtgaaaccccatctctactaaaaatacaaaaattagcgaggcatggtggcgcacacctgtaatcccagttacgagactgaggcaggagaactgctcgaacccaggaggtggaggttgcagtgagccgagattgcgccattacactccagcctgggcaacaagagtgaaactctgcctcaaaaaaaaaaaaagtaaaaaatacactcattctaagtgtcatgcattgttctaataggaggacaactcacatgtgagaaatctagtaaattattttacttttgtttgttctaattaatacattattaacttcgtacatttcacttttttttcttttaaaagcatattgcccttgtgagagagaataggtctgcttcatattctgtaagcagaaaaaaaggaatggaaaagcccttaagtacaggtcacattccattacagtgagctaaaaggagaagactgattttttttttttttaagttggggggaggtacaggaggagggtttttctggaatttggtctttgagtattacttagtaagtagaccattacttcagatttggagatcttttagttagaatggaatttgacctcagtctcgggatgacttgttttgtgattgatttgaagaaagaataacatgtgtaaaatttaataatgactttggaatgacatcatgagaagtagacctgctcatcactgactaatccatatctttatggttcagaattagattatgttaaattgttcatctgatttgctttctcagaatgaataatgtagcacaagtaaattttatgtccaagctcatatatttcattttagtttaagaggataaggatcccaatttgagagtttgttactgggacacaaaagaattggaacaaagtagaacccttgaatatgtgtctgtgtagtatgaaatgcattgttggcattcactacaggataattttatccttaatgtgaatatccttaggtcttaaaacagtaatgccagctttattaacatgttgtacttggatttcacatcactgcgctagcctttgtttgcaatagctaaagaattcct

SEQ ID NO: 117868 - DNA, 1093 bp, Homo sapiens
tggaattactgagaggcataaatgagatatttattatatttcctcattaatattcttatattaatattcccatgttaatatttcaaactaatgtgagaaagtgctttgaaacctaattgtgcaatacaaatgtagtgagttattacttttatggttcttgttttgaatctctggatttcatccttgactattgcatttatttcttttactactccttgagtacttgctacttaatatggttattacttaatatgcatttgatttgcttcacactgattgtatcttctgatgattgtaaattcagtatttagtatggtgacttgattgtttacagttatgttgacttttattgatgtttggtaaatttcacagctttgtctctggctagcatattttgttttaatatatttggatttgaggtaaatgtttcctgtaaaatgttttacctactaaatcatggacttgtttttattaggccttcacagagcttcaagccaaagttattgacactcaacagaaggtgaagctcgcagacatacagattgaacagctaaacagaacgaaaaagcatgcacatcttacagatacagagatcatgactttggtagatgagactaacatgtatgaaggtgtaggaagaatgtaagtaaaatgtgtccttaatggagttattttgggagtgcttttgtccgagttaaatagaatttgttcatcttaaaacttgggttaggccaggagtggtggctcatgcctgtaatcctggcactttgggaggtcgaggcgagtggatcacttgagggcagcctgttggccagtatggtggaaccctgtatctaccacaaatacaaagattagctgagcatggtggcacttgcctgtagtcttggctacttgggaggctgaggcaggagagtcgcttgaaccccggaggtggaggttgcagtgagccgaaatcatgccactgcactccagcctgggcagcagagctagactctgtctcaaaacaaaagaaactttggtttaaagtaagtatctttttctttttgagacggagttttcgctatatcgcccaggctggagtgcaatggcccga

SEQ ID NO: 117869 - DNA, 1038 bp, Homo sapiens
agtagagacggggtttcaccatgttagccaggatggtctcgatctcctgacctcgtgatctgcccgcctcggcctcccaaagtgctgggattacaggcatgagccaccgtgcctagctctatgcctgttttcaagcagtgtaactcatctgtcatgagacctggaacaagttactgtctttctgaggattgtaaccttgtagtgattgtaatgtttgtccatctacctcataaggatgttgtgaggatcacgtaaatgaggtgaaagctatttgtaaattgcatcctgctattagagacaggagttcctcggggcagttgggcctttgaccagagtttgggctgccctactgcctgggcttttccaagtagtagaggaaaccaccatggcagagttctttggaaggacctgctctggacctgcactttgtcatagcaggcagggcttattcacaaaacttatcttcctcaggtaccataggagaggaggttatgatgtggaaaatgaagagaaagtgaagttgggcatgactaattcccactgagagagacttgtgctcaaggtaacgctccatcctttgccccatgacatgattatcctttgtcccctttcctggctgtgcttcagtgggtgctgaattcttcatataggggttgggggccaggctactgtgacattaatatcccattgcagaattattttcaaaaagactcagtgcttcacttaaggtaaaagttgctagagagacacctaagagagatgcctgagaggacagcttctcccaccctcatcccctcccttcccctcccctctcctcccctgggagacagagtgaaaccctgtctcaaaaagtttaaaaataaaaaagactggaccaggaaaatcttaagacttctttagactggacctggctttacatgccttccttttgtgctttaggaatcggctggggactgctacctctgagaagacacaaggtgatttcagactgcagaggggaaagacttccatctagtcacaaagactccttcgtcccca

SEQ ID NO: 117870 - DNA, 1060 bp, Homo sapiens
tgtctccatctgacttgggtgccccattcctcaggccatgggcagtaacctctggagtctgattatgtaataactcacacaatgtgggacttggcctttataaagccctttcatttgtattacctcattttatcttttcacaatactctagtgaagtaggcatttcttatccctgtgttttacatgaggaaaccaatgtttagaaaggtaacgtgacttgcccaaaattacctggctagaaatagcagcagaaccagtctggaactcatgcactcagtctcctccatccagacgtgtcccctccacctcctggggtaaaggtggagaaatccagtttggaagatgtctctggaccctagagggttcttgcatctgttgtaatacaagttctgaaatgggtcacagacgtgggtgggaagaatgtgtcctagtctggtgggtggctggctctggacaagacacaaaattttgcccctaccctgggatgcttggaatgtactcatcccccctccttctctggggaagccaggagttgtctgcaaagggagggggaggtaggtaatattaggatgtttacattattatccttttgactcagggtgggggtggagggattatgtaactgaattgcgggactctgaggccaaactttatttctatcttctgagtaactacctgtggagtttgaatgatggactggaagtgaaaaacagactcaacttcagcttccctcctcccaggaaagcaaagtctctgaagtcatccagactgctgttgaatcctggctctacgactcactagctttgtaaccttgggcgaggtgtttaacaaaagctaagcctcagtccatctttaaaatggggctagtaacttctccttcacagagctggctttaaatgaaataattcttgtaaagcagttagcacaaagtacttggctcatggtaagccttcaatgattgctaattattattctttattattcaagttatgagtaataaataataataacatagtcagagagaagggtcagactgccccccaggagcctatcagatatg

SEQ ID NO: 117871 - DNA, 1029 bp, Homo sapiens
aagctctggtcactgggttcctctgaccacctgtatcaccttctgagctctgagggggcctgggactggatgagaggaaatgaaagactgtgggggctgctggcacctacttctcttcccttcttttggctttgctgggcaaggactatttttcaggtctggggatcctaccacctaaaataaatgactgctaccatttattaaattcctactgtgttctaggcacttgatatgttatcctggctaatgtaacacttatagcaaccttttgagatagttactttggctatccacattttactgagaacctgaggttcagaggagttaagtgactgcccacagtaaatagctgaaattggagcacaggtctatggacttcagagcccattcatgcctggatcagcatctcaggtgctctagacttgtgagagggaggagatgggagtgtgtgaggcagcttggtgtggtgaggaaggacattggagtgaagtccagagaacacagttctaatcccaatcctgcatgaccttgagtaagtcactctgcctgccatgagttttttctttttttcttttttttttttttaaacatagtctcactctgtcacccaggctggagtgcaatggcacgatctcagctcactgcaatctctgcctcccaggttcaagtgattctcctgcctcagcctcctgagtagctgcgataacaggcacacaccaccacgcccggctaatttttgtattttttgtagagatgagatttttgccatgttggcaaggctggtctcgaactcccgacctcaggtgatccacctgcctcagcctcccaaagtgttgggattacaggcgtgagccaccgtgcctggccacatggtattctttgaagtccctctagcttgagactctaagtctctagtctaacgtatcatgcttacccttctgtaagacacatggctgtagccatggatgtgggcacctttttcctgatgggggataaaagggtgggattgggctgataggcatagtccct

SEQ ID NO: 117872 - DNA, 1147 bp, Homo sapiens
ggctccgggaccctcgcctcccacacattgtgaggcgtgaattctctttgggtaggctctgggccggggccatcctcccgcttccctggtggagcccttctgtgacagcggtcggctccatggcggcggtggccgcggtgagggcctagtgagccctcggcttactctttagctcgagcgggacaggttcccgtcaccattcgtagacccacaatagggagtcctttggtctctgagcttcgcgcgggaacagggactcctcaggctgcctcccgcccaccctgctttggagttgggggtggggggcggggtcttgccagagtccctgcccttggtactgagagagacaaacagagacagagacagagctggtgcaaagatcgtttctcttctttgcctctcctcagagttgagggatacgtttatttgccttctgccttgtgtgtgtcttacctgtgtgcttaaggacggttcttattctccctcttcagtttgagacaggtttgagtattagggatctctcggcttttaccctgaaaaatcacgtgactcctccttctgggaccttttgtgaagttagacaggaaaaggaagttccagggcatccctgagcttcggaatagctgggtagctgaactcggaggttttaggcttggagaaagtggggcaacctgtggaaacctcttcttttttttttttttttttttttttttgagatggagtttcgctcttgttgtccacgctagaatacacgtgatctcagctcactgcaacctccgcctcccgggttcaagcgattctcctgcctcagcctcccgagtagctgggattacaggcgtgcgccaccacgcccgactaattttgtatttttattagatacggggtttcaccatgttggtcaggctggtctcgaactcctgacctcaggtgatccgcccgcctcggcctcccaaagtgctgggattacaggtatgagccaccgtgcccggctggacaccttcactctgcctttgcagtgaagtccttcatttctttaactcttctgtgtgtactctaatgtgtacacatttttaggtctgagcaacctgggatggtaggcattaacttcttttgggttctggggaaaaaggggcgggttttgtttttg

SEQ ID NO: 117873 - DNA, 1147 bp, Homo sapiens; identical to SEQ ID NO: 117872

SEQ ID NO: 117874 - DNA, 1147 bp, Homo sapiens; identical to SEQ ID NO: 117872

SEQ ID NO: 117875 - DNA, 1147 bp, Homo sapiens; identical to SEQ ID NO: 117872

SEQ ID NO: 117876 - DNA, 1013 bp, Homo sapiens
ttgtgatcccaaggggcggtattttatgtgtatacttttttctgttgactgtggcttgcgtagagtactgtaccgtgattgttttaagtgctcagagtatttcttctattttggttctgaggtgcctgagttgtcacctgtgaccagttattttaacctctggtcttggtgttaaagtacaggaatttctctgtgtgtactaacaatcccggctcttggatttgagaggaataaggagaaattatttgtgggttacagactgcagttagtatactgtcttatcattctaggtctgaacagggttttatttaatatttaaaaccttagtacattctgaccctaacattttgctttggaaaaaaaagtgtgtgggttataaggcgggtagtcccttgaatgtctacgtctttgaatttcacggtaagggaaataacttctaagccaaggtgagagaaatgttttatttgagtaggcagttatggggagagactctggagtatccctgctcttggtcttgtggaaggctttattttatcctttcagtgaaacgtgagagattaagctagaacacagtactttttagctaggaaatgaagtgtgggggatatccttagactaaagattagagcttattttctatgaaacttgtaaatgagaatctgaaagagtttgctttggtctaaatgtgatagaaaaaggggaccttgattttcttgaccatttttacataattgtcatgggtgagatgaaaggtcactcatttgcctttttttttaattttaattttttgttttttttgttttttttgagactgtgtcttgctcttgtcacccaggctggagtgcggtggctcgatcttggctcactgcaacccccgtctcccaggttcaagctattttcctgcctcagcctccctagtaactgggattccaggtgcctgctaccacgactggctaatttttttgtatttttagtagagacgaggttttaccatgttggccaggtgggtctca

SEQ ID NO: 117877 - DNA, 1013 bp, Homo sapiens; identical to SEQ ID NO: 117876

SEQ ID NO: 117878 - DNA, 1013 bp, Homo sapiens; identical to SEQ ID NO: 117876

SEQ ID NO: 117879 - DNA, 1013 bp, Homo sapiens; identical to SEQ ID NO: 117876

SEQ ID NO: 117880 - DNA, 1765 bp, Homo sapiens
aagcggatggatcatctgaggtcaggagtttgagaccagcctggccaacatggtgaaagcctgtctctactaaaaatacaaaaattagctgggtatggtggcaggcgcctgtaatcctagccacttgggaggctgaggcaggagaatctcttgaacccgggagacggaggctgcagtcagccaagatcataccagtgcactccagtctgggtaacagagcaagactccatctcaaaaaattagaaaataataaaattattacaaaatagttacttgttgaaaaactcaacaatatagatagtaggtataaggggaaaagtaaaagtgcttcttcccacccccattaattcttcaaattctacccttcaaggtaaccaatattaaaatttttcattcagtaaattttctaggcctatctttctatgtatatatgtatatatgttcatatacacatactttaaaggcatatcaaatttaaaagtgtagctttatatcacactgaggtttttttcttgaagcaggtgctgtatttacaattatataaaagcacgcagaaattgtatttagctctgaaaatatagcacaagctttgtagggattcctttttccctgaaaattacttttaacatcaaaagcaaaagtcatacagaaatcccatcctgattttctccagtaggtaaggagttgggtcatatcctttaagattgtttatgatctatatataatctgttttttaatttttaattaaattttttttaccgttatgtgttttgagagatgggggtctcgcttttttgcccaggctggctgttgccctggctacacagtgcggtggcatggtcataactctatgtggtctcccactcctgggctcaagcaatccttctgcttcagcctcccaagtagtcaggactacaggggactataggtgtgcaccacaatacttggctagtatgatctataatctagagcagtttctcaagagcaacatatagacattttgggacagagaattctttgttgtgaggggctctcctgtgcattagaagcatccctggcctctacccactagatgccagtagaacccgattatgatagccaaaaattgttcagacgttgccaaatgtctcctagggacaaaatcactcctggttgagagctaccggtctagaggccactcttgtcaggaatggtagttttgttatactctgtattcaaacttaaggtaaacaaggtgagtcactgcttttaatagcatttcaggacttatgcttataacctgaacaagggagaaatagaaggtactgaaaggtttaatataaaactagcatgcactgctgtaaattttctatggtaaatgtatcattttggggaactttcacttaaaatatattatttttcaaaaagttcagttgtccatgaaaatgaatttttaaaaaacttttatggggacttccagtttgttcaaagtagaaatgctttattccataaattatcatttgtagtgataacataggaaatataactttgtattctagtgggctaattttggagactttggaaatgcttattgaataaaaagaattatatgttattactgtaacaattttttttttttttttttgagtcagaggagccttgctctgtcacccaggctggagtgcagtggcaggatctcggctcactgcagcctccacctcctgggttcaagtgattctcctgcctcagcctcctgagtagctgggactacaggcccgtgccacca

SEQ ID NO: 117881 - DNA, 1765 bp, Homo sapiens; identical to SEQ ID NO: 117880

SEQ ID NO: 117882 - DNA, 1765 bp, Homo sapiens; identical to SEQ ID NO: 117880

SEQ ID NO: 117883 - DNA, 1765 bp, Homo sapiens; identical to SEQ ID NO: 117880

SEQ ID NO: 117884 - DNA, 1057 bp, Homo sapiens
ttattttttgagacagggtcttgctctttcgcccaggctggagtgcagtggtgcgatcatggctcactgcaaactctacctcctgggttcaagcaatcctcccacctcaaacctccccttccacaccccacccctgcagctgggactacaggcatccgcagccacactccacactcagctaattttaaaatattttttggtggaggtgaggtctcaatacctagggtagtttggaagttctggccttaagtgatcgtcctgccttggccttccaaactgctgggattacaggcatgagccaccatgcccagcctatttattcaaattatatttgtcattctaaactctttttagatattaataaattgtatttgagtgttctaggcattgtgcactttaattgcatcacctcatttaattttctcatggttctgtgacagtccaagataccaaattcaatgtgtggatcattgccctgtgttagttggatgatcactctaaagattgatatttgagtgtcttgcttcaggagattgatgggctctaagtggcaggtttaaaggggcagtaatttaaaatggaaggatgcatagtccatcagcataagattgtcttgtgcttatttttgagcaaaaccacaactgctccttattatgttctgtaaactcgccaagcctgtgatgcttcagggcctttggcacttctggttccctctgtcaggtacattctcttagatatccatgtggcttccctttcacttctattatgtttcatttaagagaccttccaactattaatacctactgtatgtatattgcataaacatctcaggctcattaattctaaaactgaactcatactttccccttgcactccactatgatgaatgtgtcccccaaagttcatgtgttagaaacttggttcctagttcaacagtgttaggaggttgggcctaataagaggtaactgagtcattaggacttctcacaggagctggttaactatcctgagtcgctttattgtaaagcacatttggccccctcttccattagctctc

SEQ ID NO: 117885 - DNA, 1057 bp, Homo sapiens; identical to SEQ ID NO: 117884

SEQ ID NO: 117886 - DNA, 1057 bp, Homo sapiens; identical to SEQ ID NO: 117884

SEQ ID NO: 117887 - DNA, 1057 bp, Homo sapiens; identical to SEQ ID NO: 117884

SEQ ID NO: 117888 - DNA, 1050 bp, Homo sapiens
tttaattttaattttatttgtaagaatgaatttaatttaaaatgttgccccagaagatggttgtgaccaaaggaagaaacaattgaattgtttgttacagtattacagactgtctcccctctgaagatactactgaaaatagtaaagacagatatcctgtactagagatcttatggtgtgactatgtattttgaaagaaatctcatttatttgatagacagcctcatatgaagttacatgtggattaggtagaggacaaattaatattatgtgcattgtaaaggtagaaagactaaaacataggtggttatgccatggccttttgacattagtggcagaattgaattgataagccttatcttctgtcaacctaacctatggattctataccatttctttttcctagataatagtgtttagaaatataattacaatttgcacttttatacttttttttttgttgttctgcactacctgattgattgatgcacactgaaggaattggcaaattgtcaactgctgatggtaaagcttttgcagatcctgaggtactccggagactgacatcctcagttagttgtgcactggatgaagctgctgctgcactgacacggatgaaagcagaaaacagccacaatgcaggacaagtggacacgtatgtgtttaatgacttttggatattagacattttcttgaatagattttggggaagtagccaattttggttaaatatatcttttggtggagcttataaactttagctgaaaggatattacattttaagtggatatataaatgtatatgtattatgtagctatacaaatggatatttttgtttcttcattcagctcttattcgttgagcattcttgtggaatgtattacactagagtctctgagaaatccaaactgaataagatctgttttccagttataaggaagttacttattctaaaagttattatagtaaactctaaaccgagtgcttgagtactaatacatgaaacgagttactaatgcagtagtgtagttgcttgctactcaaatatgg

SEQ ID NO: 117889 - DNA, 1081 bp, Homo sapiens
ctgccaacatggtgaaaccctgtctctcctaaaaatacaaaattagtggggcatggtggtgggcacctgtaatcccagctactcaggaggccgaggcaggaggatcacttaaagctgggaagcggaggtggtagtgagccaagatcgtgccattgcactccagcctgggcaacagaatgacactctgtctcaaagaaaaagaaaagaaaattaaggtgatgcttctaaccaatgataacgaaaaaaagttgagataatagttgtagtgatttgtgtaagggaattgaagaggtatacctagagcattagcataatcataattgtatctgttctgtcatgattgtatatttctttttaaatcttttatttatttttattttttaaatatatattctgctcatgtattatatttcttcttcttctttttaggaaacactgcgctaacttatgcatgtgctggaggatttgttgacattgttaaagtgctccttaatgaaggtgcaaatatagaagatcataatgaaaatggacatactcccttaatggaagcagccagtgcaggtcatgtggaagttgcaagagttcttttagatcatggtgcaggcatcaacactcattctaatgaattcaaagaaagtgctctaacacttgcttgctacaaaggtacttaatacatgtatgaatatttataatgtttttcgtaaccactttgattatttgagtattgagtatttgagtttactttatattgcttatgttttccctgtgctataaaattatctagtttataagaaattatatagaaagtctattttagtctatattgcctgtaatatagttttctagtatatgtttattattttaattcagatttattgggttaactgtgaagttaacccaactacttagcttagatttagagggtttccattatttaataacttttgttttatatgatttttccaatgtttatttaaaaaatagtacatgccaaagtaataatacacacaatactgaaaacctgaaaaacacagagtaacacaaagaaaagaaattttttgtttttgagacagaatgtcgc

SEQ ID NO: 117890 - DNA, 1675 bp, Homo sapiens
acataatttgttgtgttattttttgccatgcctttgtttctgaaatagatgtaatacggtttctacatttgaatatgactcctgagtttgagggtatgactgtatttgacctggcagtagtataatcttgttattttgaggtagcattgactatagatttcacagttttttgaacttcaaaaaatggaaatttaaaattatttggatttgtgactgttatgtcaccaagtctcattcttttggagaattttgggcttgctcaaaagttggttaaaataatttgaaaattacttaaaagcaatattgatgaacttttgataaggctcagatgagcatgataatatatatgctgtctatgctgaatcttctaatcttgtcttttttcttcctttttccaatctcttgctttcttctctcccacttaaaaaaatctcaaaacaaaaaatttctctccttctttctttacttctgaaaatctgcaggatggacatgtagaggtggcacgtttgcttttggatagtggtgctcaagtgaacatgcctgcagattcatttgaatctccattgacgctagctgcctgtggaggacatgttgaattggcagctctacttattgaaaggggagcaaatcttgaagaagttaatgatgaaggatacactcccttgatggaagctgcccgggaaggacatgaagaaatggtggcactactcttagcacaaggtaaagcagttttacttcttttagaaaaatcagttttctttggatgttttgtgttagtactggtgaagtttactacagctagcatatatatatatatatatatatatatatatatatgcatatatatatatatgcatatatatatatatatatatatatatatatattgcattgatgataaattaccctggaggaaaccacagaagcagagaagacagagatgattatcacaattcagaaaattaatatctttattataagtctcttgcaactaattttatctgtttttatactttcctaggagcaaatataaatgcccagacagaagaaactcaagaaactgctcttactttggcttgctgtggaggattttctgaagttgcagactttcttattaaggcaggggctgatatagaacttggctgctccacacctctgatggaggcatctcaggagggacacctggaattggttaaatatttgctggcttctggtatgtggctttaagatgccttattgctcagaaagacaaatacaaataatagtttatatgtggaatctaaaaacgttgagctcctagtagataatagaatggtggttaccagagtgtgggcatgagggtgggaggagagtacacaaggagaggggaaatgttgatcaaagggtacaaagtttcacttagataggtggaataagttttaatgatatattgcatagcaaggtgactacagttaacaataatgtatatctcaaaattgctaagagtagatttaaatgttctcaccacaaatatgtgaggtgataaatatgttaattagcttgatctaatcattccacaacatatacatatatcataacatcacattgtaccccataaatatatacaattattatttgtcaattaaaaataaaattaaattaaataattaaaaatactgtttagaaaaagacttat

SEQ ID NO: 117891 - DNA, 1046 bp, Homo sapiens
ctgccatctgttagatatatcataaattcaatgatgtgttcacagaatagagtaacaagtcaagtcactttgagtgatttattattattttaattgacacatgataattgaacatattaatggggtacagagtgatatttcaatacatgtatataatgtgtaattatcaaatcagagtaattagtacatccatcatcattttgaatgatttctgttgtttctctgattagacatttcaaaacaaagctactattgttaatcatccttctagtacattcctacaaattctattctttttgtgttttctgttttggtttttcaaaatttcaaattaggtggcaggttcatatgtgtaataatctatataaaaataatattccatttaaatgttcatgcctcttgctgaaatgtgtgctttgcctagcttttattttgtgagagtgctttaaactgcttcctagagtttttcccagaattctctgatacatttcttaaaaacttatgtgtgacatacatagctgtaaatgttatagagaattagatttcttagttttgcttatttagaaaaaactatgcaagtattaccttttaaatcatccaagtagatacctgagaacattattggaaaataattattaaccaaaataaatgtgtagtatgattgttatttattatcatttctactaatacaaaatattgtaatgaaaacactatcattcattcttattaattaggaccttccctatcagttataatttttgggaggtatgcttttttgtctgagaattgtgacagcaatatatgttaagtacatcttagtcttttgacttctttctatatctttttccttttatagagttgctttgagtcgtctataaaaattaggaattgaagtttgtcattcaaaataaagaaatagagtagaacttaaaagcttagataatataagcaaaatttaatactcttatcctctaaattcttacctggattctctcttcattgtattttctacaacaaagtcactgtcttaacctgttgggagttct

SEQ ID NO: 117892 - DNA, 1046 bp, Homo sapiens; identical to SEQ ID NO: 117891

SEQ ID NO: 117893 - DNA, 1046 bp, Homo sapiens; identical to SEQ ID NO: 117891

SEQ ID NO: 117894 - DNA, 1046 bp, Homo sapiens; identical to SEQ ID NO: 117891

SEQ ID NO: 117895 - DNA, 1099 bp, Homo sapiens
ttatttgatgcttacattaacctgtatatatttattaatcttagtcttctagattttccattttaaaagtgatattgaatgaacgaactacagcttcatgcaacattgtggatgaatctcacaaatataatattgagtgaaagaagccagacgcaaaagagtacattgtatgattccgttcatataaagttcaaaaactaaaaccagtttggaagtcagggtagtggttaccattgggaggctgggtagtgactgaaagggagcacaagatggggcttttggtatgtggataatgttctgtttcttcctctgggtgctggttacacaggtgtgtgttcattttgtgaaaaaaattcaaactatacacttaatgatttgtatatttttttgtatctacattatacttcacaaaaaatttttaaatgatattgactatgaactagcttgatgtcaacctttgctaagattgcgatttatttttcttcaaaggtgccaatgttaacagggctacagccaataatgatcatacagtagtgtcgctggcatgtgcaggaggccacctggcagttgttgagcttctcttggctcatggggctgaccctactcatcgactcaaggtagtctacttaaaaataagtaaacaggctgtgtgcggtggctcatgtctatgatcccagcactttagaaagctgaggcgggtggatcacttgagcccaggagtttgagactagtctaggcaacataaggagaccccatctctattaaaacacacacacacacacacacacacacacacgtatgtatgtgtatatatatataaataatatgtgtatagttataaaaatatgtttgatctatcttagtgcttagtatttaatactgtttaaatgagttttgattttatatgagctgctaagaaactataaagaattaattatcatggcaattctttttcaggatggttcaacaatgctcattgaagctgcaaagggtggccatactaatgtagtttcttatctgttggattatccaaataatgttctgtcagttcccaccacagatgtgtctcagctccctccaccttctcaagatcagtctc

SEQ ID NO: 117896 - DNA, 1017 bp, Homo sapiens
attaattatcctagagatagtgacttttgtcaaccatgaaagtataggtaacataagcgctagaagttcattaaagtaacttttaaacccaccttaaattatggagcttttactagtatattaagttggtgaaatctaaattcttttctacaaagtcattctgaaaactgctagcataccccaattgaagaaatatattacatttttgttttcttttgatccatgtagaatttgaacaagggtaaattggctagtggatagtgaatatgtgacttgtacccctagctacaattggaaccagcaaggcgttctattcagcaagggagtaatgttatttccatttagcttaaaatcattgactatttgtagattccccgactgtctaatcattagtctcaaaaattattgcttggtgaaagctttttttaaaaaaagcttcaggaaacaaaagtgcatttggtggtatatgaagataacctaaaacaggatatctgtttcatttatgggcctttgtcttattctttggtctgagatgatttttttctgagttgactttttaggtgccacgtgtgccaacgcatacacttgccatggttgtacctccccaggaacctgacagaacttcacaggagaactctcctgcccttttaggagtgcaaaaaggttagttattgaattatttttcttaaaatgggtattttttcacctaattgataaatccagaaatgtactttaatgatacagagttactgtgtacccatggctaattgaggtagataattctgacaaatgcaaatagtcttactatctaaaaccaaaaagacgtgttaggaaaaatgactttttattattttcctgttaacatactgatagttgtagctttcatctggcacagatgaaaacacttaagaaacaagccaagttcttgattatatttaagtaaccacagtttatcagacattcatttttcatttgataattctttagctaaccaatagtaaatgaagagtaaaaatg

SEQ ID NO: 117897 - DNA, 1050 bp, Homo sapiens
acgttctgggcttatagtttgtctattcataaattactcttagtaatcttgtgttccacgcttcttgcatattatttgttaacaagatagacagggccattcctatctgttactgtcctcaaaattctactcttattttggattatactatgtataaagattttaaatctgtgaatgtccagtggggtcataacataattactaaccagtctggttagtgttgaactcttacctagttttcctgaatcttaaatacaaattgcttagtagctatacaagggtgttttgaaactaatggatgtttaaaggaccatggaccattcagtctttgtagaacttctaaatgtactcgagtgatgtcattgaatttattacatgactgaatatttctttgctattgctgtggatttgtacattgctatttgtgaccatttaccttccttttcttgttgattgtcattaggcactttaaacaaatactgtaaatcaaaacagggactcctatatggtcttaggaaagtaataataaaattagctcacaaatctaattgcttttgctctgaaagaataaagtctttttccatcatttttactcagaaagaaatataaattgaggaaggctgaggctggagaattactttaggccaggagttcaagaccaggctgagcaacatagcaagatcccatctcttaaaattatatatatataaattgaatatagacagtgtactttgcaatttaaggaataactaagcctctgaaagtgattgcagtgatattgaaattgtggtcatcttaccttattaaagacagtatgtaggtgaaaaacttagacttttttagtaatgacacatgttgcatatgtttgagctacctgcagttttgagatctctattctagcaaaaaagtagatgaatctctaatttttttttcttcagtagttttgtcacccctttgaaattcagaacatttcatgtctctaaatgatcttttttcctttggacttgagaatcatttttaatacaatggatgattttattttaaaaattc

SEQ ID NO: 117898 - DNA, 1050 bp, Homo sapiens; identical to SEQ ID NO: 117897

SEQ ID NO: 117899 - DNA, 1050 bp, Homo sapiens; identical to SEQ ID NO: 117897

SEQ ID NO: 117900 - DNA, 1050 bp, Homo sapiens; identical to SEQ ID NO: 117897

SEQ ID NO: 117901 - DNA, 1406 bp, Homo sapiens
cttgaagtgttcatttaaatgcaagttgtcctttgcatagtaagtttaacagtgttccagtacagatgtgttaaaggtatatttaatggagaattttagaaagacatgtcttgaaaaaactgatttcacattatatttcaatataagaagaaaaatattttgactgaaaaacactatcccctactttgatctgtaagttttggtcttttgcattaactctgcattgcttgcagagttgatattgctaaaagaatgattgttctaaatgggcagttaacatttctggtattttcaacgctattttgatactgctttagatttggtgttctttaaaaagtccaatctaatcagcagaattttgagattcttgcctcttggttttccttttccccgcccctgacttaatttccaaaatcctcctatcctaaagtagatttttaaaacttcacagtttttgaattagcaacatcctagtttgtgctgcttgaaatagatgagtataggctttaacctgcctaacactggtgtgactctgaacattcattctataacattagttataagggttttgggagggaggtccgtgtgtgtgggaggggaggctggttttcttttttttttttcttttctttttttttttttttttttttagcatggcactctttcaaacatttttcatgtgcttaggtacatccaagcagaagtccagttccctccaggtagcagatcaggacctactgccatcttttcacccataccagcctttggagtgcatagtagaggagactgaaggcaagctgaatgaactgggacaaagaattagtgctattgaaaaagcacagcttaagtcactggagttaattcaaggtgaacctctgaacaaagataagatagaagaacttaaaaagaacagagaagagcaagtccagaagaagaagaaaatattgaaagaactgcagaaagtggaaaggcagttgcagatgaaaacacagcagcaatttaccaaagaatacttggaaaccaaaggtcagaaagacacagtgtctctacaccaacagtgctctcatagaggagtcttcccagaaggggaaggagatggtagtctcccagaggatcacttttcagagttacctcaggttgacacaatcttatttaaagataatgatgttgatgatgagcaacagtctccaccatcggcagaacagattgattttgtcccagtccagcctttatcatctccacagtgtaacttttccagtgacttaggttctaatgggacaaattctcttgaacttcagaaagtatcaggtaatcagcagattgtaggacagcctcagattgctattactggacatgatcaggggctgttagttcaagaaccagatggactaatggttgcaactcca

SEQ ID NO: 117902 - DNA, 1340 bp, Homo sapiens
gtataagattatacttaaaattttcctgctgttgattttcatgtctggaaatttaaaatcacacagcttttttaatttgtaattttattagatcaacttacgtatttccaattaaatgggatgttcagataaaactaagtattccatattataatatttgtggttagaagataaggtgcattaaaatgattgtcacttgatgatttgaagattgggatttttgcattaactttcttaatgaaagcacacaaccacaccacaccacacacacacacacacacacacacacacacacacacacacacagaaaaaaaggcctgataaccttgaagtatatgtttctgtttattgttgtgtggaaaattacaactagatatgaaatgaggtgcacaagtttactttccctttcattgtccttgcagcagtgggaaaacagtgcaattaatcatttaccttcctaaagatggctggtgaatgtatcacctccatgagagcccaattcagaaatgcagccagaatggctgttgacagtggatgaagaccaagaactaagatgtagctggagtgatattcaaaggcaggccagtcctctgtctcttgattgcaacatttttttccttactgttgtctgttgcctcttgtcatattctcctccccttctcccatcccaattatgctatctcagtttcctttcttcttttgtgagcctttagtcttcctgatctttactgaatctttttaaatgtggaataagattactgaaatcaggaattttattgggcatgtgtttgacttccaatggttatagaattgtgatattgcctttgaggctcctctgatatgtaataggtatcattgtgcagaggaggaatgtcttagttttcttaaagaaaattaaaattctgggaaatgttttaaggagttaggctctttgttctttaatttgggtttttatatcttcagttggtagacacaaattaactttgtattattagcattgaaagttgttataaattgtgaataaattcttgtagttcatttggaattctaattttaatctgggtaaaaacagattttagaatgtgaagtatgattacgaataataatgatgaaactgatgaactgggaataacatttttaacatgtagtgttctgtaactagcattataatgttcctaattaagtgcacagtttgcagttatgaaatctgtgttactgattagttcagttatgttagaacttttttttttttaaagaatgtagaaatagctctaaaaggaacttgtaagtgttaaggaacatcaagttttatttcactgaagtatttgttaaattagtct

SEQ ID NO: 117903 - DNA, 1340 bp, Homo sapiens; identical to SEQ ID NO: 117902

SEQ ID NO: 117904 - DNA, 1340 bp, Homo sapiens; identical to SEQ ID NO: 117902

SEQ ID NO: 117905 - DNA, 1340 bp, Homo sapiens; identical to SEQ ID NO: 117902

SEQ ID NO: 117906 - DNA, 1046 bp, Homo sapiens
atgtaggtctgtctgattccaaagcttgtgattttactattactacatattactgctatggaaatttctgtttttgtgtttttctatgtacaaataaccttactcttttaagtggaatttagcaatatgaatattgtttttcagctgtgagtaccagagtgcccactggttccaacagttcttctcagaccacagagtgtcttacacctgaatcctgttcgcagactacaagcaatgtggcttcccaatcgatgcctcctgtgtatccttcagttgacattgatgcacatgtgagtagattgctttatttaaacttattttgcacattctgatcttctttggaaaggaaaattattctgcatttattgtgaaaagaaatattatttgctcttaaattgataacttctgttaaaaaaaattttaacttatttttttcttctcctagactgagagcaatcatgacacagcattaacactagcttgtgcaggtggtcatgaagaacttgtatctgtgctcattgcacgggatgccaaaattgaacacagagacaaaaaaggtaaatatcagtcagaaataaaatccaagtgtagttacatcagaaaataattaacttttttattattgataaatagttcctagactatctcagtgataagatggataagtatatttcagttaggaatatctggattcattattctgcggagccaaataattctcaaaacattcaaaaattagacgtagatcattagtgaaatagagcaagttgtggttgcctttgttaatccaaaggtagttcatacagaggcatcaaagttcattatgagtataaactttaataatttttaccgacttagttttttaattaggtgtttatgggttttttgtcactaacaaattagggtttagagcagttttatgttaactcattatcagtgtctgccctgaaggatttattttgctaaaatactagagaattgtaaacagtggctttaaaataaaataaaaaacataaatttgtttaagattttcattttctgattta

SEQ ID NO: 117907 - DNA, 1050 bp, Homo sapiens
tgagatggagtttcgctcttgttgcccaggctggaatgcaatggcgcgatcttggcttaccgcgaactctgcctccggggttcaagcgattcttatgcctcagcctcccaggtagctgggattacaggcatgcgccaccacacccagctaattttgtatttgtagtagagatggggtttctccatgttggtcaggctggtctcaaactcccgacctcaggtgatctgccctccttggcctcccaaagtgctgggattacaggcatgagccaccatgtctggccggaaattatgttttaaattgtgacattttcttattctttattattggtcgaaacaagtaaaatctattcattgatgttagaaacctctctttttagtgaaaccttttcatctttaatgcttttctaaaataataggcaacatattattttaattttctaagcacatttccccctttaggactgggagtaaactaggtatttctcccctgatgttggctgcaatgaatggacatgttcctgcagtaaaattgctgctcgatatgggttcagacattaatgcccaaatagagaccaatcggaacacggctctcaccctggcctgtttccagggccgagcagaagtagtgagtttgcttctggaccgaaaagccaatgttgaacatagggcaaaggtaagcattttttacttgtcaactatttcagatacatttctgtagaaagaacatggcattttaacgcaaattgaatataatattttaaattatcataaattaaaactgataccaatgcagagttgagggattatgctgtataatagtgagtgacatactgtcaccatcatgacttttattaaggacaatgaagaaaacagaattagtacttttcccaacctcagccttgagtagctttctattaatactgcagcttacaacttttgaatgtagtaagattattttgtattaactcttacactgtagacttttaaagaacacctttaatgaggtatgtgcttatcattgtaaaaatcccaagcaaaaatttaattc

SEQ ID NO: 117908 - DNA, 1063 bp, Homo sapiens
tgagtctttcctgtcattcaatttgtctttttctattacaagtattcattgtgtgccactcatccattaaaggtcctagagaaatctgtgttattttggatagtaccagtaggaaatgtcctttgaaaaaatgttggagactaacgtaccaaaggcacatatgcaaaaaatttataaagtgattttaatctacttatttttaatatctctattcattatgcaaagaaattatctgagtaaattcacaaaagtatagaagttacagaattgtttttagcatgagataacatgttttaagttcattctagcacgtctgaatctaacaatttctactgctgtttagtaaaattcaaggcaaaatattgcttagctcttttatgagagctaatcagaactagaattgtcttaaaagttaattgcctcaggtttttaaagaaattatgtagcttagttttggtctacggaatagttaaaaaaagaaatgtaacttagttgcataatttattggtttaaacagacgggtcttacccccttgatggaagcagcttctggagggtatgcagaggttggaagagttcttcttgataaaggagcagatgttaatgctccccctgtgccttcctcaagagatactgctttaacaatagcagcagacaaaggtcactacaaattttgtgaactcctgattcataggtgagtacttttctattatatgtagaacttctcatggtcattttcacttttcagagcttttaaagttaataacattgttttactttattgatattgttaagaaaagattatttgcaagttattttgtaaaagaagaagatagagaaaactagaaaaagccagcctcttcttacaggaaacaaactattaatatgccttgtttacaggggagcccacattgatgttcgtaacaaaaagggaaatacgccactttggctggcatccaatggaggtcattttgatgttgtgcagttgctagtgcaagcaggtgctgatgtggatgcagcagataaccggaaaatcacacctcttatgtcagcatttcgcaagg

SEQ ID NO: 117909 - DNA, 1121 bp, Homo sapiens
gagtgcggtgccatgatctcggctcattgcaacctctgtctcccaggttcaagtgattgtcctgcctcagcctctcgagtagctgagactgcaagtccgtgccaccacacccagttaatttttgtatttttagtagagatgaggtttcgccatgttggctacattagtctcgaactcctgacctcaggtaatccaccgacctcggcctctcaaagtgctgggattataggtgtgagccaccacgcccagctgattttttactttcttgatgattcctttgaagtataaaagtttttaattttgatggtgtccagtttattttttcttgttggcatttataaatgtgttttgagagtaacatccatggaaatccctgtgtatcataaaaatatcatttcattctttattttacattactgccttattggtaaaattatatacctgctttatttccagtcaagagaagagagcagaaagcaggctcttgctgctaaaagagaaaaaagaaaagaaaagagaaaaaagaaaaaagaggaacagaaaaggaaacaggaagaagatgaagaaaacaaacctaaggagaattcggaactaccagaggatgaagatgaagaggagaatgatgaagatggtgagaaacaaaccatctgaattaacgataaaattctcctttgtttatcaacttcattttgagtgctctttgctctagttaactctagttaaacatttgattactttattaatctgaaatggacaatgacttttatagtaaatatttgtaagtgttttgcattgtaaattaatgcagagaaacaagagggaaaacaagcgcataatttgaataaattcagttgtaatttaagtcaccttgtaaaacactgcatatatactaaaagcaatacagtgagaagtttgccacctttttttgagattcttctctaactcttcctctcctgattagaagtaaaatttctcagtttacttttagctgagattcaggctcaaggatatagaggcctgaaatgtcagtagagatgggtttagtactctcaaagagttatttattgtactgtctggcagtgcttgtagtaggcaaataattttgttctacttggattcta

SEQ ID NO: 117910 - DNA, 1040 bp, Homo sapiens
tgatggatgtgaattcctctaaatacccctcactgctccttcattcccaagaagaaaagacaagtactgctacttccaaaactcagacacggtaaatttttctgatttgttaactctacctgcacctttccttcttcatgcctggtacaagaatttgaagtatattaatccaagtacaagttgtgttaaacaattgaagtctaccacattatctatcttcaatattcaaaactgaaattcacccatgtcctctttatcatttgctagttaggaaatgagattattagaaatttttataggattcatagtctgaagttgaaaatatttgcatgctttgattttatctatgtcatttttattgattatagtctaatttttggcatctgaatccattttaatactaaaataaatgatgggttctttgctctatttctgtttttctgactcattgattatttgatgtgccaaagtttaatacgaatatttcagcgtaactctggctataaaggaatagtctcttgagtttctatcttaaaacttatcttttattgtacttgctatttgtctcttcttagacttgaaggtgaagtgactcctaattccttgtcaaccagctacaagacagtgtcattgccattaagctctccaaacataaagctgaatctcactagccctaaaaggggtcagaaaagagaagaagggtggaaagaagttgtacgaaggtaaatagaattagttccatctttttagctttcatatattttccctttctcatgtgagatggctacctagttaattaatgaataatttgaatgtggttattattttaaactgcattgccacactaaatccagaatatgctaaagcaaaattagaagcagtatgtaaattttgcatgcatattttatatgacacaagaaattttggcttttttggataacctcagttgctttttatgtagttcaaatgtaaaggctttctcttgctttttttctttctcatgtctcagtaattctagaactaaagtactaataatcaac

SEQ ID NO: 117911 - DNA, 1043 bp, Homo sapiens
tttcccagtttctctacccttagcttatcctcaccctcattttgccctgctggctgctcaaactatgcaacagattcggcatcctcgcttacccatggcccagtttggaggaaccttctcaccttctcctaacacatggggaccattcccagtgagacctgtgaatcctggcaacacaaatagctctccaaagcataataacacaagccgtctacctaaccagaacgggactgttttaccctcagagtctgctggactagctactgccagttgtcctatcactgtctcttctgtagttgctgccagtcagcaactgtgtgtcactaatacccggactccttcatcagtcagaaagcagttgtttgcctgtgtgcctaagacaagtcctccagcaacagtgatttcttctgtgacaagcacttgtagttccctgccttctgtctcctctgcacctatcactagcgggcaagctcccaccacatttctacctgcaagtacttctcaagcacagctttcttcacaaaagatggagtctttctctgctgtgccacccaccaaagagaaagtgtccacacaggaccagcccatggcaaacctatgtaccccatcttcaactgcaaacagttgcagtagctctgccagcaacaccccgggagctccagaaactcacccatccagtagtcccactcctacttccagtaacacacaagaggaggcacagccatccagtgtgtctgatttaagtcctatgtcaatgccttttgcatctaactcagaacctgctccattgactttgacatcacccagaatggttgctgctgataatcaggacaccagtaatttacctcagttagctgtaccagcacctcgagtttctcatcgaatgcagcccagaggttctttttactccatggtaccaaatgcaactattcaccaggatccccagtctatttttgttacgaatccagttactttaacaccacctcaaggcccaccagctgcagtgcagctttcttcagctgtgaacattatgaatggttctc

SEQ ID NO: 117912 - DNA, 1095 bp, Homo sapiens
tctttgtgaggaaggaaacattggtagattttgttacttatcttctatagaaaatgactatagttatacagatgaaaagctgtactttgactacaaaagggaatgcaggagttattgttgggtgctacttagttacagcatactcccatttcatatcccctccagttaaaagctttgagattcatctagaacattactccaggtgactgacactcttaaacattgagcccattttcctgtatctagtgctgtttggcgatattcttctggactgtaaggaaaaaatggatttggccatacagtatcacatagatggattgtttttgctgtggtctatgaaaatgagccacatgctatcttttatttatttgtttggttatttttacagcttatctcactttggtggaagtcttcttgggctttcaattttaaagttttagctaattggatgtcttggacctgttttatttcagggttaccatccattgacccatcaggcagctccccatcttcctcttctgctcctctggcaagtttttccggcataccaggaacaagggttttcctgcaagggccagctcctgttgggactcctagtttcaacagacaacatttttctccccatccttggacaagcgcctcaaactcatgtaggaatcctggaggaactcttcccaaagagttttgaataagttattaaatcatttatttcagttacaacaccatgttgtaactttagtaaactaagtggtatacagatgcccaaggtttgttctgtggtcatgtgaaaaaattgtcagtcatttttagcatagaaaacttgagaattattctttcaagccaaaaatgttttacagtagaacttggatcaagaaaagaggtactaggctgggtgcagtggctgacacctgtaatcccagcactttgggaggcctaggcaagaggatcgcttgagcccagcagttggagaccagcctgggcaacagcaagaccctgtctctattaaaaaaaaaaaaaaaaaaaaaagtaccgcaagtagttttacaaaaggaccctttggaagcagtgttgtaaaattatttcttaaatctggaa

SEQ ID NO: 117913 - DNA, 1032 bp, Homo sapiens
ctgaggatgagagggtattatggtgcctccatacatggaaattggcagaccctaaaacagcaggaaaaaagatttaatcttaaaattactataaattataaaattactataaatcccataataccagcttagacttctctaatattcctcatttaaagaactccaaaagatcctataagtacagtatggcagtgttgagaaaacaaaatgtttatctgcatctgcaaagcttttcaacaaaaaacaagagagagaaagaaactaaatccaatatgaaatcatcaggaaatttctcatatttgataaaaataacctcaactttcccatattttagtttcatgaataagcttgagctaagaagaaaatgggaactctacataattgattgccgacataaagctgtcagagcagacaagaaagcatcagtgaactcatggccagcttttaagaggggtagaggcctccctcaaagctgtagtagcagagcacaaagtggcaaaacccaaatccctcaggtgttttcgggggatggggacatcttcaggacaaactactgtggacaactctgtgcactcctgaaattaagcaaaagatctagcaaagccacagaaacaaaagggagcattatttcaatacaaggtattccttaatgtgactacattggctgacaaagtgtcaatcaagttacagtgatgtttgtcaactcactttagaaaaatccacaaaaccacttgccataggctgatgaaaaatgttagagggggctaccattccagaatcatctctctccattggctgatgttgggagaatgtgcttgggtctgataattgttgatgcattggatggttccccatcacagattgcgaccaacctgataagccttctggaaagaataattgaaaacaaagttttaaatttatttggataaaacaacaaaacattaccattgttattaccaaacatgaccaaatgttactgaaatctttcctctgaagagctcaaagcgtatttatcacagtcttgctagccaa

SEQ ID NO: 117914 - DNA, 1547 bp, Homo sapiens
tcaattatgtagagttcccattttcttcttagctcaagcttattcatgaaactaaaatatgggaaagttgaggttatttttatcaaatatgagaaatttcctgatgatttcatattggatttagtttctttctctctcttgttttttgttgaaaagctttgcagatgcagataaacattttgttttctcaacactgccatactgtacttataggatcttttggagttctttaaatgaggaatattagagaagtctaagctggtattatgggatttatagtaattttataatttatagtaattttaagattaaatcttttttcctgctgttttagggtctgccaatttccatgtatggaggcaccataataccctctcatcctcagcttgctgatgttccaggaggccctctgtttaatggacttcacaatccagatcctgcttggaaccctatgataaaagttatccaaaattcaactgaatgcactgatgcccagcaggtaaaatgggcttaatgctcttttgttttttagatttgtcacatcattctttttgttttgtgagaagtataagtactgaatatcaaaagtcataattgaccatttcgatctggattgctttttcaatatcaagatgatgctactgaacactttatttaatatatgtgtattcttcctaggcagaaacagtgaattgccattgcatttatatattcattttgtaactgtctaaagattcctaattagaaattccaatttttcctcccccttttcagatttggcctggcacgtgggcacctcatattggaaacatgcatctcaaatatgtcaactaagttagaaggtctttactctttagccttgtttaagaaacctatgaccttggaagaaccatggggatttttttttaatgtgcctaagaaattttctctgaggctttagcaatggaaatttgattgcccattgtataagaacaaattgatttcctatccacctgattatgttctctggttagtttagccattttgaacttaagatcatatgaccttagtgcttttggctaaacatacagaatactacttgtatgcagaagagaattagttgattacatgtttcaaccttttagggtgataaatacatgtataattgtttacatacttaaaaggaaaaagttgagtaaatttcttgtcatatagtggctctacgtaatgtagcctgtattaatgtgaaatatttaccagaatattcaataaaaagatgaacagtctttagaagtggggtgtgatcctttcagtggtcatgcaggtaccactcaatccacattatattgaaccagatggttaatactatatttgtaacaggcttctcacatttaacacttgagtcccttcttagactgccttaaaaaagcacttttaagactatttacctatttattctgtgttaaacattccttgttcccttgttgtcttccataatcctttaacatatgagaaagtttcaagctctggcaatgtgtcttatctgactttagctagcagataggcca

SEQ ID NO: 117915 - DNA, 1080 bp, Homo sapiens
gaaaagtgaaacccagaaaggtgagatgatttgcctaaggccataaagcttcaagcggcagaaatgaaaatagaatttaggctctgactactgactactgctccactgtatccatgctgtctcctcccatatcccttgtatattttgaaagtaattaagttcttacctgagctaggttttatccaaatgttcaggttggtaaaatagcagtaaagtagtgccaggaagaggcaggcagaggaagaagagatttagcaggtgaaatgaggttgggagcaggctactgggatccaaatagtcagaaagaaaggaaggaagtgctggtaagaaggaagggaggagcgtatcctaaagaactactcccaactatacaactgttgttttcctcccaattttcctagggattcctcataattatctcctttctcttcataaattctacttactgacctgaaataaaatttctcatttggttgtcctcaaggtgcagaatatggacttaaggctcctccagacaattcaaatgtattgtagacagttaagatagaataaaactcacctttttgtcccactgaataatttatttaatattatttctcactagtatatatttcatcaagagtagtttcattcatttcaccaattttaggtgatttttcttgttgctgttaatggtaagtggaaacagcaagatacacaggtgatccaaggagtcttttgtgccccacccaactgcccccacaaaggtcaaggggccccttaatgatacttgatgtggttatcaatcactacaaagtagtagcttcaataaacaacactttcaaaatccattcaaaacaaaacataagacataagcttaattaaggaagctttctcatatgtaagatgatatagaagattaaagaagcaggtatatctgacacagaacaaacatggtgtgtctgatgtggtcctggctttaggacctgggcagagaaaattaagaattcctgttggcataagcgtagaaaggtgctgctaatatagttctgtccctagttactactctttctctgtgcatccttctttgccttgatatga

SEQ ID NO: 117916 - DNA, 1273 bp, Homo sapiens
gtctgctgagaacctagctgggcttcagagccgatgtcctttgatacacagggaaatttgacaccaccctcacctccaggccccaaaaggcctgagtctgggaccccagtcacctcggtacccaagctcctgactcttacctcagtcccaaccccttgacaggcaccaggatcatctacgaccgaaagttcctgctggagtgcaagaactcacccattgcccggacacccccctgctgcctccctcagattcccggggtcacaactcctccaacagcccctctctccaagctggaggagctgaaggagcaggagacagaggaagagatacccggtaaggaaagcaggaattaagaattgtcccagcctttgagttcaaatgccactgtgacacagtgcgggggttcagttccaagaggggtttctgcactgatgctgagcctgcagatcctcagaccagcaacctgtcttcctgccttttctctctccagatgacgcacaatttgaaatggacatctaatccagtgcagatgacctggcatgtggagttacagagggatccctcatgccactgctgccaccacctcttcctggggcatccaaaggccagctggcctcatctaatctggaagggagtgacttgttagttccaggcctcctttagttctgaggcagctagaccagggataggagtgggcaacttgccaagcccttaactctacttcctcttcagtctgtggtactcctcctaaccctaaaccctctatgctcaggggctggaactggggaatggagtaagtcaccttctgactgcttagtaaacattcaaagaaatgccttggctccagtgttctcctcaatgctgattttctcatctcagccacacagctgaaggccctggcaggcctggttaagctcagaggcctcagatcattcccagctcccaccaggcccacttccagcagcaattagaacctgaggcacgctacagtggcaggttacatgagcctccaaaccataaacagcaatagcttggccactgccaagggctgttcctgtcttcccaggaagcagccttcctggaaccagggccccccagcagcccctcccctatccattccaaagcaggactcttggaaaagaggtgctgtcccagcctatagccatcctgtctctccctgtgccttttctgcttcccacctctaagcaccagttcctctattccaacaccaaaaaccttgtacccttctcacagcatgatagtccaccaagta

SEQ ID NO: 117917 - DNA, 1073 bp, Homo sapiens
cagttagggagaaagaaacctcttctagctatagtgttttcttagttcttagaaaaagagatctgaagaatgtcttaaaagaaagggaaagtagcatggtcatttcacctctttggcgcttagttttctttttgtgaagtaacgctacaggatgagcttctgagagtctgagaagcccctgaaattttagaattctagtcatagtaggaggtgggttaggaagactggtggtgggaagatgagagaattcctgtttaatgacctctacttttcaatgaaacatcaggcagtgtcagaagaagacagcagggaaaggaaggtttcatcagtttctcagtggggcctctaatctttgggtaaagaaccagaattctaaagtgtgggccagagaaagcaggtgcttcctatgtggtgctgtcttcccctctcctcccctcattgggctggcagcactgaattggaggggggcttctgtctcttagaagcaggtatgtgatgacatcagccgacgcctggcactgctgcaggaacagtgggctggaggaaagttgtcaatacctgtaaagaagagaatggctctactggtgcaaggtatgggtgggttctttggtatagcctaaatccctttcctgctgtggttggctatgctggagcaggtgctgagattttgattgactgggaggggaggcatggaagctcttgtaccacaggctgcttgctcaacccccgtctctcttcagagctttcaagccaccggtgggacgcagcagatgacatccaccgctccctcatggttgaccatgtgactgaggtcagtcagtggatggtaggagttaaaagattaattgcagaaaagaggagtctgttttcagaggaggcagccaatgaagagaaatctgcagccacagctgagaagaaccataccataccaggcttccagcaggcttcataatcctcggttccccagactcaccggacaccatctcctatgccttggagaccttctgtcacttggctcccttcttaccaccaccaagactgtcccactgggcctgacccacctatgagggaag

SEQ ID NO: 117918 - DNA, 1045 bp, Homo sapiens
gtaggcatcctcaccggcccttggagctccccacgccccacacacggatgtgcaccagaggctggcagtggatcagactgtggtccaggggattcactaggctcatggcatccttcttcaggatcatcagcatgttctggccctgccaaggacagaggtcagcccagagctcagataaaggtcattgccatgagaaataggaaattcagggacagctacctctgctgggccctgggcccaaaccattaaagggcccagccaactcacctcaccccaggcaccatctggaggctggctccggctgcgggtctgggccagctgctggatacagttattgactgcaatactgctcttccccggtgccaggtcctcttcaggtacctctacccagcccagagagcggactgcaaagcactgacaggttgggggaagggacaggaattaataaggatggagtagggtggcaggtgccacaatacatactccctgtcttcacccttgatcacctctgttcagtccaatcccacccttgtctttcccttgggacctcccaatgccctcaggcccaagtcactaccttagcccctggctccatgctctggatgtaggattccccaccataccaggacagagagttactgaaacagagcagagctgttaagaggaccacatttcctacagtagggacactggtgaggcctagacaacttgataagcacaggatgaggggcaagacccagaatatagcaccagaaatataaaaccagagcagggtagagcccaggacatattaacgtaacataaagtgtgactcagaatttgagggaaaattcaggacataggacccagacacaggacatagaataaaagtcacaaggctaggtgcagtggtggctcacgcctgtaatcccaacactttgggaggctgagacgggtggatcatgaggtcaggatatcgagaccatcctggccaacatggtgaaaccccatatctactaaaaatacaaacattagctgggcatggtggcatgtgcctgtagtttca

SEQ ID NO: 117919 - DNA, 2642 bp, Homo sapiens
caggagccgcagaagaaacaagggacatcctcactcctgagccgctccagagtcgcttctccccggaactaaaaaggtcaaggagagtgaagaccacgcccggctgcagatcacccccacggccactcaccttgtcatccgccatcttccccgccgaacttgttgcgcaggcgcatccccgcctccctcgtgccgactgccccggccatctttacggagggcgaaggcacttccggagcatttttggaaagggggaggtgctttcctagtggccaagtacgcctctctcagatacttccacgtgaccccctcccgtcgagtctcaggctgcgtgtgagcgcactcacgaccggggcgcgatgatctcactcgtgcgcgagtgcgcgcggcgcatgttcggcgtgtcggtcttcaggcgcctgatgagttcatagttgggcggtggtgtcagcggtttcgctggcgttcgtgggcctcccccggacccacacacggaaacacgcaaccattcggggatccagacgcccgtttacacgcaccacccctgggcgggctgtgcggctcaggccctcccccgggaccggcccgtgtcccgccccgtgtcccgccccgtatttgtgcggcgccagctggccccgcagcctgcggcgcagagaggctgggcttgcaggcgcagtagctccagaggtcgcgctgggctgagagtgcgggccggcagaggctggcggggagcagccggggttatgctgggcaaggattacatgctggccatcattctggtcaactgcgatggtgtgcacggaggggcccggtgggaagaccaggagctgagggaggacgagggaatccgaaaggctactctggggctcaaagacggtgggggatacctctctgtgtagggaccagggggcgaatgaacccggtctttacatgtgatgtcttcaagattgaggagcctggatcttcagcctaagaactgacccattttggggatggagaggggattatgacagcatgttattctgaactcacaaatcatatgctccctcctctctaatccggtgttcctgtagatgacttgtggggggaccacagtctggaggtggaggctggcctgcctcctggctggaggaagatccacgatgctgcaggtacttactactggcatgtacccagcggtagcacccagtggcagcgcccaacctgggaactaggagatgcagaggacccaggcacggtaggtagagtgtgaggaggaggtctgagcccatgtgtggacctaggtctgctgttaaactgactaactcccactctacagggaacggaggggatctggggactgcggccccccaaagggagatccttctccagcctggagagttcactggaccggaggtaacgggtggcccaggcaaaatgaaaggcttggggttccatggtgttcaaaaatgcagctggacccatggtctgctttccagcccaggttctggattctgtcacatgttttgggttctgttacgttcttggctctgtcccaggttcttaactgtcagtattttgagttttatcccttgttctaagctcttgtttgtagctacatgtttttcatattcttggtcctaacctatcatgttctagaccttggccattaagtcctctgttctagggtctcttgtcccactttggggttctggtccacatattggaccctgttctattttgtgacttttattttttattttttgagatggagtctcactctgtcatccaggctggagtgcagtggcacgatcttggctcactgcaacctccgcctcccaggttcaagtcattctcctgcctcagcctcctgagtagctgaaactacaggcacatgccaccatgcccagctaatgtttgtatttttagtagatatggggtttcaccatgttggccaggatggtctcgatatcctgacctcatgatccacccgtctcagcctcccaaagtgttgggattacaggcgtgagccaccactgcacctagccttgtgacttttattctatgtcctgtgtctgggtcctatgtcctgaattttccctcaaattctgagtcacactttatgttacgttaatatgtcctgggctctaccctgctctggttttatatttctggtgctatattctgggtcttgcccctcatcctgtgcttatcaagttgtctaggcctcaccagtgtccctactgtaggaaatgtggtcctcttaacagctctgctctgtttcagtaactctctgtcctggtatggtggggaatcctacatccagagcatggagccaggggctaaggtagtgacttgggcctgagggcattgggaggtcccaagggaaagacaagggtgggattggactgaacagaggtgatcaagggtgaagacagggagtatgtattgtggcacctgccaccctactccatccttattaattcctgtcccttcccccaacctgtcagtgctttgcagtccgctctctgggctgggtagaggtacctgaagaggacctggcaccggggaagagcagtattgcagtcaataactgtatccagcagctggcccagacccgcagccggagccagcctccagatggtgcctggggtgaggtgagt

SEQ ID NO: 117920 - DNA, 3606 bp, Homo sapiens
cccagatgtcccctcctgggaaccatcacgaacccgttactagcacagactcaaaaacattcacccttaaacactcctcactttaccccattccctagctcccgaaattttcttcccagtgacacgatgtttccaatcacacggacactcacaccaccctcattcaaacactcctttgcatacattctgaatttcatacttatatgcgatcaaaatcactcagtccatttacttacacacttgccgacagtcttttttgtcattctcagtcacatccagtcactcacattcagtttgggatgtccttgggaagaaagaggtaaagcccatccaggaaccaagacaataaaattgtccaggaaactgcctcggtccattactcaccattggtctagaagctcagcattacccacacatttactaaatgtcaggcactagaacatagtagccaagacagactggtcacgactttcaaggagctcataatggagtcagtagtggtttcctgatggacctaattaaaggtccctagctgtccctcctgcctttcctacatactgcttgctatataaaattcttgtcaaggttgatgtaagttactggttcagatcccatctgtcagtcccttcctggccctcatttgaattctgtgcttttcaatgcttgtctttctttgccactgccatctcaggaagcttttataggaaaaggtctttctggctcaccccatcccctcccaattcccagcttctgatggaattgagcaaggggtggggcttagtcagactgctggagccagcctctcgcttgtcctaggattctctgcctaagcttaaggacctggcatttctcaagaaccagctggaaagcctgcagcggcgtgtagaagacgaagtcaacagtggagtgggccaggtaaggactgtcccaccccacccctgccttaggctttattgcccaacatgctcttgagagtgttaaatggatggtagagatttcttcagcaagtgattattgagggcctattctcagtcaccctaaggacaatttttctgaatggcacatgaactaatatcttaagtagtggttaagtaggtgaagaggggaggaaagaacattccaggcagaacagcatatgtaaaggccttgtggtaggaagtagcattataaacatgaggggtgaaaggaggtccatttggctacagtagttggggagcatgctaggaaatgaggctggagaaaccggcagggctaggggcatctctgaccttgtgtggcggtggagttctatggttggagctttctgaccccagggttctgagattgtgtgatcagaactgcttggttctttttctggccccagaaccttgggaaaaatctggagaaaataccacggttgtccagggtgaggaggagctggtggtggaatgctctaatcccagcttgagtagcccctggacagtcaggaaggagcctagctaagtttccttctgcatttttctctgcaggatggctcgctgttgtcctccccgttcctcaagggattcctggctggctatgtggtggccaaactgagggcatcagcagtattgggctttgctgtgggcacctgcactggcatctatgcggctcaggcatatgctgtgcccaacgtggagaagacattaagggactatttgcagttgctacgcaaggggcccgactagctctaggtgccatggaagaggcaggatgagcagctcagccttcaggtggagacactttatctggattccccagctgtcatccatttgctatctccaactttcctgccaccttcatccttgcctcccttcctgcagattgtggacagtagttcctcagcctgcaccctggattccttcttccccttcctagctccatgggactcgccccaagactgtggcttcaaggaccaccagccccttactcttcaagccctgactgtggagttggtagatgcctctgatcctcagtattctctctggcaatgttccacggcttctccttcctgggagctggctccataacttgattttccccaaacgtgttgcaatccctgctgccccttagccacccagggtcttgtgtgggtatgagtgtagaggatgggggtatgccaggcctgggccgtcccaggcaggcccgctggaccctgatgctactcctatccactgccatgtacggtgcccatgccccattgctggcactgtgccatgtggacggccgagtgcccttccggccctcctcagccgtgctgctgactgagctgaccaagctactgttatgcgccttctcccttctggtaggctggcaagcatggccccaggggcccccaccctggcgccaggctgctcccttcgcactatcagccctgctctatggcgctaacaacaacctggtgatctatcttcagcgttacatggaccccagcacctaccaggtgctgagtaatctcaagattggaagcacagctgtgctctactgcctctgcctccggcaccgcctctctgtgcgtcaggggttagcgctgctgctgctgatggctgcgggagcctgctatgcagcagggggccttcaagttcccgggaacacccttcccagtccccctccagcagctgctgccagccccatgcccctgcatatcactccgctaggcctgctgctcctcattctgtactgcctcatctcaggcttgtcgtcagtgtacacagagctgctcatgaagcgacagcggctgcccctggcacttcagaacctcttcctctacacttttggtgtgcttctgaatctaggtctgcatgctggcggcggctctggcccaggcctcctggaaggtttctcaggatgggcagcactcgtggtgctgagccaggcactaaatggactgctcatgtctgctgtcatgaagcatggcagcagcatcacacgcctctttgtggtgtcctgctcgctggtggtcaacgccgtgctctcagcagtcctgctacggctgcagctcacagccgccttcttcctggccacattgctcattggcctggccatgcgcctgtactatggcagccgctagtccctgacaacttccaccctgattccggaccctgtagattgggcgccaccaccagatccccctcccaggccttcctccctctcccatcagcagccctgtaacaagtgccttgtgagaaaagctggagaagtgagggcagccaggttattctctggaggttggtggatgaaggggtacccctaggagatgtgaagtgtgggtttggttaaggaaatgcttaccatcccccacccccaaccaagttcttccagactaaagaattaaggtaacatcaatacctaggcctgagaaataaccccatccttgttgggcagctccctgctttgtcctgcatgaacagagttgatgaaagtggggtgtgggcaacaagtggctttccttgcctactttagtcacccagcagagccactggagctggctagtccagcccagccatggtgcatgactcttccataagggatcctcacccttccactttcatgcaagaaggcccagttgccacagattatacaaccatt

SEQ ID NO: 117921 - DNA, 1185 bp, Homo sapiens
aaattagccgggtgtggtggcgggcacctgtaatcccagctactcaggaggctgaggcaggagaattgcttgaacccaggaggtggaggttgcagtgagtggagatcgtgccaccacactccagcctgggtgacagagcgagactccgtctcaaaaaaaaaaaaaaaaaaagagagagaatgggctcccagctgaggctggacccatgcaatacattgctcaccgtagttaataataaatgcctacagtgcccccgaaagcttccctgaaacaacccattgcggccatccagaatcagccaaaattctatttggacttgggcttcctagatgtgtttgagacctattgtattaattctaggcataccaaatgtattttgatcatatctctttaatactcttcctgtcttaacaagactaagataaagacaaagatcttttattttactttggtagcctccagggtgcagaatagttaaagacacctccctctctctcttcagcatttggccaagagacgaatgtccctttgaacaacttcagtgctgatcaggtaaccagagccctggagaacgttctaagtggtaaagcctgaagcctccactgaggattaagagcaacagccccagagcctgggctctgctggacttagtataatgtgaaaaaaatgtgttctcctattcctcataaagcttgtgctgtaaaatactttctcagggtgttcttgtcctcatctaccctctaccccttactgtgcaaccactgaggcaaagtagcttaatataaaaataaaactttattctgtctcatcaaaagctaccagctgctgaagcaaacatgaagggtggcgggggggcagggattctagggccccagagtaagtagaccacactgagtcccttttggtcctcctgcctggatagtgctgagtggaaggggaggagctgggacccaaaggtcttggcttaggtgtgggagcagagaacatgagacctcattatggtcctaaatctccaaaggctctactggacaaacaagcttgatgttaagagagaggggaatgagtgacattgagaaacaagatcacccttgaagagctgtctgctggagagcatacacacgatcctggagctgggcctcttcctgatgcctttccagggcttgcagccctgactgctgcaggaag

SEQ ID NO: 117922 - DNA, 1036 bp, Homo sapiens
gcacctcagaatcaacccacactgctttgcgttcgcagcctttccgcttcctgtttttccctccgaccaaccccgagcgcaaagaaattgacctcgcagcggtcctacaatacttttatatcattggccaagctttaccccgcccctgcctcatgcagcctatgggctaggctttagggtccgcggttggtcagaccggagcacttggcctgaagacctggaattggcgacttcgatattaacaaggatggcggcggccgcagcaagtcgaggagtcggggcaaagctgggcctgcgtgagattcgcatccacttatgtcagcgctcgcccggcagccagggcgtcaggtgaggcgcggcgtggtgaggcgggcgggcttcgggacgccagggtcacgacctcgacctccctgaagttgagggaagcccccgcccacagcacgcgcggcgctctctccggccccgcagggacttcattgagaaacgctacgtggagctgaagaaggcgaatcccgacctacccatcctaatccgcgaatgctccgatgtgcagcccaagctctgggcccgctacggtgagtgcgggacgccaggggtctggggctccggtaggggaacaagggtttgagaagagaagggaccgcccaaggtcgtgcagaaacccgtggagaaactagaactcggactttagccttgctgttgatcttgtttccatgaagaaatttatattcgcagggttatatgatgcgttgtattccgggcaacataagtatgcaggctgaccgaatcctgcgtagggaccaggagctgacgtttttgtagttaagaatgggcttcagacaggagagaagttagtcaatatagtttctccaaataacgtgtagccagtgtcagtccaggtagtgtgtgagaatctcagtaattttgcacatagagctgggccctgtgctgagtgcttccctgcctaactcatttaatcttcattagttaggaggaagcgtgttcttcttttctcactgtagagattagaaaacgg

SEQ ID NO: 117923 - DNA, 1050 bp, Homo sapiens
agcgccgcgcgtgctgtgggcgggggcttccctcaacttcagggaggtcgaggtcgtgaccctggcgtcccgaagcccgcccgcctcaccacgccgcgcctcacctgacgccctggctgccgggcgagcgctgacataagtggatgcgaatctcacgcaggcccagctttgccccgactcctcgacttgctgcggccgccgccatccttgttaatatcgaagtcgccaattccaggtcttcaggccaagtgctccggtctgaccaaccgcggaccctaaagcctagcccataggctgcatgaggcaggggcggggtaaagcttggccaatgatataaaagtattgtaggaccgctgcgaggtcaatttctttgcgctcggggttggtcggagggaaaaacaggaagcggaaaggctgcgaacgcaaagcagtgtgggttgattctgaggtgcactgtgggaaagagcttgtcgctgcggtgttgctgttggagactcgattgttggtgacagcgaaagaacgataacaaaatgccggagcgagatagtaaggctcaggccatccgttatttcttccccatggcacttggggcacttggcgcattattgtagcttctgagcttaagccgggtgtgtgtgtgtgtgtgtgtgtgtgtgtgtgtgtgtgtatgtatgtatgtgtgacgcttgagcccggagaagccacagggtcctaagtgaggccgacagctccaaactccgtccccagtcctcactcctactccaagtgatgatgggcggcttttgtgcgtggatcgctttcccccagtcctgtccccatacttaatcctgggttgcgcgtatttatcttttacgtagtattttagacgtgatcttccggaagtcttctctgatcctccagcgcaggattagggtcctctgctttgtgctcccacagcttcttgtagtttcctatttcagcacttattacattgtgttgacactgtcgctgttctaacttttgttctgtattgttcactactatatctcaaatttttgcataggatctgac

SEQ ID NO: 117924 - DNA, 1088 bp, Homo sapiens
tgacggccatcatcattattatatcatcatcgttatttatatgatacgaaagtttcaggacctggtacttggcttttcctttattctgagagtggaccagcaaataatacgttcttttcagctgaaatttagaaggtggtaaaaattcagaagattttctgatttttgtgtggaaaagtcttatatctatagagaattggtagagttgggtggtattaaaaagttctgaagtgacagatggagtgtcccaagttggcactggaaaagtatatctataagctggaagaagttgtagttctgattttgagtaactacgaagaggtggccagcagttctatcaggacagacatgagcttttccccatagagagtaggttggagatgtagggaagcaagcaggaacagttctgttgaccttgaggtagcagctgatgagccttatacatttgcctttctctggtcacagttattatgccaagctacgccaacaagaaattgagagagagagagagctagcagagaagtaccgggatcgtgccaaggaacggagagatggagtgaacaaagattatgaagaaaccgagcttatcagcaccacagctaactatagggctgttggccccactgctgaggcgtgagtactgagggaacagggcatggttccctcagcatccgagagtcatgcaaatacaatgtgaactcttcctcttactttcctgccctggagcctacaataagcgatttcagaggcatttgccacccacaaagggctgttcttttttttttttttttttgagatggagtctcgctctgtcacccaggctggactgcagtggcacgatcttggctcatggcaagctccgcctcccaggttcatgccattctcctgcctcagcctcccgagtagctgggactacaggcgcccgccaccacgcccggctaattttttgtatttttagtagagacagggtttcaccgtgttagccaggctggtctcgatctgacctcatgatccacccgcctcggcctgctgaagtgctgggattacaggcgtgagccaccgcacctggccccccaaccccctttccc

SEQ ID NO: 117925 - DNA, 1105 bp, Homo sapiens
catatgtcatttatgtctcctcaggtagattgaaagatttttcagtttggggcttatgagttaaaagaagtaacatggttagtgattaaaagttcaaaacttggagtcagagagacctgagtttaaaccttgatgatgaaacagcactaagtgtatgattttaggcaactgactttgctgtttgttcatctgtaaaaattgggttactatttaccacatgactttattgtagggatgaagaaaaatgaaatctataacatgcctatcatattgagcaggtagtagagctgttttttccatcatcatcaatattaccttaaacttcatccttcttcctcacaggacttaatacaatacaggtgcatagtgcccttgaagaggcaatgtagaagagtggacaggagcccaggctttggagttacatggcctggttccattctttgctccattacttagtagatacatgactttaggtaaattacttaaatctcagccatagtattcttatcagtaaaaaggataataatatccacttcatagggctgttgcaaagattaaatgacgcaaagcttgcatagcacttggcatggtggctagcacagagtaagcacataagtgacagctgttcttgtagatcctggctacttgctgctcttctccttattgtaggccgcaatgtttaccgaatgctttttaagagcaaagcatatgagcggaatgagttgttcctgccgggccgcatggcctatgtggtagacctggatgatgagtatgctgacacagatatccccaccactcttatccgcagcaaggctgattgccccaccatggaggtgagtgaatggaatcctgagagcctatcatgtgagcctcaagcctgggaatcagcctggcctctgccccgtgtcccttgtccaccatgtcaccaagtgctgttcacttttacctcctaaatctcaactgaatccattcacttttccactttttcaccaataacattccagtctaagctataatcatttgctggaactattaacttactatttttttagagaccaagtctcactctgtcacccaggatggagtgcagtggtgctatcttggc

SEQ ID NO: 117926 - DNA, 1184 bp, Homo sapiens
cacacccggctaatttttttgtacttttagtagagatggggtttcaccatgttagccaggctggtctcaaactcctgacctcaagtgatccgcccgccttggcctcccgaagtgctgggattacaggcgtgagccaccgcacccagccttgacccacgttttaaacagaagatgtttaaaagggcattaagagctggagaggatggtgaagttcagtggaaattaactgaggagtatgttcctgactcctctctttaaatttcagggaagctggaagagaagaaacctcctgaggctgacatgaagtatgtatcctagcccctggcatctgatcagagggagggggtctgtacatttcttgtgtctggcattttggggaggtgctgacatgagaatctggagaaatggtcagggggagtgaaggtgtatgtgtgaatttggccagctagtgatctccattttcccagtatttttgaagacattggggattacgtaccctccacaaccaagacacctcgggacaaggagcgggagagatatcgggaacgggagcgtgatcgggaaagagacagagaccgtgaccgagagcgagagcgagaacgagatcgggaacgagagcgagagcgggaccgagagagagaagaggaaaagaagagacacagctactttgagaagccaaaagtagatgatgaggtgagatgtgggcccttagtaccaggtgatggagttgcccctctctggaaatgtgagcaaggttgggtaaggaattgtttcaaacttgggggagggatgagtaggaatctctcatggtaacactaacttcacattttgtgttctttccagcccatggacgttgacaaaggtgagttgtacacacagcatctcacagttgctctagcagtcctgctttcccctggtagggctcagagctggcaacggtgggattgggggacctcctggttctgggttcttgtaagaactgtgtcttgctttattgaataggtggagttccctccaccttcctgggccatggcagggcatatttgctcttagatataattcctgtggccctggggttctgaggaggtgaggtagaggtcaagtatggaatgttctggataccctaccctcatctcaaccagagtgactcattaattggagtttgtttaaaactttgttagaca

SEQ ID NO: 117927 - DNA, 1255 bp, Homo sapiens
tctgggctgatgatcagaaaatgaaagagaaattctatgcttgagtgcaaccaggccttcctagaggacagagctcccagagtccccccttcagaaaggtgaatccctgaagaccgctggctaaccctctccctgcaggattttgacattgctgggaactttgatcccatgatccctgatgcagagtgcctgaagatcatgtgcgagatcctgagttcacttcagataggcgacttcctggtcaaggtcagagctgacaaggctgggagggcaaagttgggcctggcctctcacaagagaagatccttgtgcagagggaccagtagcctaagtgaccatgactattgcaggtcatgtaagaaaagagattcccccctcactatgcattggttccttgcaggtaaacgatcgacgcattctagatgggatgtttgctatctgtggtgtttctgacagcaagttccgtaccatctgctcctcagtagacaagctggacaaggtaacaacccaagtacttgacttcttttcccagatcccaccctgccttgggaaatggaaaacaagattgagagagagagaggtgcatgcctctatacccaccagaggaaggttagccccaggatgtaggctcatgggcagctactgctctaaaacggttccccgaggacagtacacacttgctctgtggtgcggaagctgcccaggggtccctgactggtgtctgtctgcctaggtgtcctgggaagaggtgaagaatgagatggtgggagagaagggccttgcacctgaggtggctgaccgcattggggactatgtccagcaacatggtgaggaacagaaccaagcctccccagcagccgtcccactgccctcagtcctaaagttgaaactgttctgtgttatgtatgtaggggagtgagtgtgtctatgcatatgtacacacacatgcatgggcgactagagtccaggcaagaaggtcaaccctccttaccttttttgtttccttgtcagcctcactcacaagtctgtctccccaggtggggtatccctggtggaacagctgctccaggatcctaaactatcccaaaacaagcaggccttggagggcctgggagacctgaagttgctctttgagtacctgaccctatttggcattgatgacaaagtgagtcaagttggggacgggatcccttctgagctctggggcttcaggtccctgatcttaatctggcactgaccattttcttatctccac

SEQ ID NO: 117928 - DNA, 1088 bp, Homo sapiens
gtgcaatcttggctcactgcaacctccgcctcccaggttcaagtgattctccctgccttgagcctcctgagtagctgggattacaggcacctgccaccaccatttgtttgttttattgagacagtctcactctgttgcccaggctggagtgcagtggcacaatctcggctcactgcaacctccacctcccaggttcaaggatcctcatgcatcagcctcccaagtagctgggactacaaggggcgtgtcgtcgcacccggctaatttctgtatttttagtagagacgaggtttcaccatgttggccaggctggtctcgaacccctgacctcaggcaatccatctgccttggcctcccgaagtgctgggattacaggcgtgagccactgtgcctggcctcaggtaggtgtttgttattaggccaggaaatgttctgttatctgagagagagtgtttagaaaaatggcttaaagaaaagagttctaagaattttagaaaatagacccaaacttaaaagggaatggagtttggaaggcagatagcaaatgggtgtgggaattaatagggaattatttgtacttgttttaaaactcagtggcctgtaggaaaatctgtttagagcaggatttgctttttcattattgaggtcatccttttatatttccaaaacatattgttcttggttttcaaacctcatttctggttctctggctgatttcaactccaagggcacaagagactatagtccccggcagatggcagttcgcgagaaggtgtttgacgtaatcatccgttgcttcaagcgccacggtgcagaagtcattgatacacctgtatttgaactaaaggtgaggaatgggcaagaagaaactacatggtagatgagtgggcatttgaataacaaagaagatgacaacaagagagtgagggtccaaagggcccactcctgttgtggacacagaccagtctttgctccaataagaagggggacaagaatggcttggagggagaggccctgtcttttattatcttggttgtggccagcagattccaaaagagagccattctttggaatggtaattgttctgg

SEQ ID NO: 117929 - DNA, 1010 bp, Homo sapiens
ggagccggaaataatttttgtgctcggcggaggctctctaggcgtgcgacccagcgactcgatagccggaagtcatccttgctgaggctggggcaaccaccgcaggtcgagacagcaggcggctcaagtggacagccgggatggcagagcgtgcggcgctggaggagctggtgaaacttcagggagagcgcgtgcgaggcctcaagcagcagaaggccagcgccgagctggtgagatttaggcagcaggggagagggccaaggcaaagcctgggaggacgtaaagccagggtgttcgggacatagggtagagatgtgagggaagcgaccagtcttgtagggaggagagtgggctgcgtggggagacatccggggtgggtcccgagagaaacaaagctaggcctgagcagagagatgtgatgagggaggaatattgaatgaatggcgggggagggaggagagtgacagatggatagctcagcgccttctttccctccacagatcgaggaggaggtggcgaaactcctgaaactgaaggcacagctgggtcctgatgaaagcaaacagaaatttgtgctcaaaacccccaaggtaatatcattcctgtagggagccactgagaaagtctctaactctactcacggggcgcttatgtctgcctccctaaaccaggtcattgaggaggatctgaaatgctgcagaggagaggacagtcgctctgggcgctgggctggactggactctacctgagtcattctgggatggcaaagtgatggcagaaactaggccagctgggtgatcaggggagtcagcctgctgctgctactccttcgttcattcaataaatgtgtatttagcgctatgtctctagcactatacaaagcactgaatatataccatggtggacaatatagcctaccctcatggagcttacattctactgaaggagagagacttagaacaaataatcccacacagatttttttgttttttttttaaacagagtatcct

SEQ ID NO: 117930 - DNA, 1050 bp, Homo sapiens
aatggtgctttggcttcctgttgctcagggtgaagagtctttgcaggttggtggtcaacagggtcagagatgccacaggtctggccagtgtccagagaagccacatctcacattcattcttctgccaggttgcagaggcagtgttaacatcccaactgaaagcacatcaagagaaaccaaattttattatcaagaccccaaaggtaatactttttgcctaccctatcccattagagtgccttggaggactgacctctgccttgcatgtctctctgaccccttttaatgttctttacagtaaattttaaaaatatatactattcttgagatactaggtgcggctcagagtcatttgaactcagtagatttcagctccagacctgagattacataataagtgtagtttaactccttgtctgaaatggacttattttttgtttttgttttcactatggctgcttttggtttccagggtaccagggatcttagtcctcagcatatggttgtgagggagaaaattcttgatttggttatcagctgctttaaacgtcatggagcaaaggggatggacaccccagcatttgagctgaaggtaaggggagaagaaagagtacgtgcaacctcactcacttcttcaatggcgttcagtgtcccaaagggcttctcatctgtgttttggagtcatgctttcaactgtggctcattctgtttgacccctataggaaaccctgactgagaagtatggagaggactctgggctcatgtatgatctgaaggatcaaggtggagagctgttgtccctccgctatgaccttactgtatccttttgagtactggagcctgacctgtctctttccaaatccagcgggctttctctgacaaaagtggagaacgtgactttgggatcttagaggtccattgcctatacttctagtttctcccagaaggcagttctgctacggaagcctggcctggagccctgtcatttaactctagtgtgtatcataatcctttgggggagcttgcagaagcacagacatttggctgcag

SEQ ID NO: 117931 - DNA, 1082 bp, Homo sapiens
ttggcctaatactgtttatgcaagtcccaaacttgggtgactccaacccttaagcctgcaactgtaggactttcctagtaaagctgttgtatttcctatatgtctgtactcttcctgtgaaatttccatcctttttgtgtgtcaggaaagtaggtactgccattgttttgagtggaagggcattgacaagcacttgggtcactgacattgagttctcaggtaaatgaccggcggattgtggatgggatgtttgctgtctgtggtgttcctgaaagcaagttccgtgccatctgctcctccatagataaactagacaaggtaacaaagaagacatacttcagtagaccctatctagcttctgccctgccctcaaatccataccactagtgaaaaataaggagattgtggctggaagtgggctattttggggtggaaggtaaggaggcatactctgaaggaagatctgagtcatgctatacagtggggattgtgactggatttcttaagctgtctctgactttgctgagtatacagttagctacttgtgatgtatatactgaatggaagttgagttgtcctttttcagtttgagaaagaaagatcttggggctgggctaatgtttgggtgtttatgcagatggcttggaaagatgtgagacatgagatggtggtgaagaaaggcctggctcctgaggtggctgatcgaattggggactatgtccagtgtcatggtaagaaccagggttttcagagctgtgatagaaccaggctgaaggtgacatgtgctcaaattctacctctgaaacaactcttttctgtagatatgctaagctccagggcctgtcctgaatttaatttctcttttacttattgtaacgactttgtgtcttcagatggcaaagctagaggcaaaggaggagggtcttgtcatgtgagactgggatcttttttttttttttttttttttaaagaaaatgaggaagactagctagagcacattagggataattttgaatgaaacacatgtgagtgaacagcagagactttatttctctccaggtggggtatccctagtagagcaa

SEQ ID NO: 117932 - DNA, 1047 bp, Homo sapiens
ttgctggctttaaagtggagaaaagctgtagagttgaggattgcttatgatttcttcctgtgttgagattctccccagctgctactttaagtgtctgttgtgtcctttcaggaatgattttgaaatgagtaagacctgaattttggatttcatgcattttttttcctttctggttgaggaactataatattgaagggacttccttccccattatgtttcaggaaaaccagtgcagcctgtcaagcgagagcttttacggcatagggactacaaggtggacttggaatccaagcttgggaagacaattgtcattaccaagacaacccctcaatctgagatgggagggtgagttgcttatcatttttcctctgcagccaagaatgcatctaataagccacctattttggttttaggaagtgttaaggaaggtccttggccccaggattacgtccttcttgcctgtaattctatctttatatttgtttttctgtgtctcccaaggtctcaagttgacatgatagtgtctctaggagtggtcactcagtgggtttcttcatgttattagcattggctgggcacagtggctcacgcctgtattcccagcactttgggaggccaaggcaggaggattgcttgagcccaggaattcaagaccagcctgggtaacacagtgagaccctgtctcaattaaaaaaaccaaaacaaacaaaaatcatactatgagcactacagctactactcaatatagtttttaaattttttattgccattgtacttgttatcaattctgatttactattaatattttaaaagggattatttgatctgtcagaagaagaaatgaaggaaaggactactgaggagatttctaggagagaaattaggtggagctagaatagagcctaggagttgttaatggtgaagaagaggggtttgaggttccagactagctgcaaaggctgtagttgttatggatgcctgattgtacaccttcttccaagactataacctataggaagaagggtcctacaagagcttgtcaccctt

SEQ ID NO: 117933 - DNA, 1576 bp, Homo sapiens
gtgttggtcaggctagtctcgaactcccgacctcaggtgatccgcccgcctcggcctcccaaagtgctgggattacaggcgtgagccaccatgcccggccaccccatagacctttctataagactgctcacaataaagcaactggcttccccagagcaagtaacccaaacaaagacagaaggcatggtttttaaaataacctaattttggaagatactacttttgacatattctattggccaaacagaccaactctggtacaaattgggaagagactacacagagtaggaataccaagagggtggggctcatcctggggctgtcttggaagatgactgctatactctctcgaaagctaaggctttatagaaatgaaggcttaacacttctaaaaagaagtttacctaaaaatttgagtttcttggttgaaaatgataagatccttaaaaccatatttgactcaggtgctgtttcttcctgttagatattactgcaatgtctgtgactgtgtggtgaaggactccatcaactttctggatcacattaatggaaagaaacgtaaggcttggaggtagcttgtgactagggctggaattgggttttggaggtggggtggaatggaagggtagctttttttttcttctttttactcatcaaaagatggctggagtaagaagggtagtttctactgggctcttttttgatgcccctattagaactctccagttgtttcagcacaggccgtcttttacttcattatgtaatatttctggaggccgtgaggtaagaggcctcattctggaggccatgaggctttcaacagcacccaaaccatgtgctgctcctggacccagctggccaagggagtttcttttagccataattatttttgctgtgtgttttatgagatgtcagagaagtcaggaaaataatttttgaggggctgaggatgttgtaatgaacttgccttcttcactgttgaccctatgcagatcagagaaacctgggcatgtctatgcgtgtggaacgttccaccctggatcaggtgaagaaacgttttgaggtcaacaagaagaagatggaagagaagcagaaggattatgattttgaggaaaggatgaaggagctcagagaagaggtaagggtctcctatccttcccctctcccccagatttgagttttatgttatgaatcatgggagaccctgtcctcatcccactcctactcccacccccagagttgtatctcctgagttctgtatattagcggaaacatttgttgcctttgtttaggattctcatgatctgaaggaaatggctctgaaactacttttttctcctagactctctgggccttatttttttttttgtaatttaaaaaaaaattttttttttttttggtcatacagatatttctcaacttctgatggggttacctactgataaacctatcatcaagttaaaaatatcataagtcaaaaatacataatacacctaacctactgtagtttagcctagcctaccttaatgtgctcagaacacattagcctacaattgacccaaattatctaacacaa

SEQ ID NO: 117934 - DNA, 2401 bp, Homo sapiens
cccatattagagatcttaatatacatgaagtactcagagcaatttctggcatgtactgcatgccccagaatgttagttgttgttacaaacaacatttggctgaggagtctaaactgattctgagtgatttttccctccaggaggaaaaggccaaagcgtacaagaaagagaaacagaaggagaagaaaaggagggctgaggaggacttgacatttgaggaggacgatgagatggcagctgtgatgggcttctctggctttggttccaccaagaagagttactgaggctttctgtgcttggcctgactttggcctatgctggacctaactttgcgtgtgtgtgtgtgtagtagggggtcatttctttttgggtaatgggaaagttcttaagagtgtcaatggggagggatagagggtgggggctcatggtttccctctactttgggagagggcacagattgcagaggtaatgctgtggcatattgcttctgcctcagtgtatcactggagtcacaggaccctgcccacctgagttcccaataaagaaaaacctccccttctgaggctgctttcccaaaactccccctgcatctttatctcttcatctatcccacctcttgtctgaacatcccacctttatcctgtgttctgcctttgttttaattttaactcatgttcatcctgcaacagaagcattctctaggtcccagtttccagttgattgcatatccttgatcagccctttttcccatcctgccctatggttctctagccacctgtgcatgcatgtgtatttctgcctggttctatggtgtgtggatgtgtgtgcatgaatctgtcatatagagggggtccgagctggaatcctagagcattgctgccctggggcctgatgttcttggcttcctcagagcatgtaacaggaaattaaatgggatgagtgtttggtgtggtttgtgtctgatgagttttttaacattcaggtgtagattgtttcagcttctcatgtttcattttcctgaagatttatgtttttgtctaccttgtgagcaggcttttggaagaacctgtttgatgcaaaaaagaaaatgaaaaacaaaacaaaaaatccccaaaaccttattatgggagcccgtcggtcttagaagctgtttgacatgtataataaatggcattgactgggcctgttttacatttggtgagaacattccataatcttccctgtgaatatttgtttttccttctcatgctgaggatttccatatagagtattttattcttccattttaaatcttatttttgcctaggtttttttttagcatgagttatgttttcgtctgataagggatctatgtccagagaagtctgaaccaaaacgattcctatcatttcagactcctttgatcttttgtttttggaacagcagagctcaggattgaacataatgttttttcttttttttttttcttttttttgagacagtcttgctctatcgcccagtctggagtgcagtggcgtaatcttggctcactgcaacctccgcctcctggcttcaagtggctaatattgtatttttagtagagatggggtttcaccatgttggctaggctggtctcaaacccctgacctcaggtgatccacctgcctcggcctcccaaagtgctgggattacaggcgtgagccactgcacctggcccttagtgtttttcttactgtctgctagacacagaattacttaattttggcactgttgagattttgggccagattatcatttgttgtagaaaccaatgctggcattgtaggatgtttattattttgattttgatttaggattaacttcatccctggactctacctgctagatgccagtagcaccctcttccacaattgtgacaactaaaaatgtctatgcctctgagaaaggcaaaatccctccctacccacattgaagaccactaagaagaagctagctgtcttccctaccttggtctgatttgagaattagatggcacagactggcaaactcaaaacagaaactcacaaaactttgatatccactggatcaagtactatgccaagtcaaggggatgcagaagaaaaaaatagccatacatacacgaagaactacagtcacattaacttcaagcagatgaagcctgtaacttgctggttctataccctgaaaaaatggacctgtaaatgaatctgtttgggttaacaaggctgccaccatatagctggttttcattctctgccccatcaagctcctcaactttctgtattatctgaaccacaaagcaccatacacctccctttggacttttgtacaaaattcccttactgtaagacatgccctttgtctaatttctgatgctgaatcttgccactgggaacactga

SEQ ID NO: 117935 - DNA, 1106 bp, Homo sapiens
taacaggaagtttcactgggcgggggttggaatgtttatctagtttagcagcgaagttctaagataaggtctgaaatacaatttacaccttgtaaagactccactcccctggcccaagcactagttgtaaaagtcgatttgatcacgaagtgaccctgtgtggttgttttgggagcgcagagtctggaagcgaaggaggtgggggcgtttcgagagttgtggaccaggtgactgctgagaaggagacagtaaaccggggacacacctgcggaagagctcttcagggattaggaaaggctacgtccttgtcactgctgtgtgtccccagatggacaactcctcaattgtctggaggtcgggggcgtgttggacagtcctggtcgctgagtcatgctgaagcactctctttttgactcactctttgtgacgtaggtctttctcaccagtcaataaaatataatccgaaagcaacctccgggctggctttagctcagcggttacttcgacagttctttaattgaaacaagcaacctgtctgggttgttcgagacccgcgggcgctctccagtccttttacctctctgggcggttcgagacccgcgggagctctccagtccttttcactgctgaagttcagctccctttccatggtaaaaggaatcagggctcctcggagaaatggctgattttagtactgggcaggaaatatagaaatggacgtggagcatctcatagagctagaaagtaaggaaatgcttaaaaaccaagaacaaccaaactcaacttttaaagttttttcaatgtttagtatgttcatgtgtttgttctaacagttgcctgtatacttgtatcttctcgcccttttttactgaggcccacaggatttttttctttcaaatctaatggatgttctaagatataccttagacttgatcattccatataagttttcctaggtttcctttcgatatgtagacccaatttttttttattatagttttgaagattacatcggttccattattttattcttcttcagggactgcaatgtatgttggatctttgcctctataccactttctctctgatcctttgaattgctttct

SEQ ID NO: 117936 - DNA, 1044 bp, Homo sapiens
tctaggaccatagactgtgaggtctggaaaagatgctctaacttaaagatttctgaaaatacaaaatttacttttacactttaaatgcaattaaattgcaatgaaactaaccaacaattagaatacaaagaaaatttacatttattataccgcaaaaaaactcatacatttataaataccagtaacatgcatagaattggaataagatggttactttctaataaaaggagacacctccaatgggcaaagcagtaaaaaaggactttccacaaattaaacgagactagcctcagtagatccttattaacacttaagtgaattcaaagctcttcctgaaactgggatttgcctcgctaaccctctctgcaccctgagcaacgaagttggggataattggcttcaggaacttgaactcatttgtcccggagcctccagtcagacacacctcgtactggtagctctgggacagggtcccggtgccgctcacgtccaccatctgccctggaaaggggccctcgggcaccgagcagcgacccaccgaggccgccctgctcctcctgcacagccgcaccgccacgaacaggagcaccgagaagaggaagagcgaagacaccgaggccaacgccaccaccaggtagacggtgagcaagtcggcctgggcctgggccggtgccgcctccgggagcagcaggtagggctgggagaagccgtccaccaggagcacgtgcagcgtggcggtggccgagcgcggaggctcgccattgtccttgaccagcaccaccagcctctgcttggcagcgtcgcgctccctcagcagcctggcggtgcgcacctcgccattgtgcgcccacacgccgaacagcccgggctccgtggccttgagcagctggtacgacagccaggcgttctggcccgagtcgccgtccaccgccaccaccttggtcaccaggtagcccggctcggccgcccggggcaccagctcggtgcagggcgcggagccgttctgcagcgggtacagcacgaagggcgagttgtcgttggcgt

SEQ ID NO: 117937 - DNA, 1037 bp, Homo sapiens
ggcctcggtgtcttcgctcttcctcttctcggtgttcctgttcgtggcagtgcggctgtgcaggaggagcagggcggcctcagtgggtcgctgctcggtgcccgagggcccctttccagggcatctggtggacgtgagcggcaccgggaccctttcccagagctaccagtacgaggtgtgtctgacgggaggctctgaaagtaatgatttcaagttcttgaagcctatattcccaaatattgtaagccaggactctaggaggaaatcagaatttctagaataatgtaggtatctgtagctttccgaccgtctgttaattttgtcttcctcacttttcaccttagttttttttaaccctttagtaatcttgaattctacttttttttaaatttctactgttgtctttagtaatgttactcatttcctttgtctgattgttagttttcaaattattgtattattataaatattttatatcaggaaagttcatatttctgaataaattaatagtattcattcctgaagggtgatatgaaagttaaccccacctaataaacataactctaattctgaaattacctttcacactatatgacactacataagaatgtatgatttttgaagtcatattttaagttttttttatagtttttcttattcacacagcttgactttttgacaaaagtttggggtgtaatcatttcatatttatccatgtgtaatttcttccaagcttcatatttggagttttgttttttccaataaggagcaacatggataagtttaagctactcttttcaaggtcacacttgtaagcattagattttcattctaaaacacatatgtcatctcataaaaatatatctgcgtaatgtattctgtctcatgtaaattaacatagaaaagactaatgggttcttccttatctctatctaatgttatgatcctattggggggactggacaggctttctaatacccagatttactgtgtttaaggtgttcgtataaggccaatagacactaggaccaagtaat

SEQ ID NO: 117938 - DNA, 1033 bp, Homo sapiens
ggcgatagaaccctcaaatgtctttaaacacagtatttcaaattactatatttttgcttagagatctgaaatgatacaagttgtacccaaatattgaacactgaattaagcaaataggacaggaaaaaaattctcctgacttagatttctattcctcactcccactatccttacttgcctcatactatttttttgaaggtattgagttaaatctttaatgaatgacacgtaagaaggtatgctgacaacaaagctaacttagactacctcatgggtgccaggcagcgggacggtggactctgaaatgatccacttcctgttaaacgccagtcccgttttatatttaatacaggcctgctccgatgaagcaccactccatagctactgaccatttaagtatggaatatataacttaaatctataaataactttaaagtataaacatgattttcttttaaagtaaaagtaaataaatggaagatcagccatagctctggggcacaccaggcctgacactgagcctcccctcccctaaatgtccgcagcaacccttactggtcagtatctcatttccctgaccatcttgcttctgacactaaggctagagttaccacagagatttcatagatagcaaaaagcttaaggaaacaaagtttcccacaggaattacattctgtcaaataataaacccacatggtacagactattattaagactggtagcctgcttcttttcagctttagaggctgcttaagaaaacctgatactgaaagagaccctgctggtggtcttggagcaacacagaatgatggggcttactttagtggtgacaagaatgacatggccaaagaacagttgcttatctccaagtctgtggggatcagataaatgaactacgttttggggttgggggtttttctttgttttggaggggttttgacagtgtacatatacatacatatggtatatagttcaataaaattacttttcttctgtttcattccttagtcacaccccatacgtagttatcatt

SEQ ID NO: 117939 - DNA, 1068 bp, Homo sapiens
ctcagacgagtgagcgaacatgaagtccggtcctggcatccaagccgccatcgacctcacagcgggggccgcaggggggacagcgtgtgtactgactgggcagcccttcgacacaataaaagtgaagatgcagacgttccctgacctgtacaagggcctcaccgactgcttcctgaagacatacgcccaagtgggtctccggggcttctacaagggcaccggcccggcacttatggcctacgtcgccgaaaactcggtcctcttcatgtgctacgggttctgccagcagtttgtcaggaaagtggctggaatggacaagcaggcaaagctgagtgatctccagactgcagccgcggggtccttcgcctctgcatttgctgcactggctctctgccccactgagcttgtgaagtgccggctacagaccatgtatgaaatggagatgtcagggaagatagcaaaaagccataatacaatttggtctgtcgtgaagggtatccttaaaaaggatggccccttgggcttctaccatggactctcgagtactctacttcaagaagtaccgggttatttctttttctttggtggctatgaactgagccgatcgttttttgcgtcagggagatcaaaagatgaactaggccctgtccatttgatgttaagtggtggagttgctggaatttgcctgtggcttgtcgtgttcccagtggattgtattaaatccagaattcaagttctttccatgtatgggaaacaggcaggatttattggtaccctcttaagtgttgtgagaaatgaaggaatagtagccttatattctggactgaaagctactatgattcgagcaatccctgccaatggggcactgtttgtggcctacgaatacagcaggaagatgatgatgaaacagttggaagcatactgaagtgtcttggtgaacctggatccgagtccatgagtttgaggactacagttcatcacagggttcagcagagtacaagaccactgtctaattttgacttcatgggaattttggttttatcttcccttcttctaccctaaatctta

SEQ ID NO: 117940 - DNA, 1581 bp, Homo sapiens
ccggtgaaactgaacttataatcgtcactggattgtaagtacccgaggcgaagagagctcgctgagccctgattttttgagtgtctttgttccgggagagtttgtgagttgaaagtatctctgctgggctttctgggccgaaaaccgttccgggggagccgccatttgctttcctgttccctagctagctagctagctctctccgcgttgtccggcagcggcacctagaggttgggacttggcattgcatctgatttaatgaacttaagtctgtgaataagcctttgtgttaacgactggtattcggtcacagcatatttagagaaaagacttggagcttaaataaaaactaaggcaaaatagacgcttagctgctgatctacagagaacttcttgtaattaaaagatttcaattcatagcaaactggtgttttaaactattgcagtagctggaactttttagtgtaaccagcatttattggagaagtgaatcacaaggaaataaagatgagtaaaagcaaagatgatgctcctcacgaactggagagccagtttatcttacgtctgcctccagaatatgcctctactgtgagaagggcagtacagtctggtcatgtcaacctcaaggacagactgacaattgagttacatcctgatgggcgtcatggaatcgtcagagtggaccgtgttccattggcctcaaaattagtagacctgccctgtgttatggaaagcttgaaaaccattgataaaaaaactttttacaagacagctgatatctgtcagatgcttgtatccacagttgatggtgatctctatcctcctgtggaggagccagttgctagcactgatcctaaagcaagcaagaaaaaggataaggacaaagagaaaaagtttatctggaaccacggaattactctgcctctaaagaatgtcaggaagagaaggttccggaagacagcaaagaagaaatatattgaatctccagatgttgaaaaagaagtgaaacgattgctgagtacagatgctgaagctgttagtactcggtgggaaataattgccgaagatgaaacaaaggaggcagaaaatcaaggcctggatatctcttctccaggaatgtctggtcacaggcagggccatgactcattagaacatgatgagcttcgggagatattcaatgacctcagcagcagcagtgaggatgaagatgagacccagcatcaagatgaagaagatataaacatcattgacacggaggaagatctggagagacagctacaggacaagctaaatgaatcagatgaacagcaccaggaaaatgaaggaaccaatcagctggttatgggaattcagaagcagattgacaacatgaaaggcaagctccaagagacccaggacagggcaaaacgacaagaggatctcatcatgaaagtggaaaatctggctctcaagaacagatttcaggctgtactggatgagctcaaacaaaaggaagaccgagaaaaggagcaactcagctctttgcaagaggagctagaatcactcctagagaagtaaaaagaactgatatttaatttcagt

SEQ ID NO: 117941 - DNA, 1041 bp, Homo sapiens
tcttaagtctgcagtagattttgaacaccggcagtaactgtacaaatatatcagattagttttaatagccatctccccttcccctacaagtaaaggagagtactacagcagtatgtactctgaattgctgctattgaagaacccctgagcctgtgcagcgtggcactcctgtggtccccattactcaggaggctgaggcaggaggattgcttgatgccagctagaggctgcagtgcactatgagaacacctgtgaatagccactgcattccagcctgagtaacatggccagaccccatctcttaagaaaagaaaagaaaccctgaaccagaggagcagagctgccaccacttagtggtggggatggggcagaacagctcagggcaagacacaggccttggatgccaatgccagccgtcagatattgagcaatgtgtaagtggggttagcctgcaggagaacctgctcgccacctcctcctcttcattctttaggtgatccccattgacctagacaatatctttaatatagagttctcctgatttttctacacaattttacagggcatacagaatatatttcctgtccaataatgacagaaatacttgattttgaagagtaacagttatagcttggaatagaagactggaggcagtttgagggccgacttcagagtcctggttgaaatgaaggttgagaagtataatgcagtcagtgcaggtgactttcagctgggtatctagtcctatcagaggtaaaaactgtggttgccctaaccaaaacaataggactaagagaccttaaatgaaagatgaaagttattatagagagaaatgatcatactggcaaacaattcacctccaagaattatgatgtgactctttgtcagatactcacagatggaattctaaactggtagcagaccctgaaggacaatgtcaccatcagaaccaccaacaaggacaaactgtccctctcctgcatcaccctgcataccatctgcatccacaaaaatgctcattcttcaacaagcctcctattt

SEQ ID NO: 117942 - DNA, 2001 bp, Homo sapiens
cctgaatagcaaacttggaaagcagataacatgggaatacttggattctcctgtatatttcaatttggtgacatttaggcacatttaaagaagtgaacatatagtttctctttttcatacatatattgtagaattatttccttgacaatagactaaaacttaagaaaataacaagttaatgagaaggttttcagtatttgctaggaatgcagtaactggttaggactgtgggcgccgctgttcactaatctggtagatacaggcagtacacacaggtcaggaggaggaaaaaaaaaaaaaagaaaaagaaaaaagctctcgtgcctcttagaacctccataaccgccagattgaaaactgactgtccaagactgcctaaatcctacttctggatgactctccagtcagaattctcctgaaaattgggttaatttcagctcagaaaagcagaaacgatacccttggtactggactggaagaaaactacgaagtgagagagccatgaagattcagaaaaagctgactggctgcagcaggctgatgcttctgtgtctttctctggagctgctgttggaagctggggctgggaatattcactactcagtgccggaagagacagacaaaggttccttcgtaggcaacatcgccaaggacctagggctgcaaccccaggagctggcagatggcggagtccgcatcgtctccagaggtaggatgccgcttttcgctctgaatcctagaagtggcagcttgatcaccgcgcgcaggatagaccgggaggagctctgcgctcagagcatgccgtgtctcgtgagttttaatatccttgttgaggataaaatgaagctttttcctgttgaagtagaaataattgatattaatgacaacactccccaattccagttagaggaactggagtttaaaatgaatgaaataacgactccaggtaccagagtctcattgccttttgggcaagaccttgatgtgggtatgaactcactccagagctaccaactcagctctaaccctcatttctccctggatgtgcaacagggagccgatgggcctcaacatccagagatggtgctgcagagtcccttagacagagaagaagaagctgtccaccacctcatcctcacagcttctgatgggggtgaaccagtccgttcagggaccctcagaatttacattcaggtggtggatgcaaatgacaatcctccagcatttactcaggcacaataccatataaatgtccccgaaaacgtgccgctgggtactcagctgctcatggtaaatgccactgaccctgatgagggagccaatggggaagtaacgtactcctttcacaatgtagaccacagagtggcccaaatatttcgtttagattcttacacaggagaaatatcaaataaagaaccactagatttcgaagaatacaaaatgtattcaatggaagttcaagcccaggatggtgcggggctcatggctaaagttaaggtactgatcaaagttttggatgtaaatgataatgccccagaagtgaccatcacctctgtcaccactgcagttccagaaaactttcctcctgggaccataattgctcttatcagtgtgcatgaccaggactcaggagacaatggctacaccacatgtttcattcctggaaatttaccctttaaattggaaaagttagttgataattattaccgtttagtgactgaaagaacactggacagagaacttatctctgggtacaacatcacaataacagcaatagaccaaggaactccagctctatctactgaaactcacatttcactactagtgacagatatcaatgacaactccccagtcttccatcaggactcctactctgcctacattcccgaaaacaaccccagaggagcctccatcttctctgtgagggcccacgacttggacagcaatgagaatgcacaaatcacttactccctaatagaggacactatccagggggcaccc

SEQ ID NO: 117943 - DNA, 1036 bp, Homo sapiens
tgcggactcgcggaagagccacctgattttcccccagcccaactatgcggacacgctcatcagccaggagagctgtgagaaaaaggattttttatcagcgcctcaatctctactcgaagaagaaagagaagaaacgttttctcaggtaatctatcttttcacaacatacgtactagctagtttgctgaagtaattcacttacttgtttactatatctattttgttccccatatttccttgagggtagagtcaagttttaggaagtgagtcttggtgaattatttcttggtaggtcttagtgttcacaggctgtaagaggaagaagagacgtgagaatctttgtgcaatgaatgtaaaccaggagttaatagataagattatccaaagagcactgcattaggaactagggtgtctggtttcttatactttcttctccatccctgggcaaatcatctcatccacccagatcaacaattttttctttgttaaaaatataaagattggagtttatgtttactcaagtcctttcttcttttaagttatgactcttactctatatttgaatctgtatatgaacagtgaaacatgttagttggctagttctttctcattcagtcttaatacatttctttcagtttggcagcaaaattgttttccttaacttgcatgcccttccctgttaaaaatatggaaatttagaaatatacattccttacagtgtttcaggaaggtatgtcatattattttggcttagttttaaaaatcacattaacctctaagctatatgcttcttgaagaagtgactgacttatcatctgctctataataaagctgtagagtggtaataaacaggtttctcctttttttttatctttctcatacgtgggaaccatactgtattttaatctttaaaataatatatatcctcaatatagttttgcttaaagaaaagatacaaaagattcatatcatacaattgcccagaaccaacttctttatacatctctcttctcaaggtttctactcacaatagctg

SEQ ID NO: 117944 - DNA, 1585 bp, Homo sapiens
ttcgtttcttgagaaaataagattggagtccgtcgtaggaaactggaaccgaattcagagaaagcgattcaccgaaaaggaaatgaccaattgcctgagtttccgaaatggcagaggactggccctgctgtgcgcgctcctggggacgctgtgcgaaacaggatccggtcagatccgctactcggtgtctgaggagctagataaaggttccttcgtgggcaacatcgctaacgacctggggctagagccccgggagctggcggagcgcggagtccgcatcgtctccagaggtaggacgcagcttttctctctgaatccgcaaagcggcagcttggtcaccgcggagaggatagaccgggaggagctctgcgctcagatcccgctgtgtctggtaaaaattaacattctggttgaggataaattgaaaatttttgaagtagaaatagaaattaaagatattaatgataatgctcctaatttcccaacagaggaattggaaataaaaattggtgaactaacggttcctggaacccgatttccaattaaaactgcttttgacccagatgtaggcattaactccctgcagaactacaagcttagccccaatgactacttctctctggctgtgaatagcgtctctgagggggccaagtatccagagctggtgctggagcgggccctggaccgtgagaaaaaagaaattcaccagcttgtcctggttgcctctgatggtggcgaccctgtccactctggcaacttgcacatccaagtgatagtcctggatgcaaatgacaacccaccaatgtttactcagcctgagtaccgtgtgagtgtttgggagaacgtgcctgtgggtacccggctgctcacggtgaatgccactgaccctgacgagggattcaatgctcaagtgtcttatattctagataaaatgcctgggaaaatcgctgagattttccatcttaactcagtgagtggagaagtatcaatattaaaaagtctagattatgaggatgccatgttctatgaaattaaaattgaagcacaggatggaccaggtcttctttcaagagccaagattctagtcacggttctggatgtgaatgacaatgctccagaaattacaatcacgtctctcacaagctcagtcccagaagagggcaccgttggaagagaaattgctcttatcgacgtgcatgaccgagattctgggcagaatgggcaggttgaagtttttgtcctgggaaatctgccatttaagttagaaaaatcaatagatcaatattaccgcttagtgacggccacatccctggaccgcgaacaaatatcagaatataacattagtctgagagcctcagatgggggaagcccgccactgtccacagaaactcacatcaccctgcatgtgattgacatcaatgacaacccacccaccttccctcatttatcctactccgcctacattccagaaaacaaccccagaggagcctccatcttctcagtgacagcccaggacccagatagcaacaacaacgcccgcatcacttatgcattgaccgaggacactctccagggggcgcccctg

SEQ ID NO: 117945 - DNA, 1013 bp, Homo sapiens
gcttctcaattctgcaggagcgtcaggcagggtgccttcctgctttgtccggtgcactgagcacagacgctgctcctgttcaccctcgagcgcctaactaataagtcctaagctcaaatcacagaagtccagggtgctgccatttctttttgaaaaacatcccagaggaaagaagctccgcggagagttcctgaaatgcagagagccagagaagccgaaatgatgaaaagtcaggtactgtttcccttcctgctgtctttgttctgcggggccatctcccagcagatccgatacacgattccagaggagctagccaacggctcacgggtggggaaacttgccaaggatctggggctcagtgtccgggagttgccaactcgaaaactgcgggttagtgcagaggattatttcaacgttagtttggagagcggggatttgttagtgaacggtaggatagatcgagagaagatttgcggaaggaaacttgagtgtgcactagaattcgaaacggtcgctgaaaacccaatgaatgttttccacgtggttgttgtaatccaagatattaatgacaatgcaccacgtttcgttgcaaaaggcattgacttagaaatttgtgagtcagccttacccggggtaaaattctctctggattctgctcaagatgcagatgtggaaggcaattcactgaagttatacaccatcaaccccaatcaatacttctctctgtcaacgaaggaaagtcctgatggaagtaaatatccggtattactgctggaaaaacctctagacagggaacatcagagctctcatcgcttaatcctgactgccatggatggcggggacccgcctctaagcggcaccacccatatctggatccgagttacggatgccaatgataatgctcccgtgtttagccaggaggtatacagggttagcctccaagaaaacgtaccgtggggaacctccgtgctgcgggtgatggccacagaccaggatgagggcattaatgcaga

SEQ ID NO: 117946 - DNA, 1044 bp, Homo sapiens
tcgacagagggaaaaccgaagcacaggcgactccgcggcggggttgtaatggcggcgcctcctgctcgcccagaccacacccggctgctccagatctgccttctcctgggggttctggtggaaatcagggccgaacagattctctactcggtgtttgaggagcaggaagaaggctcagtggtgggcaacatcgccaaggacctggggttggcgccccgggagctggcggagcgcggagtccgcatcgtctccagaggtaggacgcagcttttcgccctgaacccgcgcagcggcaccttggtcaccgcgggtaggatagacagggaggagctctgcgacagatctccaaactgtgtgacaaacctggagattcttctagaagatacagtgaagattttgcgggtagaggtggaaataatcgatgttaatgataacccacccagttttgggacagaacagagggaaataaaagttgctgaaaatgaaaatcctggggcaagatttcctcttcctgaagcttttgatccggatgtaggtgtaaactccctgcagggttaccagctcaactcaaacggttacttttccctggacgtgcaaagtggggccgatgggattaagtacccagagctggtgctggaacgcgctctagatcgcgaggaagaggcggttcaccacctcgttctcacggccttcgatggaggtgacccggttcgctctggcactgccaggattctcataatacttgtggataccaacgataatgctcccgtgttcactcagcccgagtaccacgtaagtgttcgtgagaacgttcctgtaggcactcggctactcaccgtaaaagccactgatccagatgaaggagccaatggagacgtgacgtattctttccggaaagtaagagacaaaatatcacagctatttcagttgaattctctgagtggggatataacaatattggggggtctagattatgaggactctggattctatgacatagatgtagaagcccatgatgggcctggtctccgagctagaagcaag

SEQ ID NO: 117947 - DNA, 1048 bp, Homo sapiens
ctattccagataatctgccattcacacttgaaaagacctatggaaattattatcggttgttgacacacagaacactggacagggaagaagtctcagaatataacatcactgtaactgccactgaccagggaactcctccactgtctacagaaactcatatttcactgcaagtgatggacatcaatgacaacccacccactttccctcatgcttcctactctgcttacattcctgaaaacaaccccagaggagcctccatcttatctatgactgctcaagaccctgacagtggtgacaatgcccgaatcacttactccctggccgaagacaccttccagggtgcacctctgtcctcctatgtctccatcaactccaatacagggatcctatatgctctttgctccttcgactatgagcagtttagagacctgcagctgctgatgacagccagtgacagtggagaccctccactcagcagcaatgtgtcactgagcctctttgtgctggaccagaacgacaatgtccctgagatcctgtaccccaccttccctactgatggctccactggtgtggagctggcaccccgctccgcagattccggctacctggtgaccaaagtggtggcagtggacagagactcaggtcagaatgcctggctgtcctacagcctactcaagtccagcgagccgggactatttgcagtggggctgcacacaggcgaggtgcgcaccgcacgggccctgctggacagagacgcgctcaagcagaggcttgtagtggtcgtccaggaccatggccagccccctctctcggccaccgtcacactcactgtggctgtggccgacagcatcccagatgtcctggctgacttgggcagcctcaagccttcagcagacccagacgactcgggcctcacactctatctcgtggtggcagtggccgctgtctcctgcgtcttcctggcttttgtcacggtgctgctagcactcaagctgagacgctggcacaagtcacgcctgcttcacgctgaaggcagcaggttggcagg

SEQ ID NO: 117948 - DNA, 1075 bp, Homo sapiens
gcagtagataatttataacctaaaatcaaattttttaaaaaatgtgtttttgttagaatgggcagtgggtttcttttagcaaataacaattttgattaaacaaattgttgtatattcatattacggactactagataactatattatgggccactagataactataagaaataaataggaaagctctctatgtactgatatgatctttaagatataacaactaaaaaagcaatgtgcagaatatggtatgttgtatgcttacatttgtgtaaagaaggagacagaatatttataaaaatccgttgccctatacaagacatatctccggaaggatacctaagaaactttaacactcatttcccctgtgaaagcatttctcctcatctaaagcagagatgaaaggaagaacctatgctgaatgcatcttttgaatttggaactatatgaatatttcacatattttaaaacaaatgaagactttataaattaaaaaagaaaagaaaagaaaaaagttcttagcaaatattgacaagccattagtgcagtttcctgagaaaacctctgagcgtcgctgttggtcaaaagaacgaagagaagcgtttgggagcctcttagaggggaacttcctgcacaaaccaaccacacagagaaggccagtatagattcggaaacagaaaacaaaagcaggaaaagtgaccttagcccggattctgccatccccggaaggcttattcctcctatgggcaaaggagcaaagggagccagaagatgaaagcgagctcagggaggtgcgggctggtgcggtggctgcaggtactgttgcccttcctgttgtctttgttccccggggctctcccagtccagatccgctattcaattccagaggagctggccaaaaactcggtcgtaggaaacctcgccaaggatctggggctcagcgtccgggacttgccagcccggaagctgcgggttagcgcggagaaggaatatttcacagtaaacccagaaagcggagacttacttgtgagtgacagaatagaccgagaacagatatgcgggaagcagcctctgtgtg

SEQ ID NO: 117949 - DNA, 1013 bp, Homo sapiens
ctgagggaggacgtgccgccgggcttctttgtgcttcaagtgacagccaccgaccgggatgaaggcataaacgcagagatcacctactcctttcataatgtggacgaacaagtgaaacactttttcaacttaaatgaaaaaacaggagaaatcacgacaaaggatgatttggattttgagattgcaagtagttacactctgagtatcgaagcaaaagatcctggagatctagcagcccactgcagtatccaagttgaaattcttgatgacaacgattgtgcacctgaagttattgtgacttcagtatctactcccctaccggaggattcgccaccaggaacagtgatcgccttgataaaaacgagagacagagactctggagaaaatggagaagtttactgccaagtgttgggaaatgccaagtttattttgaaatcttcctcaaagaactattacaaactagtgacagacggcgctctggaccgggaggagatcccagaatacaatctcaccatcacagccaccgacgggggcaagccgcccctctcctccagcataattgtcaccctgcacatctccgacgtcaacgataatgccccagttttccaacagacttcctacatggttcacgtggcagagaacaatcctcctggcgcctctatcgctcaaatcagtgcctctgaccctgacttgggccccagtggccaagtttcctactccatcgtagcgagcgacctgaagccgcgggagattttatcctacgtgtccgtgagcgcgcagagcggggtggtgttcgcgcagcgcgccttcgatcatgagcagctgcgcgccttcgagctcacactgcaggcccgcgaccagggctcgcccgcgctcagcgccaacgtgagcctgcgcgtgttagtgggcgacctcaatgacaatgcgccacgggtgctgtaccccgcgctggggcctgatggctccgccctcttcgatatggtgccacgcgccgcagagcccggctacctggt

SEQ ID NO: 117950 - DNA, 1050 bp, Homo sapiens
gagatagtggagagactttctcaaagtcctcacaagtaacaaagatctttatttcttctgcatatgacagctaatataacttacataaatcagtaggcctgtttggaaaggtgcatggagaactgggtttgtttccttggtattcttatatgcaaataagcacgttttcctaaatttatcctaataaggagatgaaatcttgaatcctacaaaggtaagaatttgaatgtcctaatttaatggactaaatatagataagaggtaaataaaggacataggctcccccgatgacgcattaaataaaatttttgtaaggtattgagatctaataatcatattgatctcagggattgtggaagtcttgctattcagaattaaagctgaattaacggtcataaacaacgctacacagttaaacattaaggatatggcaacattattagaaataaaattataactaaacttaggagaaataaaaatggaatttgatgcagtcactggttaggactctgagtgtcgctgttgaccaaagtgggaaagaagctgccgcagaggcgacccgactctgctccctccatactaaacacacagaccagacaagctcctacgaaaagccaacgctccacgcccattttcgtcagggaatatgtacccatcggctttagataaataaggaaacagcaggctgaaccagaactaagagaaaattgggcagagagaaggcaatggcgagtccacctaggggctggggctgcggagagctgctgctgcccttcatgctcctggggacgctgtgcgagccaggatccgggcagatccgctactcgatgccggaggagctggacaaaggctccttcgtcggcaacatagccaaggaccttgggctggagccccaggagctggcggagcgcggagtccgcatcgtctccagaggtaggacgcagctttttgccctgaacccgcgaagcggcagcttggtcaccgcgggcaggatagaccgggaggagctctgcgctcagagcccactgtgtgtggtgaactttaacatct

SEQ ID NO: 117951 - DNA, 1035 bp, Homo sapiens
accagggctcgcctacgctcagcgccaacgtgagcctgcgcgtgttggtggacgaccgcaacgacaatgcaccgctggtgctgtacccagctctggggcccgaaggctctgcgctcttcgatatggtgccgcgctctgcagagcctggctacctggtgaccaaggtggtggcggtggacgcagactcgggatacaacgcctggctgtcctaccacattgtgcaggccagcgagcccgggctgttcagcctgggcctgcgcacgggtgaggtgcgcacggcgcgtaccttgggcgacagggaggccgcccgccagcgcctgctggtcactgtgcgtgatggaggacagcagcctctttcagccaccgtcatgctgcacctaatcttcgcagatagcttgcaagagatacaacctgaccttagcgaccgccccactccctctgaccctcaggcggagctacagtttcacctagtagtggcgttggccttgatctcagtgctcttcctcctcgcggtgattctggcaatctccctgcgcctgcgatgctcctccagacccgccactgagggctactttcagcctggtgtctgcttcaagactgtacctggagttctccccacctacagcgaaaggactttgccttattcctacaatccgtgtgctgcctcacattcctcaaacaccgagtttaaatttctcaatataaaggctgaaaatgctgcaccacaagatcttctatgtgatgaagcctcttggtttgaaagtaatgacaatccagaaatgccttctaattcaggcaatttgcaaaaggtgagtttcttcaaacctttccttccataaatataattgggtttcaattcattgatttagagataaaaagaatacagattaaatattccctgattacattattttattgattttctggtgtagagtagggtgtctaggaaattctttgtagaatttcctgtagaatatctgtgttgcagttgttctttcatagaaagcctccttttgatagtcttgaaacttttct

SEQ ID NO: 117952 - DNA, 1702 bp, Homo sapiens
gacagagattctggaaagaatggtgaggtgacctgcaccattccagaaaacctaccttttaaattagaaaaatcaatagataattattatagattggtcacaaccaaaaacttggaccgggaaacactctctttgtataacatcacactgaaagccacagatggtggaactcctcccttgtccagggaaactcacatattcatgcaggtggcagacaccaacgataacccacccaccttcccccactcatcctactcagtctacatcgctgagaacaaccccagaggggcctccattttcttagtgactgcacaggaccacgacagtgaggataatgcccagatcacttattccttggccgaagacaccatccagggggctccagtgtcctcctatgtctccataaactctgacactggagtcctgtacgcgctgcaatcctttgattatgagcagttgagagaactacaactaagagtgactgcacatgacagcggggacccgcctctcagcagcaacatgtcactgagcctgttcgtgctggaccagaatgacaacccgcccgagatcctgtacccggccctccccacagatggttctactggcatggagctggcaccccgctccgcagagcccggctacctggtgaccaaggtggtggcggtggacaaagattcaggccagaacgcctggctgtcatacctcctgcttaaggccagcgagccaggactctttgcggttgggctgtacacgggcgaggtgcgcacggctcgggccctgctggacagagatgccctcaagcagagcctcgtggtggccgtccaggaccacggtcagcctcctctgtcagccaccgtcacactcaccgtggctgtggctgacagcatccccgaagtcttggccgacctgggcagccttgagccctccgacggtccttacaactatgacctcacgttgtacctggtggtggcggtggccacagtctcctgcgtcttcctagccttcgtcctcgtactgctggcgctcaggctgcggcgctggcacaagtcacgcctgctgcaggcttcagaaggtggcttggcgaacgtgcccacctcgcactttgtgggcatggacggggtgcaggctttcctgcagacctattcccatgaggtctccctcaccgcggactctcggaagagtcacctgatcttcccccagcccaactatgtagacatgctcatcagccaggagagctgtgagaaaaatgattctttgctaacatccgtagattttcaggaatgtaaagaaaacctgccaagtattcaggtgagcccagcccttcctttatttccatgaggaatttatttgcatgatatttctctattattttgcaaaacaaatgttttgaaaatagggatttaaaaaactttatagaggtaaaaatgagtttaccagtttccttcagtggtgacactttaatatagaacacataggatatagtatttctttagtgaaagcctatggacaagattatgaatatgtggactatcacattttataatttccacctactttccaatctatgttccaacctactttcttaactcatatattttatacattggaatgaatcgagtctttcatattgcacaaggttagcaggaataaaacacacctcagctgtcttctcaggattctctttagcattcaaatatgtaaa

SEQ ID NO: 117953 - DNA, 1013 bp, Homo sapiens
cgccagcgctcagcgcgaacgtgagcctgcgcgtgttagtggacgaccgcaacgacaatgcgccacgggtgctgtaccccgcgctgggtcccgacggctctgcgctcttcgatatggtgccgcacgctgcagagcctggctacttggtgaccaaggtagtggcggtggacgcagactcaggacacaacgcctggctgtcctaccacgtgctgcaggctagcgagcccgggctcttcagcctggggctgcgcacgggcgaagtgcgcacagcgcgtgccttaggcgacagggacgccgtccgccagcgccttctggtcgccgtgcgtgacggtggacagccaccactctcggccactgccacgttgcacctggtcttcgccgacagcttgcaggaggtgctgccggatatcactgaccgccccgacccctctgacctccaggctgagctgcagttttacctagtggtggccttggccttgatctcagtgctcttcctcgtggccatgattctggccattgccttgcgcctgcgacgctcctccagccccgcctcctggagctgcttccagcctggtctctgtgttaaatccgaatccgtggttccccccaactacagcgaggggactttgccttattcctacaatctatgtgttgcacatacaggaaagacggagtttaatttcctaaaatgtagtgagcagttgagttcaggacaagacatactttgcggtgattcatctggggccttatttccactttgtaattccagtgaattgacttcccatcaggtgagtttcctttaagtataatttaatgctcattgcctacccatttctccatattcacaagaaaatatacatatttgcaggaaaatatataatttttagatgtcatggatcattttaggaaagttgtagtcagttaaaaagctgtcatatcattctacaaaggaggagtaaagtaggagcaattgtgtggcccaacatttgtttgttttttagccaagcttagat

SEQ ID NO: 117954 - DNA, 1026 bp, Homo sapiens
tggggctcaggctgaggcgctggcacaagtcacgcctgctccaggattccggtggcagattggtaggcgtgcctgcctcacattttgtgggtgttgaggaggtacaggctttcctgcagacctattcccaggaagtctccctcaccgccgactcgcggaagagtcacctgatctttccccagcccaactacgcagacatgctcatcagtcaggagggctgtgagaaaaatgattctttgttaacatccgtagattttcatgaatataagaatgaagctgatcatggtcaggtgagtttagttctttgcttgcttttaatttccagatgaattttatttggcataaattatgttttgaaaaacattgtgaagatagttgaaaataatttttaaggtgtatcacagagttttgggtttattttggtggtgttactataaaattgaactctaatagtcataggttattgtttcatttgcttttaaacgacttggaaaagattgttcaaccattttaagccttccagtattttattcctattatcactcattcacttaagaagtagctacccgtccatactggtaattttgctattgtttgtgtgtgtgtgtgtgtgtgtgtgtgtgtgtgtgtgtgtgtgtgtgtgtatcccaaactagaacttcagaaaattatcaagaagtctaaagccttgttattagcttagcaaaagtaaaatatatctcagaatttttagggttatgtttagcatttgaacctgtaactaggctcttgtagatttcttcactttaaacctcttttctgagccctgtttctgtaccagtgcccttcaaaactttaatacttcttaccatccttcaaaacatgaacaaactttaaagatggatcttggtgggagatgagactggttactaaatattaagtatgtgagtcagtggtcacctgggctccatgcccatggagacatgaaatctaaagcctagaatgtccattgctcccccaaacaaaaaacaaaagcaaaaacattag

SEQ ID NO: 117955 - DNA, 1209 bp, Homo sapiens
cttatgagcttcatttatccaattccaaagtcatttcagataggataataatgcaatccactagaatatccctttgtaccttgtattgcagaatagataagcatttccccaataactcttaagaatgaatttatgtactgtaaaagatatgacataagagaagtattttgagatatgaagaagagcaacgtagtagggtatatcatttcttagctacatcatatgggcagtatacttgaatgaatatttcctgaagtagaagagtaaagaaaaattatttttataaagaatgttaatatagtcaggaagaggagatgtttggggattggtataaaattgccacaactttacaaaatagttttaaatagtatagatttccctaatatgtgtaatataaaacactagaaatattggggagttggaaatcatagaaatgaacagaagaatgataaaattgtttccatagctaataaaaaatgaatttttgaaatcagtatagtatgaaggctctgagagcaagaactgtatcatattaattattatattgccagtgacaagggcaatacttagttctagctaagagttcaaggtatgtttgcagaatggtgaaagaatggaccaatgtatgcaggtttgtataaaaacccaacgtgatatttctaacaatttggaaaacagagaaagataccttaaagaagttgttataattttttattaagtatatggacgtaaaaacttggcttgttaagttaggcacacaaaaacaattactgcactggttaacttgaagccgcagaggctgtagtttcctagtgctgactctgggcgccgctgttggccaaagtgcagagcttggcgctccagatctcctcgcgcagccgcagcgcgctttccagggcagccccagctcagactccccagcgccggcctttacaccgcttcctcctcggaaaaagaatcgtttcctaaactggaactggaactaaagcccgttcggagatccaaaaatctacaatacagaggttatttgtaacctggcgtctccaggctggtgagcaagctgaggagagcaagagggatggggagcggcgccggggagctgggccgggctgagaggctgccagtgctctttctcttcctgctgtctttgttctgcccggcgctctgtgagcagatccgctacaggattcccgaggaaatgcccaaggg

SEQ ID NO: 117956 - DNA, 1025 bp, Homo sapiens
gctgtaccccgcgctgggtcccgacggctctgcgctcttcgatatggtgccgcgcgctgcagagcccggctacctggtgaccaaggtagtggccgtggacgcagactcaggacacaacgcctggctgtcctaccacgtgctgcaggctagcgagcccgggctcttcagcctggggctgcgcacaggagaggtgcgcacagcgcgtgccttgggcgacagggacgcggcccgccagcgcctgctggttgctgtgcgtgatggtggacagccgccactctccgccaccgccacgctgcacttggtctttgctgacagcttgcaggaggtgctgccggatatcactgaccgccctgtaccctctgacccccaggctgagctgcagttttacctagtggtggccttggccttgatctcagtgctcttcctcctggccgtgattctggccgttgccttgcgcctgcgacgctcctccagccctgccgcctggagctgcttccaacctggtctctgtgtcaagtctggacctgtggttccccccaactacagtcaggggactttgccttattcctacaacctatgtgttgcacatacaggaaagacggagtttaatttcctaaaatgtagtgagcaattgagttcaggacaagacatactttgtggtgattcatctggggccttatttccactttgtaattccagcgagtcgacttcccatcctgagttggtgagtttcatttatgtctattctttttcattacccacccaattttctgtatttacatgaaactatcgtacattttcaagtccaatgagttgtcttagggaagtcagagctgctcagaaagctgtcctaccattctttaagaggagcagtaaattgtgagtttttatgtcgcataaaagaagtagccttatagatttacaaagtagtgagagtttgctcttagcttcctctctagcaaaaacatttggtgcgtttttttgtcctctttctcaaagctaatgaattttacctattcgttgtc

SEQ ID NO: 117957 - DNA, 1033 bp, Homo sapiens
ctactaaaaatacaaaaattagctgggtgtggtggcgggcgcctgtaatcccagctactcaggaggctaagacaggagaattgcttgaacctggcaggtggaggttgcggtgagccgagatcactccattgcattccagcctgggcaacaagagcaaaactccatctcaaaaaaaaggaaggagaaggagaggaagaagaagaaaaatactacatgttatgtgtatgagagagaaagagagagactgattcactgaacttagaaggtccaaatcatccaaataattttctaagtttatccaggttttcttggatgcaaaatccttttccacctctatataattaccagaagaaacttacaaaaaaaaggaaatgctattgcctgaatttctcttgctcggaatcctgacatattcttgaagaaggggaaaaagacaccggatttgtcttatcgtttggagctttaaatataaatgactggatgttttctcaacatccttgtaggatggaaggtgaatacaggattattccatttttaagacaaaaactactagtcttgtgtacatacaaagctcccattacatggtataagtcttttgcttggtttcccttagtatgtgattcagtaaatgggttccttacaaagtgctgagatttcttataataccacttacttttaacctttcagtagttttctttgttgtatattttgtgttctttttcccaaattattatataagtttaagtgatgcttagaataatgtttaagaccactttaaaattgcataatttattgatgaaggattaaaatagaaacttgcttttcagtgtatatgcatttgaatcattgaaacacagtctgtgcatgcattacatattcacattaaaaaactaagcatttttgaaatagcagaaaagtttaagcaattacaaaaatgtgaaaatttccaactttaatcctgttaatatttagcaatattaggcgagaacatctgtaactattgctgaattaatattacttttataatacaaaa

SEQ ID NO: 117958 - DNA, 1158 bp, Homo sapiens
tacaaatgataatgccccggtttttgctcaacggatttaccgagttaaagtccttgagaacgtgcccccaggcacctggctgcttactgcaacagccagcgacctggatgagggaatcaacggaaaagtggcatacaaattctggaaaattaatgaaaaacaatctctgctattccagcttaatgaaaatactggggaaatatcaacagcaaaaagtctagattatgaagaatgttcattttatgaaatggaaatacaagctgaagatggtgggggattgaaagggtggacaaaagtgctcatttcggtggaagatgtaaatgacaatagacctgaagtgaccattacatctctgtttagcccagtgagagaagacgcacctcagggaacagtaattcttcttttcaatgctcatgaccgagactccgggaagaatggtcaagttgtctgttctatccaggagaatctatcttttacattagaaaattcagaagaagattattacagattgttgacggcccaaattcttgaccgagaaaaagcctcagaatataatatcacggtgactgcaacagacagaggaactccgcccctgtccacagaaattcacatcaccctgcaagtgactgacatcaatgataatccacctgctttctctcaagcctcctactcagtctacctcccggaaaacaacgccagaggtacttccatcttctccgtgattgcctatgaccctgatagcaatgagaattctagagttatttactccttggcagaggataccatccaagggtctcctctctccacctatgtctctattaactcagacactggtgtgctgtatgctctgtgctcctttgactatgagcagtttagagatttgcaaatgcaggtgacggcaagtgacagtggaagcccaccacttagcagcaatgtgtcattgagactgtttgttttggaccagaatgacaatgccccagaaatcctgtaccctgccctccccactgatggttctactggtgtggagctggcaccccgctctgcagagcctggctacctggtgaccaaggtggtggcagtggacagagactcaggccagaatgcttggctctcctaccgcctattcaaggccagtgagccagggctcttctcggtggg

SEQ ID NO: 117959 - DNA, 1036 bp, Homo sapiens
gtagcggtggacgccgactcgggacacaacgcctggctgtcctaccacgtgctgcaggccagtgagcccggactcttcagcctggggctgcgcactggggaggtgcgcacggctcgagccttaggcgacagggacgcagcccgccagcgcctgctggtcgctgtgcgtgacggtggacagccgccactctctgccaccgccacgcttcatctggtcttcgcagacaacttgcaagagatactgccagacctcagcgaccgccctgtactctctgacccccaggctgaactgcagttttacctggtggtggccttggccttaatctcagtgctcttcctcctcgccgtgattctggccattgccttgcgcctgcgacgctctctcagccctgctacttgggactgcttccatcctggtctctgtgtcaagtctggacctgtagttccccccaactacagtgaggggactttgccttattcttataatctgtgcattgcacatacgggtacaaaagagtttaatttcctaaaatgcagtgtgcccctacattccaatgaagacatggtttgcagtgtttctcctggagccttaattccacctcatggtggggaggatttgacttcacatcctgagactctgacttcggtgagtttctcttttttgtgtgtgatttatctaatagtctactagtttctcatattttaggcatactactttattttcatatctagaatcatatgtttaaaatccatagctttttacaatattttctcaatgttttttcaattatagttttcactatgtatttggttcataagttgctctatctttttgtaaaataatgtcaccagactgaagatattttgtctttgtcttttttttttttttttttttttgagatggagtctcgcactgttgcctaggctggagtgcagtggcgtgatctctgctcactgcaacctccgccttctgggttcaagcgattctcctgcctcagcctcccaagtagctgggattactggtgcccctcaccaca

SEQ ID NO: 117960 - DNA, 1049 bp, Homo sapiens
aggaaccttgtaagaattatagttaggcatcctacctgatgattttatcgggaccgtattatttccacttccagaaatgtcgttcctttcagtcggttaaaatcaattggaaccaactacaacctacaagttttcagctccagtaatattttgaaaactttttaaaaattaagcaagcccttttaataattactcctttcgcaggtgttcttggtaaagttttaacgtcacataatgtaagtattgtgtatcatcgtttttaagctctacaaatacgtgtgattcacaaaggtgagcgtaatcatttcttctggaatttcttagtcgttgcaataataagaatgggctctaggcgccgctgctcaccaatcagggaatgggaagctgcgcgccattgagtccctccctcccccgcctctaccacacaaagcggaatgagatggatactcacagatcctgacactggagacttagaagtattttccttcgctttctgatatattttggatgtagtcggcctaggacttcatagatacataagccgattcacaaccaaccagctcgagaaaccgcggaatatcggcttagagcctgccatggcgaatcggctacagcgcggggaccgcagtcggctgctgctgctgctgtgcattttcctggggacgctgcgggggttccgggccaggcagatccgatattcggtgccagaagagaccgaaaagggctccttcgtgggcaatatctccaaggacctggggctggagccccgggagctggcgaagcgcggagtccgcatcgtctccagagggaagacacagcttttcgctgtgaatccgcgaagcggcagcttgatcacggcaggcaggatagaccgggaggagctctgtgagacggtgtcctcctgttttttaaatatggaacttctcgtggaagacaccttgaagatttacggagtggaggtggaaataatagatattaatgataacgcccccagcttccaggaggacgaagtggagataaaagtcagtgagcacgcaattcctggggcg

SEQ ID NO: 117961 - DNA, 1052 bp, Homo sapiens
atggtgttttatttttatcctctatttaatgggactatatgttataccttaacagaactttatcactacctccgaatcaacataaccctcttaatatcacatttcaaagccaacccttcctttttgttctccacgatcttgggaagttagtttagatgaggttttataatatggaacaatctccttttcccagccaaatacctcatatcctttttatttaactaattccagtcaaagtacaatgccttacatcatttttctcagtttggaattccacaagtataaatcctatccctagatgctcaaaatacctgaacatttttcttgacttcaagaaaaatgtaggcatctgttggaagacttgcctttcctacagttgaaattatttttgtccgagccctagatagtcagtttacaactaatgacataaggtaaattcctaaatgagaaaactaaacttgaaagggaacataaatatccaagtaatttggggcaaatacctagaagtgatgtgagagtgttgactgaattgattatggaaatgattcctgtgatcaaaaaccctagataagtctcctttcctcatttggctttcctagacattgcttcagataacatgtatgtcaggcaactatcaagcttcaataacaagttggtctgaataaaagaactgaatgtactatttgccataagaatgaccttataaagaaagaaagaaggaatctatgactcccaactacactgaaaatgaacaaaaaaatagccagaaggatactagctaaatcagtttaattaaagtccaaataccttcaatctatttatatattcacaaactactctatttgaataaatctgtagacatctttagcacatttgaaaataggtttttgagaagcactgaatcaaaatcaagttatttctatatatggatttactacattaaaaaaccttccatacatacaaacacagacaccaaagtaaaagaataaaaggaaataataccagttcaataattcaattatttcctcagaacagtcaatgtaacttcacca

SEQ ID NO: 117962 - DNA, 1070 bp, Homo sapiens
cactgcgaggaagaagagcatagaaatcaaggccaaggccacgaccaggtaaatctgcagctttgcttgggaatcagagggcacaggactgtcactgaagtctggcagtgcctcctgcaggctgtctgcgaagactaggtgaagcgtagcggcgcagagagcggcggctgtcctccgtcacgcacagcaaccagcaggttcccgtgtgcagccccaggctgaaaagcccgggctcgatggcctgcagcacgtggtaggacagccaagcgttgtgtcccgaatctgcgtccaccgccaccaccttggtcaccaggtagccggactctgcggcgcgtggcactatatcgaagagtgcggagccatcgggccccagcgcggggtacagcacccgcggcacattgtcattgaggtcgcccaccaacatgcgccggctcatgttggcgctgagcgcgggcgagccctggtcgtgggcctgcatcgtgagctcgaaggcgcacagctgctcgtggtcgaaggcacgctgcgcgaccaccaccccgctctgtgcgctcacggacacgtaggacgacagtgcccgcagctccaagtcagtggtaacgatggagtaggagacttggccattcagccctaggtccaggtcagaggcgctgacttgtgggatggaggctccgggaaggttgttttcggccacgtggaccacgtaggagacttggtggaaaaccggagcattgtcgttgacttcaccaatgcgtagggtgaggcttgtgctggatgagagcggaggcttgcccttgtcagtggcagtgatggtgacgttgtactccgggatccgctcccaatccagggtcccatctgttacaagcttatagtcattattggcggaagattcgattctaaaaggaactctttcgtttatgaggcatgtaacctccccattttctctcgaatctttatcatgtgttttgaacagagtgatcaccgtccagggttctgcgtcctcagttacagaactggacactgaagtaaaaaccacgtctggggcattgtcattctcatctaggatttctagt

SEQ ID NO: 117963 - DNA, 1071 bp, Homo sapiens
cgcagagtccggctacctggtgaccaaggtggtggcggtggacgcagattcgggacacaacgcttggctgtcctaccacgtgctgcaggccatcgagcccgggcttttcagcctggggctgcacacgggaacctgctggttgctgtgcgtgacggaggacagccgccgctctctgcgccgctacgcttcacctagtcttcgcagacagcctgcaggaggcactgccagacttcagtgacagtcctgtgccctctgattcccaagcaaagctgcagatttacctggtcgtggccttggccttgatttctatgctcttcttcctcgcagtgattttggcggtcgccttgcacctgcgatgctcttccagcccctctgcctggggttgctttcaccctggtctctgttctaagactagaccaggggtttttcccaactacaatgagggaactttgctttattcctgcaatctgtatgttccctcggattctagaaaaagaagatttaattttctcaccatgacaccagaaacagtccccccacaagatctttctaatgaagtttctctggtagcaagcttcactgaagagaataacaagataagctctaactctgttgctcctactcacgtgagttccaatgaatgtctttcatttacaaatggatgaggtttaattttcaaaccaatattttggcaagaaaatcttaaacatattatatctactattgcttcaggtttgtttgcccactcttaatatttcctgttcctttctgtgtgggccagtaacttcattattagctttcatgtatttttgaaacattttcaccatttttacgggagactttttttttttttggacggagtctcgctctgtggtccaggctggagtgcagtggcatgatctcggctcactgcaagctctgccttccgggttctggccattctcccgcctcagcctcccgggtagctgggactacaggcgcccgccaccacgcccggctaattttttgcatttttagtacagacggggtttcaccgtgttagccaggatggtctcgatttcctgacctcgt

SEQ ID NO: 117964 - DNA, 1027 bp, Homo sapiens
aattttttccctatattttgatgggcttccaaaagtattaccagtaattctcagtaattacaattaggtcagttacccaggaaaaggtaagtctgtaacattctttggactaccaattttcttttactaagtttcctgaacaataaatatttttgaaatataatgtattaatagaattctggagtacttccattatttccagtcaatgcaagttggaatgcttctactttatgctaaaaatattaatgtttctttttcacttgggttcttgttaagtgtgattctgataatgtatacaatcacatatcatttttaggtttccataatatcatgaaaatttgatttttaagcgttacatgtcaacaacctggtaaagtaatccttccattcaggatcattcaaggaatctatttaaaaatattttccccaaattatagctgaatcagaaagtttaaattattatattatatgatttgtcaaaaagagaaactcctagggagacatctccataataggtgtgttgggggaacagtaatctcaaagcagatgcactaacattataagattaaaatcattgtttatagaaacttccaattcatttaaaagctcattggggaaaaaaaagctcattgggaaaaaaaaaaaaagctcactaaagtttctattaaagcgaatacggtagatttccatccccttttgaagaacagtaggtggagctatttaagatataaaaacgaaatatcctttctgggagttcaagattgtgcagtaattggttaggactctgagcgccgctgttcaccaatcggggagagaaaagcggagatcctgctcgccttgcacgcgcctgaagcacaaagcagatagctaggaatgaaccatccctgggagtatgtggaaacaacggaggagctctgacttcccaactgtcccattctatgggcgaaggaactgctcctgacttcagtggttaagggcagaattgaaaataattctggaggaagataagaatgattcctgcgcgact

SEQ ID NO: 117965 - DNA, 1012 bp, Homo sapiens
ccttccctcataccttatttatgtacatatattttatataatagatataatttattaacaatttataaaattactttgttaatactctatatcattttctagctgaatttatcaatgataatgctcttttcccacttttatttttttcccattgaccatgcagcagttttgtgtagaccgtctgataacaactgatctgtttatctaggggggagaaatctaattcaatggaaaatataaataaaattgtgataaacttttgtaaatagagtggcttttaactacacttgagatggctagcaaattcataaagtgaatttactttctttcaaagttcagtaattctttctggccattagggatatgtccatttatactttctcagtatcccaagtcatttcatggttttaaatcattcatgaacttccaaatatagtgaatttatttcttctgcatttaaaattttatcacttaaatatacaatataccgtattgccatgacgaaaaatggtaaagactatttttcacttctgttatgcatttcattaatacgatatctgtatgtgtttccaagttagacatttcttttgcccatttcctacactaatgatactaatgatgactttgtggaatattcagaattaacaaaatgtgttttgagtgctttttttagtactggggcaaatttgcagtaatatcgcctgctttttacattaaattccccataacttttacaactatgggaaaatttctgaaacgtgcacagattccaagtgttttctgagaactttatgcttattgtagagtggttacagacactgaatgctaaagtgtattactctttgaaaagcattgcttgatttcttttggtgaattctgtaaaggtgcagggaaacataacgtcccaattattttttctttcttctttgtttgctgcctatctactttgaaagatacaatagttaaaacccagaaaagagattggaaaccccttagagaatgaaagacatcc

SEQ ID NO: 117966 - DNA, 1050 bp, Homo sapiens
aaaacagaatgtggtatatgaaatgttcttataatcaggtgattgtaaaaattgatccagataatgttagcatagcattttactgaactagtagtttacaaacacttcaaaaattatagaataacatttgcatataaaattcctcatacatttccctatcagtgaattggaagcttacaatatacaatattaccaaaaagacaaaaaaaatgaaaaggaaacagttacctttggaaaacataattaggtaaaatgggtaatatggaaagtctgaaaactgaaaaaattactgataagtcaagagaaaaggaatattagtaggaaaattcataaaagtgtgtctgactactcacagcaggtttccttattggtatgtattctgtggtccatctaagctatgttaattttattttaaatgctacctgggtattggcttctaaaaggaattcagtaaatcagataatttggcatcttcaatctagattctgatgctcacctgaaaagtctgctaaggattggaaaccaagaaaagtgaagtatctcaacagatatgtgtcacttgtgtgtactggattttttttttttttttttttttttttttttttttttgagatggagtttcactcttgttgcccaggctggagtgcaatggcatgctctcggctcactgcaacctccgcctcccaggttcaagtgattctcctgcctcagcctccctagtagctaggattacaggcatgtgccaccacgcccagctaattttgtatttttagtagagacggggtttctccatgttggtcaggctagtcttgaactcccaacctcaggtgatcttccctccttggcctcccaaagtgctgggattacaggcatgagtcactgcgcccggtcgcgtactggatttatattgtgtaatactttgctctagcagtatagtaggtgagacagtgactgtgtctagtgagcaaaaggcacttatttgacacttttgactcttcctttctacttaccttatttaaaattgatttttgcatgtggcatgatgcacca

SEQ ID NO: 117967 - DNA, 1097 bp, Homo sapiens
gaaagtgatatttagagagatgaatagattaataggatgagtagaagttatctaggtaacaaggaaagtaaaaaagaaattgtcaggcagaggaaatagcatgtgtaaagatctttttaaaaaataaaaggtgtgactcaagcaatttaaaagggctagggaggctagaaacagaaaataaatagatgaaactaataaggcagggagagccttgtaaatcacacttaaaattctggattttgttctaaatacccttgtacttaggagctattaaaatattttaaacaaggcagtgacaagatatttgaattattaagcttactctggctgctatatggagaattgatttatgagggttataaatagaaataggaagataagataggagactatggcaatattcctggtaagaaatggaagaagagctggcttggattaaaggggaggcagtggatgtagaaataaatggatgaattatagatatatttaggaaatgggttcaataagacttaataatggaataggtggaatataaatttcatgagggcagggggtgttttgtttattattatattcctaggtgtctgaaaatattgttgtgttgcctggcaagtggtagatcttcagtgaaatattattaactgaataaatacaatggataaatggggagcagggattaagagtgattcctgggtttccacattaaggaactggatggacaaagctaccatttgatgagaatggaagactaaagaatgatagatttaagagaaatcgagttgagttccagccatgttcatttgaaggatctgagaaacagtgcagatattcagtgtgtgattagacatatggtcatcattcttttttttttttgagatggagtctcgctctgtcacccaggctggagtgcagtggccctatctctgctcactgcaatctctgcctcccaggttcaagtgattcttctgcctcagcctcctgagtagctgggactacaggcgtgcaccaccacgcctggctaatttttgtatttttagtacaagacagcatttcaccatattggccaggctggtctcgaactctgatctgcccgcctc

SEQ ID NO: 117968 - DNA, 1112 bp, Homo sapiens
agcaactctttacaaacctatgagctgagccgaaatgaatactttgcgcttcgcgtgcagacgcgggaggacagcaccaagtacgcggagctggtgttggagcgcgccctggaccgagaacgggagcctagtctccagttagtgctgacggcgttggacggagggaccccagctctctccgccagcctgcctattcacatcaaggtgctggacgcgaatgacaatgcgcctgtcttcaaccagtccttgtaccgggcgcgcgtcctggaggatgcaccctccggcacgcgcgtggtacaagtccttgcaacggatctggatgaaggccccaacggtgaaattatttactccttcggcagccacaaccgcgccggcgtgcggcaactattcgccttagaccttgtaaccgggatgctgacaatcaagggtcggctggacttcgaggacaccaaactccatgagatttacatccaggccaaagacaagggcgccaatcccgaaggagcacattgcaaagtgttggtggaggttgtggatgtgaatgacaacgccccggagatcacagtcacctccgtgtacagcccagtacccgaggatgcccctctggggactgtcatcgctttgctcagtgtgactgacctggatgctggcgagaacgggctggtgacctgcgaagttccaccgggtctccctttcagccttacttcttccctcaagaattacttcactttgaaaaccagtgcagacctggatcgggagactgtgccagaatacaacctcagcatcaccgcccgagacgccggaaccccttccctctcagcccttacaatagtgcgtgttcaagtgtccgacatcaatgacaaccctccacaatcttctcaatcttcctacgacgtttacattgaagaaaacaacctccccggggctccaatactaaacctaagtgtctgggaccccgacgccccgcagaatgctcggctttctttctttctcttggagcaaggagctgaaaccgggctagtgggtcgctatttcacaataaatcgtgacaatggcatagtgtcatccttagtgcccctagactatgaggatcggcgggaatttgaattaac

SEQ ID NO: 117969 - DNA, 1022 bp, Homo sapiens
ctgcaggtcgctggagaggtgaaccaaagacacttccgtgtggatttggacagcggagccctgctcatcaagaacccaatcgaccgagaggcactgtgtgggctcagtgccagctgcatcgtgcccctggagtttgtcaccgaaggtcctttggaaatgtaccgagcagaggtagagatcgtagatgtgaatgatcacgccccccgttttccgcggcagcagctggacttggaaattggggaggcagctcctccaggacagcgtttcccgttggaaaaggctcaggatgcagatgtggggagcaattcgattagcagctataggctgagctccaatgaacactttgcactggatgtgaagaagcgcagcgacggcagcctggtcccagagctgctcctggagaagcctttggatcgagagaagcaatcggactaccgcctggtgctgactgctgtcgatggagggaacccgccgagatctggcaccgcagagctccgggtatccgtgctggacgtaaacgacaacgccccagccttccagcaatccagctacaggattagtgtgttggagagcgcaccagcgggcatggtgctcatccagctcaatgcctcagacccggacctgggtcccagtggtaacgtcaccttttatttcagtggtcatacccctgatcgtgtaagaaacctctttagcctgcaccccactactggaaagcttactcttttggggcccctagactttgagagtgagaattactatgaatttgatgtgcgggctcgcgatgggggttctccagccatggagcaacattgcagccttcgagtggatctgctggacgtaaatgacaatgccccttacatcacagtgacctcagagcttggaaccctccccgagagtgcagaacctggcactgtggtggcacttatcagtgtgcaggatccagactcagggtcaaacggagatgtgagcctccgcattcctgaccacttgccatttgccctcaagtctgccttcaggaacca

SEQ ID NO: 117970 - DNA, 1108 bp, Homo sapiens
ttacactctaagccccaacagccacttctctctgaatgtgaagaccctaaaagatgggaagccattcccagagctggtgctagagcagcagctggatcgtgaagcccaggcaagacatcagctggtgcttactgctgtggatggggggaccccagcccgctcagggaccacccttatctctgtcatcgtgctggacatcaatgataatgctccaaccttccaatcctcagttctacgtgtgggaatcccagagaatgcacccattggtactctgctgctccgcctcaatgccactgatccagacgagggcaccaacggccaactagactattcttttggagaccacacatctgaggcagtgcggaacctctttggcctagaccctagcagtggggcaatccatgtgttgggtcccatagactttgaggagtcacgtttctatgaaattcatgcaagagcccgtgaccagggacagcctgccatggagggccactgtgtgattcaagtggatgtgggggatgtcaatgacaatgccccagaggtgctattggcctctttggccaaccctgtcctagagagcacaccagtgggcacagtagtggggttgtttaatgtgcgagaccgggactcaggtagaaatggtgaagtgagccttgatatctctccggacctgccatttcagattaagccttctgagaaccactactcgctgctaaccagccagcctttggaccgggaggccacatcccactatatcatcgagctgctggccagcgatgctggttcaccttccctacacaaacatctcaccatcaggctcaacatttcagatgtcaatgacaatgcaccccgcttcaaccagcagctttacactgcttacatcctagaaaaccggcctccgggctcccttctttgcactgtggctgcctcagatccagacactggggataatgcccgcctcacctactccattgtaggaaatcaggttcagggagccccagcctcctcctttgtgtatgtcaacccagaggatggacggatctttgcccagcgtacctttgactatgaattgctgcagatgctgcagattgtggtgggggttcgagac

SEQ ID NO: 117971 - DNA, 1034 bp, Homo sapiens
ttaccattatcatccccattttgcagatgagaaaactgaagtggcataaggaggttaggtagacttgcccaggatcacagtgagtaaggaaaggagctaggaatcaaacctagactttctcactccagagcctcttaacctctaccctcaactcttgtgaagagagactaccttggtgacccctatattcccagtgctcagcgtggtcaaggcccagggtgctgtataggcattcattaactgctggggatataagacagtgactgttgaggaccctaagtttagctcccacctgatcttcctctgtctctgcagaagctgctgatgggagctccaccctgggagggggtgccggcaccatgggattgagcgcccgctacggaccccagttcaccctgcagcacgtgcccgactaccgccagaatgtctacatcccaggcagcaatgccacactgaccaacgcagctggcaagcgggatggcaaggccccagcaggtggcaatggcaacaagaagaagtcgggcaagaaggagaagaagtaacatggaggccaggccaagagccacagggcggcctctccccaaccagcccagcttctccttacctgcacccaggcctcagagtttcagggctaacccccagaatactggtaggggccaaggccatgctccccttgggaaacagaaacaagtgcccagtcagcacctaccccttcccccccagggggttgaatatgcaaaagcagttccgctgggaacccccatccaatcaactgctgtacccatgggggtagtggggttactgtagacaccaagaaccatttgccacaccccgtttagttacagctgaactcctccatcttccaaatcaatcaggcccatccatcccatgcctccctcctccccaccccactccaacagttcctctttcccgagtaaggtggttggggtgttgaagtaccaagtaacctacaagcctcctagttctgaaaagttggaagggcatcatgacctcttggcctctcctttgattct

SEQ ID NO: 117972 - DNA, 1050 bp, Homo sapiens
gggagctagggcagggaccaaatgaacagaaagtctcagcccaggatggggcttcttcaacagggcccctgccctcctgaagcctcagtccttcaccttgccaggtgccgtttctcttccgtgaaggccactgcccaggtccccagtgcgccccctagtggccatagcctggttaaagttccccagtgcctccttgtgcatagaccttcttctcccacccccttctgcccctgggtccccggccatccagcggggctgccagagaaccccagacctgcccttacagtagtgtagcgccccctccctctttcggctggtgtagaatagccagtagtgtagtgcggtgtgcttttacgtgatggcgggtgggcagcgggcggcgggctccgcgcagccgtctgtccttgatctgcccgcggcggcccgtgttgtgttttgtgctgtgtccacgcgctaaggcgaccccctcccccgtactgacttctcctataagcgcttctcttcgcatagtcacgtagctcccaccccaccctcttcctgtgtctcacgcaagttttatactctaatatttatatggctttttttcttcgacaaaaaaataataaaacgtttcttctgaaaagctgaacgtttctgtataagcgatggaagctcctggcatgtgtgcatgaagtgatgagctgaggtgggtgctggaagaagggcggaatcgggaggccactttgtgtcattgcgcgtctagatgtttccgaattgcgtgtgtgtgtgtgactgtgcaatatggttgtgtatgcttgcaatgccgttgtgcctatgagacagtgtgcgattgtgtgcctatggatctgtgtaccgtgtgccattgtgtgatcggtccgctgtgggggtggggatctgagtgcggcgtgtcagtgtgcagtggagtgtgcagtctaagcttgcggctgtctccaggcagaagaggagaccccggcgcgggcgggggcgggttggcgccgggcaaacgccttgggtagaggggagaggacgtttcgttagttcccgcccctt

SEQ ID NO: 117973 - DNA, 1038 bp, Homo sapiens
tttggaagaatcacctcccgcattccctcccactcccgcggctttcccaaaacccctaggcagcgggggtgggggtgcgggggcaaaggagagtctaccctcctcccgtgaagccctccggggcgcttcgggtaggcaattttagtcaggaaggggcgggaactaacgaaacgtcctctcccctctacccaaggcgtttgcccggcgccaacccgcccccgcccgcgccggggtctcctcttctgcctggagacagccgcaagcttagactgcacactccactgcacactgacacgccgcactcagatccccacccccacagcggaccgatcacacaatggcacacggtacacagatccataggcacacaatcgcacactgtctcataggcacaacggcattgcaagcatacacaaccatattgcacagtcacacacacacacgcaattcggaaacatctagacgcgcaatgacacaaagtggcctcccgattccgcccttcttccagcacccacctcagctcatcacttcatgcacacatgccaggagcttccatcgcttatacagaaacgttcagcttttcagaagaaacgttttattatttttttgtcgaagaaaaaaagccatataaatattagagtataaaacttgcgtgagacacaggaagagggtggggtgggagctacgtgactatgcgaagagaagcgcttataggagaagtcagtacgggggagggggtcgccttagcgcgtggacacagcacaaaacacaacacgggccgccgcgggcagatcaaggacagacggctgcgcggagcccgccgcccgctgcccacccgccatcacgtaaaagcacaccgcactacactactggctattctacaccagccgaaagagggagggggcgctacactactgtaagggcaggtctggggttctctggcagccccgctggatggccggggacccaggggcagaagggggtgggagaagaaggtctatgcacaaggaggcactggggaactttaaccaggctatg

SEQ ID NO: 117974 - DNA, 3665 bp, Homo sapiens
ggacgtttcatcatccccagaagaaaaacttcataatccccattagcagtcactactgattctcccctccccttgcctctggcaaccaccagtctattttctatctctgggtttgcctgtgctggacatttcgcagaagctgacccataacatatggcctttcgtgtcaggcttctttcgtcccagacagctgtttgtgtatacacagttgctctgtgctgttctggggcatgggaggaggaaacatcatgagatgggcatggtctcaaggagtggccttcctgctgcagatactggggccataagcctagataccataaatgaatatgagagtcttggggatgaaacccagcagttagaacagaaactcgtggattgatttggttcttcttttctaatctggtatgacagccggaacttgaccatctcttagccacctgggctgagatttcttggtaggggtcctctcctgtccatctttatcccagttctgcttccctggcatagtttttattactacctcccccccgccatgccacccccacatactctacacaccttgtagggcccttggcatttgtattacggctgctacctttgaaggggtgggaaagagctaaggcatgtgggcatctgttgttggaggaacacgtgggagtgcggtgtcagtgcgtggctgctgttcctctttgcgggagtctctccagccacttacggaaggttgccttctgctagggacaaccctcccagggctgactgagaagtgttttggcctaggagtttcctgggacctgtcaagaaaacaaaaataatactatgtactaaactttagtctatttaattccaacatccctattacgagaaaatagactttgaatacttcatctctccttaagtcacatagctaacacttcagcccagttctgtctgtctgtgttcaaacttttgtgctgttttcacacagggaagcaagggggcaaggcttgctttcctgttgcaccacactctcttacattctttgccacccaacaatatattccacatgctggatctctgcccctttcttcaaagtaagggcctctgtgaagtggccaaggtagtcatgtctgcatggcttacgctgattatctgctgtagagtttgaaagaaattagaaatgaggccttccatagacagaatctctcgtcttctcttgcagccaacaggaaggccgggtgtgcagtcacatctctgctagcttcggagctgaccaaggatgatgccatggctgctgttcctgccaaggtgtccaagaacagtgagacattccccacaatccttgaggaagccaaggagttggttggccgtgcaagctaatgtgggtcctgtgaccgcggcagctcctcagcggagccgcagactgtcctgccctgcagcatgtgcctaaaggctcaaggggatattcctctggggtggccactcccaccaccctgaccctgtctttctctctggcctgctgctctctcaacatcacatacagcttcagctgcctggaggccagaaggaaagggcagtgcaggggaggcctgagcccgacttagccagccctggctgttgtattaccaaagcagggtccatgtttgctgccttaaccctgtctcctctctgttactcagagggcctcatctcagacaaggcccagcctgctttttctcagccctgactttctaatgggctttcccccctaggtcagtcttgctggatttgtgcttttcttttgtggtttctctggccctgagaatagcatggggcttgtaaacctttgggctagatccctcctttcattgctgttgtctctgctcttccctctcctggctgtggttatttattattagtggtgtggcactgggagctgctcctaaggaagcagggagcaaatcccacctttaccccaccttcctgggaaaggcctccaaagcaaaggatctggaccagtttccctgctgtgctgtggcccaggccagagcctgtgggcaggcaggcagggcatagcgacagtgtgggacctgcccccagcttctgccacgctttatgcccttgcctctctggacgctctgcaccaaccccaggctactgagccaccttccctcctcatgccttccctgagctttggtgcatctcatctggactatgggttgtactgtgaccatcccaacacctcaccctctgtctacaaggaaatgggaggtggagcctcctggctgagaaattgttttgcaaatggatctatttttgtatgaaaaaaaaaatttttttaaagaaaactgttccttccccctttcccctccataatgtaagaagctttggtggcaggttacagagttctgggatttcttctcacaggcccaatcctgaatgtgcccctggaccttctggacccttgagtccaaggcagatcctctctcccagggaatccgacacaggaggaaccccttctctggttgagctgggccaggcctaagagtagcaggaactctaagaccacagagttttttataaatgtataaatgtatcaagccaaatgtgcagatgctaactggacattctggggaactgggcaccaggagtgccttcatacactgtaccccagctctcttctaaaagagaagtgggtgggcacactgaactgtttggtggccccaaccacaggaagctgcaattctctggcttagggtgatacttttgccctccttgtgcccctctcagctttccatccccagctaggaagaaagaatggcactcttgggcttggcccagaattagagttattagagcaagagagagcttaggaagcatgagggcaactatagtgaggccttattgccaggagggagggttttggttgctggcgcttgtgtataaaggggcaagagcagctcctttggactattcctgggaggactctgatgcagggcgtctgttgctcccctgggtcacctcctccctgctcgctgacatctggggctttgaccctttcttttttaatctacttttgctaagatgcatttaataaaaaaaaagagagagagagagaggtgtgagggacaaaatgcaaacctatttcccttgcctcataggcttctgggatgtcatcacctccagtttgttggttttgtttccaactgttaataaagcattgaaacagtactgccttacagcttcctgtgtgaatttctgagctgttttcttttcactctagtccaggctcctctagtctttcctgcctcaaatccctggttgacctgacaaatcactgtgaaaaagctaaaggtgccagacactttacttgggcacagggctagagatgattaatacatggtggctgctgccccaccagagctcacctcagggccgtttggccacagtaaaggagtgggcgcctggttcagctccctgactcttccacattgctgctacttggtttggagcccttttttggaactcacttggaacctttcatgttcccagatgtcacgcaaggtttcctggcagtacctgtgtctcttgctgagggaagcatctggctcccattttctcatcccctctgctctgttggtggccacagaccacattccagagtagaggggtttaccctggggtggaaacctgagcctgcccagcagagg

SEQ ID NO: 117975 - DNA, 1104 bp, Homo sapiens
agttatactttgagattattgtaaacagaaggagttaacacagcttgctttggccagtgcttagctattaatacagtggtatctgtagggcctgtagtacctgccacagcctggaaagggggaccttagagcatgctagcctatgtaaactcagtattctggcccaacaacagccatcactgtgagtttcatctgtaatggctggctgcccatttctacctatactctgaataaccagagtgatactcccttctgagggttctcttgtatgacttcagaatgttccccaaactgaaagctcccgagtcaaagttcttacccattttctggcattctctgagtacaggctttctaaagcgtggggagaagtggatatgaagagctgagtactctctgggctcgagcatttagtcttatagataggtgtttgcaaggagagtacagctagaggtactattactcctgtattttgtctttataggttcttacaacattatttcctactgaccacacaaggtgatgtggccttaacattaagcatttctagccttacaaaaatacattgcatcttattgttttttttttttttttttttgaccccgtcggctaagtgcctgcatcagaattttggtggggaattcccttttaagcctcttcctgtggaactatactagaatcccagatgcttcctgtccacaggtagccagacatcagtggcttccctctgctggggaagccccattcttcacttctttccaagtagaaaatcagaactcacaggtggaggaaggaggaattttgttggaaactaaccttccagcagaggacctgaattagtcaaagtactctctcccatgcaagagggaataggaggagacttatactaggagatactaaattggaaagtaggtgaaatgacaattacatatattttaagtggctctagcctataagcttatctttctaggctctgggtccactaaatacacttgaatatatctgggagaatctcaagggagacatttgtagttattctggtaactctttagaccctggtgcattcacatcatgtaaagtgatgtgatgcggtctcacattaaacag

SEQ ID NO: 117976 - DNA, 1119 bp, Homo sapiens
ttataggtgtaccatagttcatggtttactattcccctatttaggggtacctacatggctttggtttttgctgttataaacagtgctgtattgaacatccctttgcatgccagtactcatctttgagtaattccttgggctagagaagtgggtctgcttcttggtcttggtcttggtcctttactccttggctgcacagctttgtgaaggatgcacaggaacagtataacaagctgcggatgatgcattctaacatggagaccctctataaggagctgggcgagtacttcctctttgaccccaagaagttgtctgttgaagaatttttcatggatcttcacaattttcggaatatgtttttggtgagcaagggatacttgctgactgaatcttttgtgggcatttctcactttcccctgggttcctgttggctggtagtaggtatacaatgcccatgtgttccttcctcctcttccctgccccagcaagcagtcaaggagaaccagaagcggcgggagacagaagaaaagatgaggcgagcaaaactagccaaggagaaggcagagaaggagcggctagagaagcagcagaagagagagcaactcatagacatgaatgcaggtgaggagtgaagacgggttgatgggctgagataggaatgttgggaagacttctctgcctagagtctagaggcagagtctcatgtctgagctcacctcctggcaaatgatttttggcagtcttcactccgagatcctgatgccggactttaaccccaattctgatacatgcgcattccaacttgccctggttaaactattaccttttctctcctttgctcgctcttgcattctctctcattcccctgtgattgtggtattgctgtgatatatactgttttccttctgtccatccaaaggttcctctggcctgttctcattccctccactaaatctttcgggtttttttctgtaaaatattttcctgacgctcctcccatcttttaattgtggcgtgtcttccctttctgcttatttcacaaagtactatgtccctagtaccttagcacagttgtatgcacaattagattttaaatggattgaacttttggagcgggtg

SEQ ID NO: 117977 - DNA, 1081 bp, Homo sapiens
aacatagactacattaacaaaaattaggcctcactgtcctggaactagacaaagaaaaagcagcattcactggaaattggaacagatttctgcccccgcctctatatttctatgtatatctccttcctcccaaaccctgttctctaaaataaatgagaccaagatctcaggggatttcatagattcatgttaaattaaatgaagtctctcttctgttcctagtactgcataccttgtgaaggctggaggttcaatgatcaaataatttatagtttcactggaaagatgaaaacttaagtatgtgacacaactaaagtacataaggaactaaaattattaagtaccagaatgtgtgtatagactgaagctatgctctgaaaggtgaaactaaggggtgttgaggctgggattattagtaagctcttgctgtctgtttttatggtttttttttttttttttttttttagtttctgctgaaaacttgcaaaagaacctagatcagatgaagaaacaaatttctgatgtggaacgtgatgttcagaatttcccagctgccacagatgaaaaagacaagtttgttgaaaaaatgaccatatcctctcttgaaaggagggagttgttccctaggaagggaaagaaaacttcctgtagtgggggaaaaacaggatagatagggcagtatgcaatttttttctcttaaaaaactctttttctttaaatacatagttttttgggtttgttagtattttgagacaggctctctctgtgtcacccaggctggagtgcagtggtgccatcacgcctcactgcagccttgacctcttggactcaaacgatccttaccccctcagcctccttggtagctgggactacaggcatgtgccaccaggccctgctaaactttttgtaacctttttttctttagagatggggtctcactttgttgcccaggctgcatagttcctgagagcattccattgttgtggagtagaagcacaccatgcagatcaaccataaaagtcccaccaactcccctgcctgtaccccgtctccactacacacgctcacacatgcttccctc

SEQ ID NO: 117978 - DNA, 1074 bp, Homo sapiens
acaatatgttgggattacagatgtaagctaccatgcccagctttcactttctgataagtaaaggtactagcttggcttcaattaaatttaaaattactttgtgatttaaaataactaaggtaaattttgtacttctcagagtaggatcagtaactccagagaagggttctgttctgaagtttccacgtatactcgtaactctttggtagcaaaatttcaaatgagaaattcctctgcaaagttgatataggtagtacttatttgatgatcaggacaaatgttaaatttttgttctttttaattactcatctacctacttcataccaagaaatatagacttaaatatttatttgacaaatatttcagggtctgctatgttataggctctattaggcatgtgttccagagatgaaagggtattttccgtaaaacccactcatagtcttgtgatgcagttattgtccctgtttatccaaatgagaaaaccaaagtttaaatgatgcgaagtgcccagatcacacagccaataagtacacatacccataagtaaagtcagtgatacaatgagaccagtaaactgtcacattattcttgattatataatcttaaattattgtcaataactattactacatagtgtctgtggtgaagtcttatggagattaaagtattgtgagtcagttcctcttcccaagagtatctctaggaacataagacatgagtaattggtttaaaaaatgatacaagaaagacaatggtgtagtacattatgatttctagtgttatgatattgatatggaaaacagaatttaagaaaagaaaattgagagtagtataggataggatggtctggaagatggaatttagtgattaaatgtctctcatgtgctaatgatacaaagctgaataagacaatagtccctgtctgcatgagccacgtatttggtaaagacagaaaggcagatgataacagtgcagattaataaatgctatgatggaggtatgctagaatgtttatgagagtactaggaagggagggatctaaatcaagtgggggcagtgttggaggggcaa

SEQ ID NO: 117979 - DNA, 1047 bp, Homo sapiens
aacatggtggaaggggactgctgaactactactaaccaactgttcttgtgaatcaagttttaatggaacacaaccatgcccattcatttatgtattgtctgtgcctgctttcatgctacagtggcagagttgaataattgagaccatatggcctgcaaagcctaaaatagttactatctggtcctttacaggcagcttgctgatccctgcaagtagataggatgtaggtaggaaagcattactgataaatattgaagaaatgaaaatgagatatttattagagttgggggaggttcagtaataaaagggtggttggttgaagaggaggttagttttgaaggaatacaatagaccattataatagagaggaagtgaggggccatttcacgctggacagtagttgcttggtaaagcacagaggtggcttacttttaatcatgcttttctaatcttttccctgctagccaagaaggatcaagaaggtggagaagaaaagaaatctgtgcaaaagaaaaaagtaaaagagttaaaggtgttggattcaaagacagcccagaatctctgtgagtatctcttggtcccaactattcaaaatgtgaaggaattcttttaagaatttttaattctcttgaatctatggtcccttgatatggaactttaattgttcaattcctgctatataccaaccattgcacagtgaattttcagtatcatgtttaatttcttcaatagcactgcaagatttttaagtatccagttttatgtcaaggaaacaagctaagacttttaggaatttgcttagacataaagctagtaagaaggaggtctgggatttgagccttttttttttttttttttttttttgagacacagtctcaccactctgttgcccatgctggggtgtaataatgcgatcacagctcactgccacctcagcttcctgggctcagttgattcttccaccccagcctcccaagtagctgagactacaggtgtgcaccaccatgctcagctaattttttgtagagatggggttttgccatgttg

SEQ ID NO: 117980 - DNA, 1045 bp, Homo sapiens
taaataaataaataaaaagaagatctctcaggttgggactgagaagatacaaagccagacttcccttcttgccagagcagagcctcttctttaggatttcccacagaggctattggtgaccaagtgaaggagcaatgccctgccaccttcagagggagaaagggctggactcttacttttctcctgacgtgataatctgttacccaaagtcttgagaaaagtttgcacactgccgtcaacggagaacatggtcatagaagtgggcctcacccgttctaagaattaaaggagagcttttaagctttgggacaactgtgtttggccactgtgtaatagctgcatccctatggtgattctagagtatcagctttttttttcccgaatactttttttacttaagtagcagctttctccctggtaagactcaatgaattaacagcacttcatggacttttacagaaagaaaaaatataatactgtgttggggccgggggggatgtggtgaaaagtcctttatggcttcaggattataatatcgctagtccttcccttgacctttttggagatactccctgagactgacttagatgcaaatgatcagatgaaagttcttgcttaatattcttctcccacttctgaaatgggtcagtgactctgactttcagcagccacagcaagcagtctattcccttgcccaagggaagggcacaggtgatagaagggaattagcagggtctggcttcttggcaaggctggcaggacactcgtagagtctggtctgtggagactagattggccccatgtctagtttggaaactatagttcccactagcaaaaggtttagaatctgctgaataggtcaggattgcagcagctagaaatacggatcctggcacggccactttttaaccacatagctaggtgtaagggtctctcttttctactattgtttgttgagagtcacagcctttgcagaaaaaattttcctcttttcctttgtgctaaggtgctatctatacccacctattttggtcccttatttcac

SEQ ID NO: 117981 - DNA, 1073 bp, Homo sapiens
atctggttcttcctttgggattctgtgtggctttgttcttgtcctttaggtttgttcattaatgccagtttgccctgtccctccttacagcttgcacatctgtaatggtctagttctgtgggattttgcagatagttgtatattttggccaaggtatcagtgatacggttacctttgggcagggataactgctattcggttggcatgatattttttccttctataatgtataccttagtgattgttttaaagtgctgaatttatcccttatgtatattacaaccatgaagaatataaatcagaagtcctccatttgggcagcttcttatattaacacttatattaacattaagaccctcttactgtctcctcttcccagaattagagagttgatgtagtgcttaatagacatggcttattgtatgctaggtgaacttggcaattccatagctatgttaccctcacagaaagttatttcctggagagattattaagtgttctgatctttcatatatgcctgagagatctaagattcttccacaaagaccctatttcttcagagaaaactatagtgatgccagagtctttttttttttttttttaacaacttgtgatttttgtgcacctgtgttgtatgtgttgccattatctcactttagggacgttggataaactggcgtatttgtgcagcctcatttaagtagtggcaaccattaatgacttgtacccacaagtttttccagataatttctgttttttccacctttcttacatgttcttttttagtcataggtacttggcttactcaagggaggtgtagcgtaagataaagataatggagggtgttccctgtagaataggtacaaatgctgcaggctttatcttgggcagagcaagtagggttttggtcctgagtaagtgagtgaggttaggtggagctgcctgtcttccagccgtgcggatacaactgactcagtccgtgttctcaacagtttttgaaaagcccatttttctatcccacttactcccacctgcagttctttaagaacgtagtttccaggatgtcaggcaac

SEQ ID NO: 117982 - DNA, 1224 bp, Homo sapiens
cctttcctggcttccacctcaggaacaaagaagggaaaaaaacagcagtatgacgaaaaccagcagctgtctctgcaggctcaggctgggggctgggagtttattccatctgttctctttgttctgctcttaccctgttacttcccttcccaaccctgaataaaacagaatatttctagaatcctttgttatggagaatggtttagaattctgcagtttactcagtatttatttaggttagcgtgggtgagatacagcagagattaaaactgatctggagcacctaaaaaaaagatgaaggtactttgccttctcattcagtcttaaattatgaatacctatttaatgtcagatttgtgacaggggattatcaactattatttccaattatcaaaacattatttccataatgcctaattggtattatctttgttttataattgagagatataaaagagaattaatatgtcctttgcttgttaagattttatagcaagtaaacaccaagccagaatttgagcctagatatattgggctcaaatccagcacttagtgaaagggagtggcaagaatgcaggcatgttgagagaaacctcaggtgcttgcttccagtgactgacagtgtaaagtaactgtgctagtgcttcttgatttttaccagtgattagtgtcctgatttcttcaacaaataaatttcaggggaaaaaatgagatggagaggaacatatagattaagagggaattttaaattttatcaaccagtacagtatatggaacttatttagatcttgatccaaatgaactatacaaaacacttgacagttgagacagctggaaattagtgtgataatggtttcatggcattttttaaaaagtcatcatcttttagagatgtgtacagaaataattgcggatcattatgggatttagaagtggggtgtagatgaaacagaattggtcacgagtggataactgttgaaactgagtgatgtatgcatggggattaataattgtgtttttgaatgtttaatttttcccataataaaacattttttaatccaggaaaagagttttatttctagtaccttattttaatgccttttcttctgccctctagcctattgtttccttgcataaacctgtcctctttgctgacatacctgagtccttgtttgggatagtgcctgtccttccagtccttccccacccacatcctagaagcag

SEQ ID NO: 117983 - DNA, 1054 bp, Homo sapiens
gctcaaagagaggtttgtattttatcagcttggtagctcattgtagcctcattatatacacactcataatcccatctctgtctcagtttctgctgaaaaactactttaagcgcataatagaacctacccacattatatatggataactagcttgagataacatactgaatccatttcttcagggaattcccctggtctaacttggatagaatatgctggtgcagaaagattttcacggtcaaagtcaaccctttgtgtcatatgttaactcctaattatccccagctagtctcatttttagagcctctttctagccatcccagctttagtgtgtgcctgtattactcttttctagaaacatatagactgaaatggtatcttttaagtccaaggtaccatctgccattatctgtggattccagattttatttctaaccaaatgtccttttaaatgtcattgtctgagacttagaccatctagttggggggtcagtattacttaaacttctaacatcttggtacagtcagttcctagccttaaatgtctgttgataccagtaaatctcaaactttagtataaggattacatgaggagcatgtttgtaacatgtaacatgtttacatgttaatggtgtgaattaagccactcttcacctgttctcttaataatattttggtatctgtatctgaataggtattatataagtattatccctgttcttatggaggtcatatgagattgattaggaaacaattcaacattttctgttgacttggcagtcaattttggagtcactgtttcagaggcacttttcttgccatcttccaaacttctcagtagccatcttagaaggacattttgaagaagtcctctgtggtcagtgaactagctcggaaccacttagagattgactctgctggagaggatggatggagggcagagtgattagggcagagtattgtgctggactggggcttgtacaacacggaaggagttgtgagaaactggaggagatagaaatcaagatgaagaatgttacagttatacagacat

SEQ ID NO: 117984 - DNA, 1053 bp, Homo sapiens
actcttctatactccaatactacctctgacttaattcttaggaatttttatacgaaaaggtcatgatcctaccaatattctggcctttcagttccttgaattcttctactgattttgtcctctatcctacctcaaccattcccccgttctaggatctcatgtcataccacccaggttctatctttttaccttactccctttgctatcctgaccccaacaggcctccagccccgctaatccatttgtcctaccagcatttcactgtccttcactttctgatgacttcactctttccctgagctaaaatttcttggttaatcattataatcattcgcttgggttttgttcttccattatctctctcatttcatactcgattggcaaaaccacaatcccggttaattccttttctgtctttgtcctgctcctgtagctgtgcaactgaacatggctggagaataccacaaaactgggccctcctttgacagactttcttctcttagctttcaggacaggaaacacttacttttcctgctaactcactggctgatctttctcccaactctcctctgcttaatttgtgaagttgcttggcccttgatactgccaggcactcatatttgaagcattacaaattcattgaatttcctgctctcctaaaggttatttcacacctttttttcctcctcaacagcccaaacctccctcatcctcattctcagttggggatgttttctttctacttcactgacaaaattgaagcaatcagaaaaaggaacttctaaagacttccatcattacttttacctagcagaattctgtcttcctctgttaccatggtcctgtctaaagccagttcctggactaatttgttatcatcattttaacaaatatgtagaatacactggaaatacagggtaaaaaggtgtcctcccccagagtgactgtggttaaatcatactttttatatacatatgttattctaataaaggaatgggaaaatccttttcttctttagttcaagtgagaaaggtaaatttttgaataaaactt

SEQ ID NO: 117985 - DNA, 1047 bp, Homo sapiens
atactgaattgaatattgaaccagttcagtttgaatgctgaagccagtgtcagttaccaagtctctcattcatagtcttgatattgatgatataattaaatgatagataactactcattatcaaccttgtaaatatttcatcttccagatgaagtagtgacatagattagataactttttccaaactgtataaaaagtgtcagaattcagactccaaacagtgactccaaagtccttgctctagccttctacttcttaggaagtgtgtatgtacttgccctaagagcctctgaaagcttagatccagacaaaagctgcaagaaaggggatatgccgccttcaggaaccacttcattcattcagacgcaaatgtccttgaattggcagtgactgagtagaaaaaagggaacaataatagattaaaaaaagtaagtgagatactagatatttagggttataaaagagaaggcatattctgactgtattcaactctagcaaaactaatccagttgaagaaataagacatgtttatctagtagaagcactgcttaggtgatttcagtccaggtggttgccagtattgatgaagaagttatttggacactgggttttcatcatattgcattatttcctctcttgcttgctaaacacaactctgctatttgttaagcatgcctgtatcccccttatgttttattgatacctaaaaccttcggtatacctactggcccctccaagaatgggcattgaagaaagcacctgcctcactctgcacatttgcctcctgtagtgaaaagtctcctgttacacatattctgaagcagaatatgtgtgcctttttacaagagaagagctgagagacaggaactggtcctagaatattatactccagattcttttacacattatttctcttttaaggattagtgtcttgtttctgaaggctttgtttcccataaatgaggtatttacttactcagttaacttattccctgccagagaatattttgaatttacttttgataggcagtgccataaaacttctgg

SEQ ID NO: 117986 - DNA, 1634 bp, Homo sapiens
acataggccatatttgcatgcacagtattgttcccatgatgtgtttgagatgcctgtgattctgagtgagttagcctttttcttctagaaaccaagttaatataaaggaccttagggatttgctcataaaatgagcaaatttggcacagttagccaaactggtgggagaaatttaatgatgagcaagacttctctgaaataaagccttaatggttatgaagctagaggatttggagttaggaggaggatacgtagtatatatatgaatctagttcttgaataatcaccaattaacagatgaactggaagtattctctcctaatcccactgcagctattctgtgcctcaagttagtcttattctagtaagacattgctgataatcagccagccacctattttacagcctcatccgttttctaggacggaaagtacagggctcagtttactaattcttaacaccctgcctttatccacagcttgtggctgaggacctctcccaggactgcttctggacaaaggtgaaggaggaccgctttgagaacaatgaacttttcgccaaacttacccttaccttctctgcccagaccaagagtgagtaccttcctctttgatgcaaaggtccagtgtagggcttagaatattttttcattaggtttcctattcccttcccttccctgggtgaagatagaaagggtatgttggatggaagactgatggattttcccattcaaaagaaagaaaagatgtttttgtattaaatattatggagttacttggtttgggaaagagaactgttgtatgtaggtattttgtatcagtataacttgttagggatatgagattaaagtgacagagcttgatttgggcccattttgatacttttgaacagattctggcactgccttaaggtgcagtttccagttctaagtacataattaataagggttggaaagagtctttaacagtttgggtgactgagtgactgtctacagtaacaagaaccatatgtgattccttttcttccttccatttctttccaatattggatgccttctccctcctggcactttgctcctgaagcttccaaaggtaagaatacaaaagagccttttagtttggtctcttgaatattagagaaaaagatgaaatagatataaaggaatttctcattagaaaactgagaccagagattgagggttgacttgtctttgctaggtgttttttgtttttgtttcctcccctggagttcaaaatgaccaatagctttggcattaactaatagggaggaaagtttgcttcccgttaaactaccacatacttaatctctttagaaggtgagggacaacgtaagcaataatactattaccttacatttgtgctgttttacaattttcatagtgccttaacatatatgaccctatttgatatgcagagaagccttatgagacaggcaggatgtgtatcatctccattctgtagcatatatagactctgaacagttaggtagctttcccaaggttatgtgatcagaaccaggagtcttgacttctggtccattttttctatataaattcttgattttcttttttagccttcatatggttccttttattttacaagagctgatctact

SEQ ID NO: 117987 - DNA, 1606 bp, Homo sapiens
cgatctcggctcactgcaacctctgtctcctgggttcaagcagttctcctgcctcagcctcccaagtagctgggattacaggtgcccaccaccatgcccggctaatttttgtatttttggtagaggctagggttcaccatgttggacaggttggtctcgaacttctgacctcaggtgatccacctgcctcggcctcccgaagtgctgggattacaggtgtgagccactccgcccagccaaaccttgattttaaggtcagaatcatggtgcttttttcccccgagcatggcctggatttatgagctctgtaaatcaagtactggcccagaacaggaggcagtggggggattccagcacccccaggcaaaagaggaggtagggagaattatgggtaataatacttgtgcttcttactgagatggagagcttgctgggagcctgattcgttttttctctagttggactcagagttaacagcccgacatgagctacaggtggaaatgaaaaagatggaaagtgactttgagcagaagcttcaagatcttcagggagaaaaagatgcactgcattctgaaaagcagcaaattgccacagagaaacaggacctggaagcagaggtgtcccagctcacaggagaggtaatgcctgagcagggaaggcagaatgacctgtaacctcaggatgcacatggcttggaacaggagtcagtcatctcgctcctagggagggttcagctactaataggtaatctagttacatggtgcatattttaaaaataatatactggtttttggtttgtgttgggggtaagtaatacataagacagaaaatctggaaaatacagaaaaacattaagaataaagtaagtttcattaccacccagaaataaaagtaataagtctcctaataaattaggaataaaaactaaactgttaaaaattgactaatttcctgttattttagtcacctctgcacagatttatccttacacactctctctgcagtagtaaatacttaaatgatctttgatgtctgataacttgattacttatgtggttatataatcatctgtgtagcacatatattagttatataactagaacatttaatttacttgacctttacattttctaatcaagggagggtttaacataaaggttgaaattgtcttcttaatacaaagcatgctgaactaagaacatgaaaacctgaattctagttttggctctgctgccaagccgtgtgactttaggtgatcatgtcatctctctgactcctctcagttcctccatttgtaacatgagaagtttggattaagtagtttattaggttccttccagtcccagtagtccctgaagtggggtgagaagtactcacattgatgttatttctgtaggttgccaagctgacaaaggaactggaagatgccaagaaagaaatggcttccctctctgcggcagctattactgtacctccttctgttcctagtcgtgctcctgttccccctgcccctcctttacctggtgactctggcactattattccaccaccacctgctcctggggatagtaccactcctcctcctcctcctcctcctcctcctcct

SEQ ID NO: 117988 - DNA, 2025 bp, Homo sapiens
tttttaaagcagatttcactatctgttctaggtgatcatttttacaaatgatactgcagtgaacatccttgtgcatatcttctttcacatttatgcccatatgttggatacatttctagaagtagactatatgttacatgcatgagaaattgattagtactgttaaatgcccctccaaaagttgtatcaatttatacttcattgaataggggacttgatttggtatttatggacaggagcctagggatggattgtagggaatgcatttccctgaagagatggtccttagctttcagcagtttctggaaactgagtggtgagaataataatgtgagaaatccggaacactgataatgtcctgtttcctaatcggtctgtgcccctgtgtaatttactcattatacgtgtccgtgtcacagtacctggaaagttctctccgtttcctttctcttgggcaggaatgaaagggttttggaggcaatgacagaaagagctgagatggatgaagtggaacgtttccagccgctgctggatggattaaaaagtggaaccactattgcactgaaggcatgtatatcccctgaaactgggcccaagaatagaattcaagatggacagacttaaattcatttgaccttttaataaaatacatggagtgcctcccaactatatattttacatttcagaatctgttatgaagggaaaatgattaaccttctttctaagaaggtaaagaatgaactgttttcctcattatgagatggaaaaaggcatgatatctatttacaatctaggaaaaccaagacctacaataacatatactctcaaatccttgaaaccatttagagtttaggctctccggatctgtactcaaaccaggtctcattgctatagtagaaaagtcatctttagagtttttgtattgtatctttcaggttgtattggggacctaagaatgcatgtaaagaaaatggattcttgatctccaggagttagcattgacatagctgctgaattttcttattttaggttggatgcctacagctgatcaatgctctcatcacaccagcggaggaacttgacttccgagttcacatcagaagtgaactgatgcgtttggggctacatcaggtgttgcaggtaagatattacacttcattagaaaggctagactggttccttcttgctctacagccccaataatcccggggataattctggttttcaattaaaaaccaggttgaaaagcttaggtttctaaccacagaggatacttttgggttccctgacttctacttttgttgttgacaggaccttcgagagattgaaaatgaagatatgagagtgcaactaaatgtgtttgatgaacaaggggaagaggattcctatgacctgaagggacggctggatgacattcgcatggagatggaatatccttttgctgactaggttcaaggcagatgagacattcattgtatttagttccctgatccctgtgtggaatggtttgggagatgatgactcagaacagagcatcaggcttatgtgtcttctcattaaataaggcaggtgtatttttattgcgctggctttacttagcttatcatagatcagggaagtcagtaaaggtgatctgagggttgttgagcatggaagccatcaaaatcagtgtaaacttcctagaatgtgatagcttagcttactaagatgtagaactggcttttagagatgtttggactgacagagggagtaatttagttacctgttaatattttcagtaagtgactttgaggcagttacctcttattttctgtctactgcctgatcttcaagccaagtacttactaggaatcctctgtgtgtatagtaccacccaattcactggtcccttaaaggacgttttagaaagcttaaagtttctggtgatgtttacaggaagaacagccagtagaatggaagtggtgtcttgctacttttccctagctttttcaagagttaaataagccacctgtcaaacataatttc

SEQ ID NO: 117989 - DNA, 1043 bp, Homo sapiens
ttcttcgtgggaaaggagtttgtacagggactgagttaaccaggggtaatgggtttgtaggccctagagttggtgcagagtttgttgctgttgattttgcttgtgtttagattatgccattcatccagtgcttcagtctgaagagatttttaaggtccatccttgatgcagaaagcattgtgtgtggttttctttcaataatacaaaataaatctttcatttatattgagtccatttttcttagagaaaaaaagtgtgtatatgtctatagagatttatactaaaatgttaactatacttatctttgaggaattttcatcagctgtaatagcttaaatttctagggatcaaaaagatttatttacttaagcattttacatgctcaactcttcactaagcatactaatattaaacactaaaaatttgtaaagaatttgaggcaattttgttttttctcttttttctccctctcctagctggatatgaacctgaatgaggagaaacagcaacctttgagggagaaggacatcatcatcaagagggagatggtgtcccaatacttgtacacctccaaggctgtgagtcctgggacaggtacccatgacatgggagactgtgcccttgtcttggacctgttttttttttgccaattttatgtaacattttatgtctgcatcaattctgtttcattccattatataagcctgttcactttttactgtcttatttagttaccgttcttacatacattttgcctggttaaattttcatgaagtatgtaaatatagggaatgggataggcagttctaagtctcatttatgttggtggtatgtgagatgggtatctgccctgataaacgtggcctgacatggtggcttactcctgtaatctgagcactttgggaggctgaggcagaaggatcacttgagcccaggagtttgaaatcagcctgggcaacgtagtaagaccttgtctctgctaaaaataaaaaataaaaataaagtataaactctattgactaatactagtccttaatttatga

SEQ ID NO: 117990 - DNA, 1050 bp, Homo sapiens
tatttggcttgtatctattaaaatctgtagtaatacctcttgaagggagacatcctctggggtcctagcaacatttattgttgggtagctagaaggaaacaaagggcattttattgatagaactctgtcatgagaggctttcagttccgtactactacaaggcttagaaatggcaggggagatcaagaacaatgtttcttctagtttaaagaggtttgaaatcttaatactttggtcctcttatctttgaacatagatgagagtacagagtcagtatggtaagttagataggaggaagactgatttcttcttttcatgtcagaagagtcttgaactgcttgtgaaccagaggaaccatgcctgtgtaagaggttaaaggggtaaagaatttgatgtgtggcttgttatgtaagtgaaaatggatcactgctaatgcttttttctgtttctcagctggagagatttaccagcatgagaattaagaaggagaaggaaaagcccaattctgctcatagaaattcttctgcatcatatggggatgatcccacagcacagtcattgcaagatgtttcagatgaacaagtgctggttctctttgaacagatgctggtaagtttcccattcccaaaatgttgcttcttcctgtgcatttatggacatggtgggctctttttggtgcataattcccaactagccctttattacaaagaattccaggcttaacatggaactttttaatattaaccctttaatcccataattagggactaaatatacaaataccagttcataaaattggaatctgtgcttggaaacatccgatcactgtcttgttcatggtcttctgcccagcaacactttagccacaaagacgtagtggaccatctaaccctgtgtaccagagttggtaatatggagaccacctttgggttaagccagagcagataaagtgtggaggtattcacaacaaactctgtataaaggagaaactgaggatggaatatcatttgctcaaggtcctgtatagtggtgaatctggaaagaaaatac

SEQ ID NO: 117991 - DNA, 1039 bp, Homo sapiens
acttccaaccttctgtctcaaggggaaaggccaggctgctggggctctaagagactagagggggaaaagtgctgagtgtctcagtatatactatgcctaggtttacttttctttttagtatagggaccctggcatcctccaatccagagaccctccgttttaccctcttctgagaacaaacttccagacctctgctggaagaagggagggtagtttcccaatggcatggttgaggggtggggtatgatctagggatctaactgcttcttaaacagcttccaaccagtcttatttttagcctccccctcctttaactcccatttccataggtatctggtgccaattattcctaagccttttgaggatccttaaagtgtaatgggttggttattgctctttccggtttaggactcagctttctgtaatgtgttggatttaatacctctagttcttctagtcccagtcttcaaaatttgcagttgctcttttgttcttcccaaccttgtaggctctttccttgcatcacttcttactttctaaaaaacaccttttctgtaggtttagtgaggtttcaagaaggagagaaattagatgttttggttcagtctgacatcttttacctgaaagttcctattaatctggattcctaagccagatttggatattttaaaaaaattcattctgtatttatgcttccttcagtatctatatttgtagttaaaggtataagtgctaatgtttagtggaggactcaatagaagggccaggaagtgagatatttaccacagccagcctaggacagtaagggtttggtttgggaccagaagagaattgacagcaaacaaggagaatgatgaaagtggatgcatttagatgtaggtaggatgattagagacttaattttaagaatcttggatatctgagacctaatacataaataaagctccagtagcatttatctccctggactcctgtgtttttgttgttgttgttgttgttgttgttgttgttgttaacttgtcatgatctaggaacttat

SEQ ID NO: 117992 - DNA, 1681 bp, Homo sapiens
atgttttgatatatgtatacattgtggaactaatgagtttaactctccagtgcttagtttagctgtggggctgctgaggcactctgaaccaaatggaggagctgctacagtcttacctaatccttcagcactttttcctcagtggtcatggagaacatgagcctatcatttccatttctggggactgctaggtaatcttcagccttctttcccttaaacacatttagcttttctaggtttatagtttatatttttaaattcctggtcattttgtgcccctcttctagacttcctttcctctgaggtaccctttttctttcctttattttctttttgaagtgggtactccaactctacacaacgcctgtgtaggctgcaggcaccaataagtggtgatgtcagaatctagtttgtttctctgtaaatgctagatgaaatgttgattcaattgctgttgtctttgggccattccttgaaaatggaagggaaagttcttctgtgcatttaaagttgtccattatttcattttctttagttctgactgacttctgtttaaggagtgggaattgaagaagggaaactagccagtttcagtggttccatcatatattatttaacttttacaaagtactttgcaaaacaaagtgctttatatctgttttattatttattcttcatactagtcctctgagacaacagaaccctagagataggaagactgaaactgtggtcgatttttaaaagcttaccctgactttacattcctttagtggaaatgtgataaattttgtggcaaaggccaggcgtggtggctcacgcttgtaatcccagcactttgggaggccaaggcaggtggatcacgaggtcaggagttcaagaccatcctggctaatacggtgaaaccccgtctctactaaatatacaaaaaattagccgagtgaggtgatgggcgcctgtagttccagctactcgggaggctgagacaggagaatggtctgaacgcaggggcgtagcttgcagtgagccaagattgcgccactgcactccagcataggcaacagagtgagacttcgtctcaaaaaaaaaaatttttttttgtggcaaagctagatcaggcctcaatggtaactgaattcaagatcctattatgaccctctgttgcctcagtaccctaaggaactgtgtcaatcctgaataaagaaattaatcagagctggacccttatctctctgttctgcatgattctaagtgacatatgccttaccttacctgttctttctgggtaggtagattaggatatgaaaggaaattatttttggctgtagtgatacttatttcccattttacccataggtagactttgtcattattgagggcttattgtcctgtgggctccagtcaaggttccttggtctcattcataaggaaagacattactcttgaaggtttgatttactgagctattcgtaacaatcatagtgtactgtcatataccttgaattgaaacttttccttacttttctcaatttgaatagagtaatgaaagaataaatatactgtttcggatgatgctcctaaacctgtagtgatgctaattttaaaatttatttattaaaatgtgggccacatcagttgaataagacatgattttgccctcatgcaatttagtctggttcacaga

SEQ ID NO: 117993 - DNA, 3890 bp, Homo sapiens
attttaaatttgacgtttggtattcttaaagacctctgtttgtgctcctgaaatttgactgttgtaatgattgcaaatggctaataaccaggatctcttctgagtctgggaactgctgaagtttgttctttagacctggcagttatttgccagtggttaataattaagacattgccacagaggtccaagtacctggaactgggatttgtttctggtgactagtggtgaggagtagggaagagtttctgttgatttcctgagtctacatgtatctactctagatccaaagactgaccaagaagtcatgagactgtcctatcaggttcagttcttgctctttaagaaattgtaatttcaaccacgtctataaaagagggatagaaaaagctctaaggctgtgatcttagactttaaatgctgtagaaattcatagaagtgagggaattaagtggaaaggctattggactgacagaaggcctaagtttcaaaatcttagaatgctggagtcaaaaggatgctaagaattatctaattcaacccctttattttttattttttaagagtcagagtcttactctgttgcccaggctggagcgcagtggtgcagtcatggcccactgcagcctggaactcctgggctcaagcagtcctcccacctcagcctccagagtagctgggatacaggcacaggccaccgggcccagctatcaacccctttactttatagattaagaaatgttgactagacaagtgatctgtccaaatttaaaactagaaatagaacctttatctcccaccctgtctgaattattctttccatatgtagctgcttagttgtgtctttaccactaattaaccatgtgaactctaagcaagttattttacttttcttcatctttttatcttttgtaaaattagggggttattatgaatcatttctaacatctctgctaatgccccagatactgtaaatgacccagaatgtaattgcgggcagtgttaacttagcttcctagaagatgggggatatgactgggccttgaataaaatccaagatttggcagagtagagagggaaagaattcatgagatggggagcagtagaacaaaggcttaggtgtgaatatgtggctgtagtaaagagaaatggcctgattatagcaattatatgaggtttagtagaaccatttaagaaaggtaaagccacttcatagaaattattttatccctggtaagggctttaaggttccctttctataaaaacctgcagaaagcaggattgaaatttaacattttgtaacaggttgtaatacatgttgatgtccgtttttggccatgtgataagtggtggtgacagtaagtacattggaatatccaagaaggaatagtgttaaggtcagttttcagcaagttatttccgctacgtagatggagtttaaaaagttaagtttatttgattttcagtccttaccaattttaatacatcgatctttttagactttcagaaattagattttaaaaggcgtgactcttcagctggatctcaaggatgtataagaaaattatgggctcagataggtaatgccattgttgaaacaatctgagtctatctttgggccctgttgtttcttctaaatgttctttaatacagtacgatttagcttttgattgcatacttatttgaagtattcttctgtctttcttgaatgcaaaaatatatgtttatatcttattttggggtcttatctcccatctagattgtaaggtttctaagagtagtggtagtatttagctcatgttagttaatatcctttatgtattttatattttagttttaatgttaaccttgggaatctttttcttttttctcatcttaaggtttgcttcctttttttttttttttaatagccttgggaatcttgattattttcaaggctctctgtttctgtgatctaatataggagactgacagttttgaaaacattaattctctctcaccaaagtaactatggggcagagagaatcactaatgtaactatatgtgaccagaagaactctgttgagaagagattattattcatctctggagagatagttttgacttgtgtttaatgaaagaacatgtctgtaggattaaaaaaaactcttatgttattttacatagtgtaaggctatcaacttttattattaaaaatgaaagcaggcactttgggaggccgaggtgggcagatcacctgaggccaggagttcaagaccagcctggccaacatggtgaaaccccgtctctactaaaaatacaaaaattatccaggcgtggtggtgcccagttgtagtcccagctacccgggaggccgaggcaggagaattgcttgaacccaggaggtggaggttgctgtgagtcgagattgtgccattgcactccagcctgggcgacagagcgagactctgtctcaaaataaataaataaataaaaatgaaagcaggatttgactcagtgcccttagggattgttacatacatttaaagtgaataattgctaagttcccatattatttgaatctattaatatgatctttaatggctacagaaaggtttacattgagtattaaatgaagagaacaaggaagagttttcaagtcctcagggtatgtctggatatccacaaaaagtactagtggcagtaggagtgcaccatttttttcataagcacatatactcccacccagagctataagaattccttcagttccttcatttggcaatagaagcaaaatagttttggactattctaaaattatttcattttgcatggggcctagagggatatttttagttttcttagtttttgtgaaagatgtgtgtcaggcttagaggtctctagtgatttctttcttgattcttgtatttttaaaagatgggagttggtcttagttggcagctctttgcatccgccagggctgttcgttacttacttctaggtctgtgggtgacgtctgtttcctgtgattgaaaccgcaagaagaagtggtgagaagccactgtaggatatgtattatcaggcaagcagcaggcattgggctgccctcaaaaagagcagtagtacctaagtatagtctttaaggagtcggaagagaccctagaaatgatctgacccagcctcttaaaattaggaggacactgaggcctagtggtattaagttgctcaaagtcgtgtaattagatgacctaggttttagactccactaatattcttctcagtattctttctcacattgcattgtcatacctaaactttgtaactgtgccttgtcaggagtgtttccttaagcaaaataccactggagaagagtaaatactgataggcattttgcctatggtaattggatgatgatgttttgcttttagatgatgtgctaatgattttttgtgtgtgctttttttttgaaaacacatatatatttttgaaacaatacgtaagaaccctaaatttctatttttcatttttattttacagtctttgtatattttagtcattatctctatgcacaaatatttttacaacattgcctttatagtttacagatgttttttgcttttaaaatagtgtcataaaaattttccagctttctaatctttgaaaattgccaccttaatttgaaatggaaatgtatgtgtattctaaaagtgatagtttttttctaagaaaatacaaatgtatataaaaagagtaaaacagtcccatactttgtttttcagaaattaattttttttaatggttagaaccaaagagaacagtacatgatatatggaagtttctttagatcctaagtactttggcatgaaattctgtgtgtgtttgtgttagaacatagttcaacacaagtacaattg

SEQ ID NO: 117994 - DNA, 1304 bp, Homo sapiens
agagcgagactccaactcagaaaaaaaagaaagaaagaaagaaagaaatggggtctcactatgttgcccaggctggtctcgaactcctagcgtcaagtgatcctcctgccttggcctcccaaagccctgtgattacaagtgtgagccactgtgctcggcttctctcttttcttctagaacttgtatagatttagcttttaaatttccctcttttctatcatgcatatgtgagttccacatgttcactttgggatataaattgtcacctgtggtcaacagagaacatttctgatactctgaggatttcgggactttcattccatttatcgtggaagcatttttttcttgttaggtggtggtgttagcaaccttttgttttcctgtattcagtatactacagattgtgtaatgccagtcttcctgtttctaaatattaatgaatgtttagcatctttatagataaggaaaattaattcattccagactaggatagggaataacaacagtagcagtaataaaagcagttgtttgttgcatacttaactgtatccctagtgcagtgctaaagagccttagatttattatctcattaatctctacattgaccttataaaataggtactgttattattcccattttataggtaatgaaactggaactcagatcaagcagcctgcttgaagacatagaactagttagtgacagagctaggattcaaacctaggcctagctgattcaaaactcatggacttactcactacattgtactgacagtttatgtgtgtccagtttttgtgcctgcagtgtaaaactggactgcagtgtaactattcactgctaggaatttcttagaaaattttggtggtattcccttagagttctttggtcatctacagtctattaaaatgaactggattctcctagagttcagttggcaggaaaaaagtactaggcttagatgtaaaaagcgtagtggctaaatgcctgtttttttttttttttttttgcatttagtaatttagactttgaagccattggaagaatcttaattaaaccttttttaggcatgaaaaaatagctattacagtgcttgcaaaacctatctttcgcttggctcatgcgttattaggatgatgcttaaattattattttttaatgtaactgtgtctcctttgtaagtagaacagctctaacatcatcacctgtcaggagttttagttgtttaaattgctgagagccacaagtagtggtaacaatgttacaggaagggggaagctgttactagactgtctctatagttatc

SEQ ID NO: 117995 - DNA, 1981 bp, Homo sapiens
ttacactagtgtatctttctactaaacaaatggcttgtaactcttagtcccacctcccaacattttgacccagctccacaaatttgggaagaaaactgataaagcgatggaaacaggaagaaaatgttgttttatgacctagagggttgagatgttaaccctggagggttagatgtttaattctaaatagaattaaaatagtgactcatctcttcctatttctagcaagaccaagtgctcctggactgccctttccagtgatatctgagatgtcagtaaccatctgtttttatctggtgaacatctttttttccccccctagaaatataaggttaagggtattgacaccccctccttctttggtgactaaagcagcatttttgtatgtttctttaggataagaattgacccctcccccccgttagctttccttccaaaacttaagttctagggctcatattccttctatttctgtatctttttgttttgattttatttccatgagtactgtttgaccttcctcacccaaattccagctattgctgctgacttgtggtgacctcagtgacttgttttcatgtcttgagtagaattttatatgtactctattttatctaacaattatttcacgaacttgtgaagtctactatgtgtgtggtactgtaaggtgagaaacctgaggaagctcaaccccttttcacctgtcttttggaatgtccatgaagtcttctatatgtttaatggatttggctcagggttgtaggtatttgctttagagaggatggagctgaaccaagttctcttttctttctgcggtgttagtcttaacccttaatctgctgaatttttaaaactaaatagctcaagtaatgaggaaaattgcattagtagctacggaattggaaggtttctaggaaagtagtgctgcttaacccttttattgccaaatgtaacctatctcaaggcatcagaatattctttcttcctcttgctccttttatgagaactctgtggaaatgagagatgaggaggagcattgcaatccacttctctttgtgtctgtgtatgtatacgtgggtgggtggagtgggcgagattgctggtgtgcttttgatacccgtggcttagttttcttgaactataggctaaaactgaactcaaaggtctttcgccgcctccaccttttctagagtatgtgtcctctggaactccattaagaatgtactgtataaaactgcactggtttggactaagtgtgcccgaaggttgtttgcatttgagggtttataattcctttagctgctacatacctttcctggcttatgcaggttctaaatacggattaactggtgagaacacagagctcacaaattgtctgagatctgctcttaccctctgaggcatcttgtgtggaaaggagatggaccctcagtttaaaagtggttgggcatcatcttttaaaaacacatgattgttagacgtgctgacagtgagtggctgaagccaggctgcctggtattaccccttggttcttcatgagtctgtcttctcctgggccatgagcataccccttctccggcattattccatttcctttcacaagtccttaagatgaaggaaaataaaaattttaggtgaacagagggttttctgacttttcagcagtgatcaatgtgggtgtcaaatagactgatttccaaaatatacgtaaggggaataagtagaaccgggatgttaggaggctgcagagtattcttacatttaatagactttgtatgcactctcatataatcgagaaagtgatgcattgtaagagagaatattgcttcctgatttaactaggagcattagcgagaattttttttttctttttttgagatggagtctcgctctgttgcccaggctggagtgcagtggtgcaatctcagctcactgcaagctccgcctcccgggttcatgccattcttctgcctcagcctcc

SEQ ID NO: 117996 - DNA, 1024 bp, Homo sapiens
gcgatttttggtctgggatgtgagagggtccaggctgtcaggctgtacagccacgtgggcgctgcgtgggagccagaggcctgcgctgctccaaccgccagggggcggtgctctccgccgcggccgcggagagctgcaccgcccactcaccacccccccccacgtgggtccgaatggttaggtccgctgggcaggtagcgcgcttccgcggcttccctccgcccctctcccttcccccattggtaggggctgcgggtccgggcggaagtggggcaggcgggcgggagcgaggcgtcgtcgttgtatattcatgaggcgcgcgcagcccggcatgctaatgaggcggggcgcggcggctggctaaagagcgactgggcggcggcgggcgcggagctgccaggcgggagcggcgtaggcgcggggtcgccggccagcgtgaaccgggacatggagccgcccggcgggagcctggggcccggccgcgggacccgggacaagaagaagggccggagcccagatgagctgccctcggcgggcggcgacggcggcaaatctaagaaatttgtgagtgtccctcccatcccgctcctgcctggccccgtaaccgccctctggacccctgcagccggcccctggggcgcctgcccggctttggggagccgcccccgcgccttccttcctcgtttcgctcggtccgcagctctgcagcccgacatcctctcccttcgggacctcgggaagccccggaatcccacccggctcttgccccggccacctcggggcttccctcgttccccagcccttacattctgccctcccgcccgcatatccccggccggctctcagccccgtctctcccctctcagcctcacttcctttcttcttcctccagtacccgaacacgcctcctcttttttggtcccctcttctgggtccattttctcttcttaaccttacaccttttttggtattctcgtatttccttctcctaaaggtcacttccttctccatgattcatcctttt

SEQ ID NO: 117997 - DNA, 1012 bp, Homo sapiens
ttctcaacggggcctgagaaatggctttggaaaagggtgctgggagaagattagaacttagagtgagatcctgacctctctccccttgctttgcaggccagaggcacccaatgagttctatgatggagaccatgacaatgacaaggaaagcgatgtggagatttaagagtggcttgggatgctgtgtcccaaggaatttcttttcacctcttggttgggctggagggaaaaggagtggctcctagagtcctgggggtcaccccagggcttttgctgactctgggaaagagtctggagaccacatttggttctcgaaccatctacctgcttttcctctctctcccaaggcctgacaatggtacctattagggatgagatacagacaaggatagctatctgggacattattggcagtgggccctggaggccagtccctagccccccttgccccttatttcttccctgcttccctcgaacccagagatttttgagggatgaacgggtagacaaggactgagattgcctctgacttcctcctcccctgggttctgacttcttcctccccttgcttccagggaagatgaagagagagagatttggaaggggctctggctccctaacacctgaatcccagatgatgggaagtatgttttcaagtgtggggaggatatgaaaatgttctgttctcacttttggctttatgtccattttaccactgtttttatccaataaactaagtcggtattttttgtacctttcgcctttctaggaatgttaattcttgctagtttcctatttatgaaaggagagggaaatgggcatgatgatgcatgtaataaaagcatagttaacattcattcagcacttatcctacgttaggccctgtgtatgtattctacatttattattgtaaatataagaagttaatagaggattttggttaagagttagacaaacctgggcagatttgagaggagtagaagatgacttcaggtttttgaatctgggtgtt

SEQ ID NO: 117998 - DNA, 1051 bp, Homo sapiens
ctgacctccctgagccacactgagctggaagccgcagaggtcatcctggagcatgcccaccgcggggagcagacaacctcccaggtgagggctgtggcctctaagagcttccccggggatcctttttacccttccctcccaatgcagccctctttgcttcacacattgtcctttttcttccaagaagtgctagggacagggttggagagtgagtcagtgaatgagtgactttgacttttcccaacccctaggtaagctgggagcaagacctgaagctgtttcttcaggagcctggtgtattttcccccaccccacctcagcagtttcagccagcagggactgatcaggtgagatcttcctgcttgttggaaccaggccacatataaaggcgattatgatttaggcctcctccattatctttgttttgtgttaacttagtgagtgtacaccgtggagagggggtttcagaactccagctcacctccctcccaacaggacacacacaaaaaaacacacctcagtccacctttcagtcacttgactgcgccatccttttcattctacctctgtcccttgacctggatcccatttctgaagctctgtatctctgtgtccacattacctgtgtccatgactgtaggcatgtgcccctttctctttgtccttgtccttggaggtcaagatagagtggaaaaaggagggaactggagagaaggagcagcctcaggtcctcctcacagcaccccctgacccattcaggtgtgtgtcctggagtggggagcagaaggcgtggctggcaagagtggcctggagaaagaggttcagcgcttgaccagccgagctgcccgtgactacaagatccagaaccatgggcatcgggtgaggtgggggggcacaggtgtcatgtgcaccttcttgtctcagcaagaagagctgagagaggggatcttggagccattgagggtgtcatggagctacagaggggagggaaaggtattttaaggtaacagtgtggcacaatagttaagagcacagtttttggagctagacc

SEQ ID NO: 117999 - DNA, 1035 bp, Homo sapiens
caagtcaccaaagctgggcctgactctgatctcatattctcccacttggggtgggcctgactcctttctctcatctgcacaggctaaaccgaagtgaccatgggatcttccactctcggaccagtctccagaaactgagcaccaaggttcgagggatgagggcatgagtgggggcagggaagagggaggcagagtagtctagtggtttggaacataggtgcatatgtatgaaagactgggttgaatccaggctctcctacttcctgggtgggtaaccttggttaatttacttgatctctgtgagccttattttcttctataaaatggagagaatacccttctttttcagtcctttaatatgcatttattgaggatctgtatataataggcactgttctagacattatggatacagtggagaacactaccaatggagttcctgccctcacagtctggttaagagagacagacagcaaataaatacttagattaagatgaaaataaaacaaggtactatgataaagaataacaagggggtagaatttagagggaggcctctctgaataggtggcctaactgtcaagaaggagctggccttgcaaagatctaggggaagaacattgcagagagaagaaatggtgagtgcaaagggtctgaggtgggaataactttgtaggctcgaggaactgagagagggccagtatggctggagtactgtgagcaagggaacaagcgcttgaaaagaggtcagagagattgcgggggccagctcatattgaacgtggtggaccatggtaaggaacagtggattttattttaaatgcgtgcagaaggcactagaagattttgagcaggagttgtgtgtatgcaacatttttagtgtagtgccaggcacatagtaagcactcaataatgtgagaatccattctggatctggcttctcaattggtcttggaaggactctgggggtctagggcttcctattgacatcagtttaccctcctagctgtccgcccagtcagcccagtactccca

SEQ ID NO: 118000 - DNA, 1043 bp, Homo sapiens
ctgtaaatataccattaaaaggatacacttgtttagagtaagaacatgcacattggggaggggacttaaatttttcttcactctgttcataaatgatgatgaaaatgccaaaagtattgattttggggttacaaataacttttagcaagtaggagaatgtgcagatatggaatccacagataataagggtggactataaagtgatttcagagagtgctatttaaaaataaaagtggtgaggagatacagtgtgatgggggttgtacttgtgacagtgaggtcagggaaggactttctgaggatgaggactccagcagagacctgagaatcaagaacatggaggcatagatctcctcctctctgaatcccatgcccccatcagccacataccacatagggaggccacagatgggccgtggtgggtggtggtagcctttgcaccatggtgagcagagacggctggctctcctcagggctccggctggaaggtgtataccggaaagggggcgctcgtgcccgcagcctgagactcctggctgagttccgtcgggatgcccggtcggtgaagctccgaccaggggagcactttgtggaggatgtcactgacacactcaaacgcttctttcgtgagctcgatgaccctgtgacctctgcacggttgctgcctcgctggagggaggctgctggtattcctaagatccctgagagccaaggcccaaccaggatctctgccttcccccaccagaatccatggtttggcagccctccgccccatcacttcccaccctgggggatcatccagagacttggctcagggggaggtgggaagggggcagagacacatccatcctgcatttgtgcctaaaaatccctccctctgtaccagctgccactctttcttcccgggtcctccccaaccctcctccattccatccccagagctgccccagaagaatcagcgcctggagaaatataaagatgtgattggctgcctgccgcgggtcaaccgccgcacactggccaccctcattgggcatctctat

SEQ ID NO: 118001 - DNA, 1167 bp, Homo sapiens
tgcccggcctctgccccatccctcctcgccccctccctcgtcgcagcctgcgctgcccgccactgcccgccccgcccccgccactcctgtcccgcgagcacctcagctcccagccccgtgctgtcgagcccggcctgagtcaccgggaaaccgggccctgagtcagggcccgaggctcagcacgcgggccctggcttgggaatgaggcccagctggagagaggcagagggaggccagcagtgatgctgggacggagagggcgtcctggtcaccgacagagcacaagagtaacagggagagagcctaggccgaggcggaagacagaaacccaggctcagaggcagacagagacacagatacaactcaagatctggttagaattgtagactgagtcaaggacaagcttaataacagagagcaaaacagggtgggacaaggagagggacaaagaagaattgagaggttgagatggaatggggcagggacagtgacaaggcagagataaaactcaggggccacagaattagagacaggtctatgaaatagaccagggtcagggtcggggtcaggctggtggaagggggacagagcacagagacctgagcccaagggaatgagcagggaaaaggcaagctcagaaaaggaaggcttggagaaagcagaggtggggggatggcatttcacactgccaaatcgctacagggcatgtgcacacacaggtgaacagcatgtgaacatgctgccggtgggcagagagtccagaagcctctggagtacccctgaccagaggtcaggcctcatctctctggcatccccatccttattcttcaattagcctccacccagggccgggaccccacacattaggactggttagggctctcccggcagcctgaccaaagcaggcaggatgtggaggcggccagggctggagggacaggaaggaagtctgagcagagacaataggtggaaggggaggagggactgggaacaaccaggattaggacggcaggcctgcatacatcggctctggaaacaagagggagggggcgtctgcacctccttcctcctatctaggctgcccctctccctaccttactccagagctgattggccacatcattggcccctcctctgcatctccctatcccactctgacccacagca

SEQ ID NO: 118002 - DNA, 1052 bp, Homo sapiens
agaacggaggctggggatggcttcttccatcagagctctgtgagggaggagtggggctgtgtgtgtgtctgggggaaggcaggggagctctgtgaagctgtggggcacctaggggagcccttgaatcacacttgctaagagtctgagacacctggggggctccatgggcaaaggccacctccactcctcagaggcagatccagctcagctctggctgctgagaatcctgtcgccatggagatgaggagctggctcgtctgacagcattggcggcactgggcgtggcctgccctcagcatgatttgcaggtgggggtgggcaagttggggcagcaaagggattccgtaggactgtgtcaggtgcaatgttgactgacacatgcaatgtggctgctgctggctttacagtccactgacatgggcctgcatcccagttattaactggcggccctgaacaagggccacagcatctctgagcctcaatcccagcatcggtaaaatggggttggcagtattgttcgcacggtagttgtgacattcactcgagcctgtcaatggggagtacagtgctggggcacagcgaagactcagtaagtggtgactattacttcttaattggtgttaggattggggccctgcaggagcctgccccaaggcagcagccccctgccctcagcctgctccctgggactcccaggtgagactggagagaggcctgactccttttccacagacaaaggcgatcaggagtcaggagttatatcatcctttgaacatgggcctggaggctctgccgcaggcgcctctgaaaaataaataataacaacgtgaataattcacagaatctgtgtgaataattcaccatggcctcctaagcaccagccgattagtcaccgcagacccaggctctggtcttgtctgcctcaggctgccccactggccctagggagtgtggcctggccacaggggcaggaggtggagggcatgtggggacacttagaggagccctctggaggctacagggtcctgaggggcagccaggagatagggctg

SEQ ID NO: 118003 - DNA, 1088 bp, Homo sapiens
cccatgctctacccagggaggctccttcggaagcctccgtcttcccaaatcaaaggtgatggcaatattaactcattagcactaagcccctagaggaagctggatttgaggggtaatcttttcacagggcctcaccttgttccttggccctctcctcagcccaggggcttcctgagaaggcagacaagggacaggcgagatagcctggaggctggggggtggggagattcccctgagaagcagtgtctccccggaattgggcagagtggctatgtgtgtgggggtgggggtgagggaacagaggagattggaggtgtgcacctgcagtggttgtcatggtaacctggcccaagggggtggcctctcccccaaagccctgtgaagcttggaacacaagagtggagacacacacacacacacacacacacacacacacacacacacacacacacacacggttttgcagaactctacttctgggttctctctactcctcggctgcccctcttctctctacttctctgggtgaggctgacacgagggagggggccgtgggaagaggatgtgtcagggtgccagcaagcgggaggccctccacaaggtgggtaggggatgtgcttcgcaaatgggtggtttggtgtgggattatgtgtgcagcgtagctgggtggtgtccccgtatccacggaggacatgtatatacccaggtgacccagccccagtcctgcagtcagaccacacaggagagggatttgggggggatgattattaacaaagacaacaataatcacagttatctttaattgagagtttattaaattccagctatgtggttgtggtaaacattttacaggcagtgtctcatttgattttcagcaatagtacaaggtaggaactattagccccgtttacagatgagaaaactgaggttctaagagtttaagtaacttgtttcaggtcaaggagctggaaagagacaggtcaagactctgtaggaggggaggaggcacaggacaggggtgccagctgctgaggccactagtcctgtccccaggccccaggggtcacttatgcccatgtgtccccatg

SEQ ID NO: 118004 - DNA, 1028 bp, Homo sapiens
gtatatttcatttcttatagctgtagtggttcctacggcttttaggctgtatgtttacacagtcatgtcttttttttgcccctgtgttcaatgtccccccctccgtagggacaaaaaaaggcatgactcccaaggactggtacccttaaccctcattccctctgccttatcaggagaccccagtagctggaaaaagctggtgggttgggagcagaggcagaggttggggtggtagggaggaggtcgaggtctcccgaatttatgtctctgtcacggttgactaaggaggaaggtgtccagcagaacaggtgggaatgagggggacagcatccgagtctagtggcttccatgccccctgcttgcagatgagctgggggactgtctctgtcaaacctctgtcttagggtagttcctgtagggctgctgcctatgaccctttcctgacaacatatctaagtaagggaatagaaggtgtccctttcaatcttggtcacaggccccccttgtccctttccttgaccgtattccaatctatgattatttaatctttttgagccttcaatttctgcctcttcccactagaataaaagtttgcaggaggccagaacgttgtttaacttatttaccaccaccgaaaatatttgttgcatgaatgagtgaatggaaggaattctgcttagagattctgtagccagagcaagataagggagggagaaggagggcaggctccagatgagtagggctgtaggtgagaactgtggtgaaaagggggaaagagggttagatggtgaagagagtgggtgggatgggttgggagggacaatggggaagaggagagacctgggatggaagcagatggagctagaaccaggaggcatggactttaggggaagggattcaggtgcccagaggcaccagaggcaggggctttgggtaggaggagggcaaacctggaatagggagtcaaggacagagtgtgtccttggcaagggcaaggggaaacctgaaattcaggtccggggccacag

SEQ ID NO: 118005 - DNA, 1114 bp, Homo sapiens
taaacctgaggcctcacctcattaggagaggcgctgaatcagcgggggaggggcccgcattgtctccacccctgacttgaccccacagtgaagggtgaggagttccttctgttaaggcctagcccaggaaaagatgtctggagttaaggaagttggaggagatgtggtggccgactgggtaccagaatcctgtcactggttgattaactcattctacaaacatttcctgagcccctcccatgtgccagaccggcacagggtactggaccccaagaatgacacacagtctctgtgggaaaggcagacaggtaaacaatgaccacatcttgtgttcggccctgccttgagccggaaattctggcaggagacctaaaggcgctgtcctctccaaagtctagaggctttctggaaggggtggtgccagagctgagtttcaaagggcaaatgagggataggctactgaggaaggggtcagccttgcaggctgaggaggagtatgtgccagggtctggaggtggaggaggaggtgaggtggctcaggagggcaggagaagttggagaagaaggcaggggccagaactaaggacctgctggtcaacttaaagtgcttggattgaggggttggagaggagccatttacagattttaagcctgtaaaagaaaaggtcagatttacattcttccagattctgtgttcctcccttccctgccccaggtttctctggggatgcctgggttgggagtggagatacacaggcagacaggaagaggaaccaggtgcagtttaggctggttaagaatggtccctggctggtcgcggtggctcacacctgtaatcccagcactttgggaggccgaggtgggctgatcacgaggtcaggagttcgaaaccagcctggccaacatggggaaaccccatctctactaaaaatatcaaaattagctgggcacggtggtgcgcacctgtaatcccagctacttgggaggctgaggcaggagaatcatttgaacccgggaggcagaggttgcagtgagccgagattgtgccactgcactctagcctggacagcagagcaagactccatctcggaaaacaaacaaaagaatggtcccc

SEQ ID NO: 118006 - DNA, 1055 bp, Homo sapiens
tcgtttccggtttgtttgctgagctgtcaatgaaagacccgtgtaattattcccgagctttacaataaaagtgtgaaaaccggaccccactcagcttcttccgggtcctcgggcctgcgtcccgtggagagtgggagctaaatctggaggccttggagagggctgggggacgcgagggacaagagactgagacccgcactggtattaatcggggatggggtcgagctgacgcgttctgaggatagactcctagtccgtacacctcaaagtgacccctgccggatcctctgggcccgacctgctgtgggcaccccctccccgcaagaactcaggtgcaggatggggtgggaggtgaccgcaggagaggttttgtgctgcgctgccttcttccccgggcgcccgcaggacgtgcagtcgttcccgggtgtatccattcccgctccccactctttggcaacgagtgtgaattgcggaactggataggataaggggcgggagacatctgtctgtctgccgcgttctcccacgctcaggaacgagggttggaagtcgatttaggggaaaggaaccgaaaaggtctcagcctcggtctccgactgcgctcccctccccccttccgggctcgaccggccccggcctcctccgtccggctcccgggtaaacacccgctccggagaggtcggaaaacagagaccggatcagccggttcctggccccgcctcccggggcgttgctccctcctccgcccctccccacccccacacccgcccagcgtcgcgcgcttttgctcgacccgcgccctagctccctaggccggtactgtgtgggcctcgctccggaccccggggtcggtccagccgctgggattagccgaccgcagggactaatcccggatgagcctcgtgtaaacccggatcgacagcggggacggcgggggttgctggcaccccttcatccgttcccagacgcggagcatcacggggcatagagcccaccccgaggctccttgctgctttcggagagacccgagttggatctgcagttgggggcgtggc

SEQ ID NO: 118007 - DNA, 1055 bp, Homo sapiens
ccgaattgggaaaaggcaggacacacatggcttctggaaagggagcgatgttggattggctgtgtctgccatgcttgttggaaaggacattggcagcatgtgtgcccctttatttgctatccctgatctaaaccatctctgttctccttgtttttctctcctgccctataggtgaaggccaatgactcagaccaaggtgccaatgcagaaatcgaatacacattccaccaggcgcccgaagttgtgaggcgtcttcttcgactggacaggaacactggacttatcactgttcagggcccggtggaccgtgaggacctaagcaccctgcgcttctcagtgcttgctaaggaccgaggcaccaaccccaagagtgcccgtgcccaggtggttgtgaccgtgaaggacatgaatgacaatgcccccaccattgagatccggggcatagggctagtgactcatcaagatgggatggctaacatctcagaggatgtggcagaggagacagctgtggccctggtgcaggtgtctgaccgagatgagggagagaatgcagctgtcacctgtgtggtggcaggtgatgtgcccttccagctgcgccaggccagtgagacaggcagtgacagcaagaagaagtatttcctgcagactaccaccccgctagactacgagaaggtcaaagactacaccattgagattgtggctgtggactctggcaaccccccactctccagcactaactccctcaaggtgcaggtggtggacgtcaatgacaacgcacctgtcttcactcagagtgtcactgaggtcgccttcccggaaaacaacaagcctggtgaagtgattgctgagatcactgccagtgatgctgactctggctctaatgctgagctggtttactctctggagcctgagccggctgctaagggcctcttcaccatctcacccgagactggagagatccaggtgaagacatctctggatcgggaacagcgggagagctatgagttgaaggtggtggcagctgaccggggcagtcctagcctccagggcacagc

SEQ ID NO: 118008 - DNA, 1160 bp, Homo sapiens
gtccttgtaggaatgaccacccccattgctgtcttcaccccatctgtgttgtcctctgttcacatatccatctctgcctttgaactacaagctccattaaatcagagattgaattgtatgagtctgtgtctctggtgcccaacacaggacctagcatatagaagaacttaataaatgaatgtttactgttggaaggaactggtgaaacaatgtagaagacccaggattccctctggcctgagtcccaccatcccctctgggtcatttaccacaaatagagagcctaggccagtcacgtcccggggactgaggatacagcagcgaatgagataggctgggctcctggcctcatggagtgaattgtccagggggtgatggacgggaaacataacaaaactgatgatacgtttcaattaggaaggttgctaggaaggagaagctgggctgctatgagagcatagagcagaggaactatattttgggcagaaatgaatcgggaagaatttcctggacaatgttacaagtaaattgaggcccaaagaaagggcaggctgggttgaagcagaaggtggaaaagagccatctaggcagagggaacagcagatgcaaaggtcctgaggcagataggaactaggttgctcagtggaagtcaaggttattgtggctggaacccagtgatggaaggggtcagtgacctctccaaggctgcagagctaggagcacgggttgtaagagccgtgtaggctatgatgagaatttgaatttttatccctgattataatagctaacatttattaaattgtatgtatatgtgcactgtgttaagtattttgcatggtttctcattttcttttcacagcctccctgggagactggtactattattcccattttacagatgatgaaatgctggctcagggaggtaaatttcttcaaggtcacatagttgacggtggcagagttgatttgaacccaggtatcaggatccaacgcctgcccctttaggccccgcgtggcccagcttaagagctaagtgcggacttggatccgcagtacacgttcctcaaggcctaggttcctctttcgccgcctcccttcccccggattggggaaggcaggtgcaggtttgccctgaccagaggagcgccccagcggcaggc

SEQ ID NO: 118009 - DNA, 1658 bp, Homo sapiens
cggcctactggcttcatttgtgggaccccgggggtcctctcctccgcccatggagcctggttactcccacttcctcaagcctagggcctggagaagcctttcctggttcgcggcctcacggtctgcaaggtcctcttacttccctgaagccgctccagccccacttcccgaaggtcccgcttccgggtggctcgcttcgccacctgcggtcccctgcctcggcttgggaacgccaaggacatcccccacggaagcctgggcccacatccccatgcccttgccgcacgtcaccgccccgctggccccgaatacgcctccgccctgcacttcctctctgcagcgccgtctttccggccgggctcccttctaattggccagctcagagcttcctcgggtactcggccactcggggcatcgcggcggcctttctagccgctgtcccaagggttggtctcgcgctttcggctgcgagctctctgtggtgctggcagcgacatgtggcgcctcccgggactcctgggccgaggtaagggacgtccaagcaaccagcgtcactctgggccgcaaagaccgaactggagtgggggcgggcccgaggaaacagccgaagcgatcgtgggccgggttagagccaaggaaggcggggcttgaaagagggcggggaagtcaggggctgctggaatttgagatgtggatgggcctagctagaagagggtggagtccaagaagttggtaggactgttgggagggggaggagtccaatggcaggagatggtggactgaatgaatgaaagaggattaggggccaatggagtaggcatagccagtgaagagaggagaggtttagagtcaaagagccccaaacattagtgagagtatatgtatgaacgtttggtcatcttagaacagtggttggcatccacaggagaccagcagaatcacatgggcgcttttaaaaaacgtggatgctctaccctgagaaatcttagtttattggttctggggtactaccctagaatctgtagtagataaaagattcccatgtgtatccatgtttaagaacctctgctgaggcagatgacagtgattcctgggttcttgttgaggtgcctgagttttggttgttctgtacagctcttccccgtacactgggacctagcctctggagggtgactcctaagtccaccagcccagatgggcctcagactacctcctccactttgctggttcctgtgcctaacctcgacaggtaagatactgccattttaccactcatttcctcccctagtcaccctttttttttatttttttttttttgttgttttttgagatggagtctcattctgtcgcccaggctggagtgcagtggggcaatctcagctcactgcaacctccgcctcccaggttcaagcagttctctgcctcagcctcccgagtagctgggattacaggcacccgtcaccacaccctgctaatttttattttattttattttttttgagacagagtctcgctctgtcgcccaggctggagtgcagtggcgcgatcttggctcactgaaacctccgcctcctgggttcaagcgattctgctgcctcagcctcccaagtagctgggatttcaggcatgcaccatcacgcctggctaattttttttgt

SEQ ID NO: 118010 - DNA, 1195 bp, Homo sapiens
tcatgagggcagaaattatgtctgtcttacttgctattgtatgcagtgcctggagcaacaagtaagtatctgggtcaacctgtgtgttttttttaggctggagcgcagtggtgcgatcctggctcactgcaacctctgcctcccaggttcaagcaattttcatgcctcaacctccgagtagttgggattacaggtgtgccccaccacgcctggctaattcttgtatttttagtggaacagagtttctccatgttggctggtcttcaactcctggcctcaagtgatccacctgcctcagcctcccaagtgctgggattacaggcatgagccactgcacccgaccctgggtcaaccttcttaagcataacataaggagagacaggagacagggaaaaccaaggagtctctgggataagagctagctcaggtcttctgcagacctgtcagagaagaaacacctttacaaagcttacacctggagatgtgtgtgtgctggggtggcttcactgggggaatgggagttggtggaaggaggggttgtgcaagactggaaagagagcctaatggggaactctgacctgttgctatatttgcaactaggtgccaacctaccccattatctttttgcctgcttagtcttcgcttatttagtcacttgatcaagcatttattcaggttgtacttattaggtccctactatatattagcactgtgctgtacttgggcaccagagatacattggtgagtaaaacacacatggtccctgcccatgtcgtgcttatagactaacaggagagacagaccttagataaataaatgtagagatgattgtttaaatgccagtgtggtcagggctccagagaagttagggtgttgtgaaagtttgtagtcggggagctgccccacctggatttcctgaggaagtgatgtttgagaataaggccgggtctgatggagttgattggtgaaggaccgtgtccttaacgtgctgtctttcccagggcactctggccgtgctggccctgcagctggcaaggcagatccacttccaggcatccctgccagcaggacctcagcgggtagaacactgctcctggcacagtcccctggaccgtttcttctcatctcccttgtggcacccatgctcctgtgagttctcagtcctggggacaggagggctgggctgggcgtttct

SEQ ID NO: 118011 - DNA, 1085 bp, Homo sapiens
tatccacccagggcatgggccacacctgcccctcagtgtctttccatttcctcccatcacctccaaccaagggaggcccacagggtccagactactttagattctgggtgtggcttcctggcccacattcaaccagttaaattattctctggtcagtcactcagtcattcataaataaatgaatctttattgagcacctattatgtgccatggtgcagaagcaacatagcctagtggttgaggctctggagtcagattatagaggttcaagtcccaaaattgctgcatactagtcttatgtccctgaacaagtcacttttaacttccttctgcctcggtttctttatctataaattggggtaataataaaacccaccccataggtttcttgggaggactaaatgagttaatacatgtcaaggacttagggcagtgcctgacacatagtaagtgtgtagtaattattagtttaagcattagttcttgtccttattatgatgataatcattagcaatattgctatcaaagaaagtgctaggtactggggctacaacagtgagtaaggtagatgcctccctgccactgaagaatttaggcagaggagtgattgatgcttagggtgggagatcagcacaaatacaggcccctctagactcctctggagggaagccaaggaaacagaggaggaggagtgtgaaggaagtgtcacaggagtttcaaaattcttcctatggcctctaaaacctcagggaggactcagtcaagcccgagcagcctgcactgatcctcttctgacctgatcactctttttttttcttttgagacacagtcttgctctgtcacccaggctggagtgcagtggtgtgatcttggctcactgcaacctccgcctcctgggttcaagcaattttcctgcctcagcctcctgagtagctgggattacaggcatgtgccactgcaccccgctaattttttgtatttttagtacagatggggtttcaccatgttggccaggctggtcttgaactcctgacctcaggtgatccacccgcctcggcctcccaaggtgctgtgattataggtgt

SEQ ID NO: 118012 - DNA, 1026 bp, Homo sapiens
tttccaagtggcgggaacagtaagcgcgaaaatcctgaggcaggattggattttgattgctagaggaacaaaagaaaggtgagtgtggctggagcttagagatcttgggaagggcggaaggagataaagccagaaaagcaggcaggggtcagatcaggtgaggtcttctgagccacagtaaagagtgtggattttctaagtgagacaggaagtctttggagggctttaagcaggagcaggaaagggggcagccacatgatctgatgtacttttccaaagatctctctggctgccatgtagacagacatggattgtaggattgccggggggaaaaaggagacgaggcaggcgctgttggtgacggctgaacaaaacatgtcagtggcatggtctagatgagagaaagaagagagcaagaagagtagatggatctggttatattaatgagccaggtgggaaagaggaggatggtgggatcctttgcactcttgagtcttctacccaagggcagagggctctgtcaaccctggacagtgagttttcaggcagcaaggaggcaactttatttaattcactgctggctgaatggaacctggtttctccctcatgagctttatgtgattttgatgggcaaagagtctcttctcagaatttacttgcccatcccttcattcatatattcatttattcagcaagcgcttggcatggtggcagaacgcgaaaggagcataagccataatcatgttttgcatttgtatggcgccttcaccctaggcaaaattatttcttctacattctttttctgcttctgcctccaggattttacagtctaattgaggagacaggacttgtacttttgaaacggtttagtttgtagaaaaaggcttggtatattaagtaagtgccaaaaaagtgtttaagcctgagtgtggtccgaaggtttagagcagacacaggatgggagctttgatggtggaggcggaaagaaagatcccaggcaggagagacaattgaagcaaaggcctt

SEQ ID NO: 118013 - DNA, 1025 bp, Homo sapiens
agatgctactaccaagagaaggaggaatggtttatagtagggcagaacccactgctgtccatggcaaaccagtgaaatatttagaagatagaaatatatgcaaaggccaggcacagtggctcacgcctgtaatcccgacactttgggaggccgaggcaggtggatcacctgagatcaagagtttgagacaagcctggccaacatggtgaaaccccatctctactaaaaatacaaaagttagccaggcatggggtcaggcatctgtaaacccagctacttgggaggctgaggcaggagaatcgtttgaactcaggaggtggaggttgtagtgagctgagattgcgccactgcattccagcctgggcaacagagcaagactccatctcaaaaaaaaaaaaaaaaaatatatatatatatatatatatatgtaaagtgtctggcacaaaaaaagaaagggaggaggatcagatgaggagtctgtaggtacctggctgagggtgtggggaagttcactgaggaagctgtgtttgtgccctgtgccttcttacaggaacagagaacatgaagagtggcgaccacacggcagccttttcttacttccagaaagctgcagcccgcggctacagcaaagcgcagtacaatgcgggcttgtgtcatgagcatggcagaggcacccccagggacattagcaaggtattcccctgcccccaagcctgccttctgtgctgggctgctgagattgatgtctagaaatgagcagtgggcagggatgggggaaagtttggcttcttttctccacttggttctagcccagctgcgaaggaaaaataagaaagaagctcctaacttccaggaatttagactcaaaattcagggagggcagggattttgcctttcttctttgcaactacatcctcagcctagaatagcatcttgatgaatggattaattaatttttaaaaagtgggataagaacacaaagaggttatatataagaatgtatttcgtagagttgtatgtgaagg

SEQ ID NO: 118014 - DNA, 1042 bp, Homo sapiens
tctgaattttctgactagtctataattattatgtattagttaattaaaataatttttaaaaatttcactgagtgcaaaagatgcttacagagttgccagccgactgggtgtttctccctttgccccaggcggtcctttattatcagttggctgccagccagggccacagcctggctcagtaccgctatgccaggtgcctactacgagacccagcctcttcgtggaaccctgagcggcagagggcagtgtccttgctgaagcaggctgcagactcaggcttgagagaggtgagtgccattggcagggtctgttcaaggtctctgaggcctgtggagcctgaaagtgaccaagatgccttcttttccttcctccttgaccacaggcccaagctttcctcggggtgcttttcaccaaggagccctacctggatgagcagagagctgtgaaatatctttggcttgcagccaacaatggggtatgcgatctcagtggacaagcatgttggggatgaagcctgataagagaagggattttggaactggtactgagttcttctgtgcttaggagattgttggataggagccttggcctggcttcaagccttagcgctcactgacttactgtgtgaccgttgggcagttgcagtagtacgccagagctggcttgcaccaggctgtgagagctgttggcagcttaaaatctgctatggtgggaatatttgcaccacagaaattgctaaatgccataaaacagggctttttccctcctcgagagccagttgttcaacatttaccagcacactactgggcctggtcacttcttgattcaaacctgtttcctcgtctttaaaatcagaataataatgcttgccttacctgtccagtacttcacagggtggttgtgaggatcaaaatctaactgagataactaacaggtgtgacagtgctgtgaaacctgtacacatgaaaaacacatcattacaagtgatggtaacccagggaaattagaagacgcatcaagtggagacagtaaacagggaaca

SEQ ID NO: 118015 - DNA, 1048 bp, Homo sapiens
aagcatttagaataaaacttaaaagtttgtgtttgtgtactcttgttttgtttaagtatttttctgttaccaaaattaaccttgagtgccactggcaggcttaattcatgaacaagagaggaaaaactggaggggagtggcaaatgaaggaatacaagaagcagaagaggaaaggagaaaaaaacaaaacaaaaaacaaactgaagagattgtttgttatggggcatggtgtcctgtactttcatatgaccttggtgttcctccttagctcctcccatagctgagggcagacagataaaaagtcctcagtcattgctggggacatgcaaatactcctttaaccacatggctcagttagcctgccctaggagagtaacatgcacttgtagattaggattggctatatgttaggatatgtttgacttaagcagtgatcatggaaattcagaattttaatttggagagggtcctaacaccatcttttgtatttcttttctgcagatggcaggattttcataatatatgtagtatgagttccacatcttggcctcttacccagcttcagcagtctcagctccaccagttagagaataaatgggatttgcatgaactccactctgagctgaaatacagactgcggtgttaatatccttttcttctgattgttattaacaggtactaactgacctcaagtagaacatgtaattgtgtcttagatagggatgcagcttaagcagagccatgaactaacatctcctagaaaaaaagtgttttttgaaaatgaaatcatttttaatttcatagtatgaccttttaaaatgtaaaaaatcctaactttttacttatgtacattttaattaaaaatattttagttgtgagggaggatatttgcaaatgcaattgtagttcaatattttaattgactggtagttttgttttattaaaatgatttttgtaaattctcattgcatatttttttcacatttaaattatctgaaattgctgtatctttcagttgatgctattttaaaaaacattgattcatact

SEQ ID NO: 118016 - DNA, 1056 bp, Homo sapiens
tcaatttgattctacctttttgatcactgaagagggatattatcctgcatatttcatacatcctggtctgctaactagcagtttatcagccatgagtcattggctgttacatagcagtaatcaaagagaaaatgaatgtatgtgaaaacgcttagaaattttcaagtacagtggtggtggttaatactatttggtttccagaatcatttcaactactataaacatatgacacatgctattactctgtgaccttttgcttcagaaaaaacaaaactgctgcttttgatacagacatttacagaagactttgatgcacactttctcaaaatgtttctactataaagggattgagtaaggaaagtaagtgtggtaatttaaatgaaactttgattgtgagagtgttgtgtgctatattatatcctcaaacctgagatcattgtgttggcacaaattttcccaactgattcatgggtagttgggacatgctggtctaagtgggacatgctggtctaagtaggtcatgctgttcaatggaaatgaacatcctttctctagattgtgtcttcaatcatccactgtaaaccaaaccacaacaaaacaaacattgtgtgttccttggtcattagtgttaggaattgtactcagaagtgtatacaagaataagttgtagtattttcattatacatttcatggtgctgtagatttttcaagggcttacaagatttttttttaaggtggtggctacgaagttaaaattaagaaatagaaagtgctttgggggagggtttttattccctcaactaaagcattaagtctttcttgagcgctgctcaacagtagtggacactcaagtgttgaccaactgatcctttctaatctttgtttttggttcaggcaattcaaatgagtgtctccagaatagtggctttgaatacaccatttgctttctgcctccacttgtgctgaactttgaactgccaccagattatccatcctcttccccaccttcattcacacttagtggcaaatggctgtcaccaactcaggttagacttg

SEQ ID NO: 118017 - DNA, 1038 bp, Homo sapiens
cttgaagctaaatataaataatataaagcattctgggagagataatgaatcagcagctgcttttctagaagtcataatgaagatcaatagactaatgtgtattaagacaaaagctcagcctgtgcaacatggcgaaacccaatttctacaaaaaatacaaaaattagccaagtgtggtggtgcgtccctgtaatcccagatacttgggaggctgaggtgggaggatcacttgagcctgggtggcagagattgcagtgagccaagactgagccactgcactccagcctgggtgacagacagagaccctgtctcaaaaaaaaaaaaaaaagaaaaagacaaaagatgtcagagttgctgacctcaaggaatagctcattagtttttctctttggatcatacagttttcatttccccatccaccaatctaatcttttaagtgagagtactttcacaaactagagcttatggtttaaaagcaaaattaaaccttaaaaaggataacacaggtagaataaaaaggagtattactttacattctaatgtctgtgccagaggcaacagatgcaagacagttgatttgtccaggaatatcaagactgtttggcatttaggccactgatagttggcttaattatttagatcttcatagtcctatttcaccagagagcttttcatactttacatccacgcatgtgcgtgcatgcacgtgcatgcacacacacgcacaaaacagggacagattaactggatgcgtggttgtggtttcagattccagccaaccagcatctacttaatgctggatttgggggcggaggtgtgtgctggggaagagagttgttttatgtgttacagctaaaattacagtagaattcttaatcaaataaatgtttatgcatataattaacattttaattggtctcttatattccttcttggttcagttcttgtttgttgctgtaccctgattccttggcattatgactctcacctgttaatggtgaaattgacacatagagctgtcattccctgaattggggc

SEQ ID NO: 118018 - DNA, 2062 bp, Homo sapiens
ggggtagaaaagaggttggagaatggcttcttcataggacttggtagctcacacagcactcatagcttcccttttagtatttatcacattttacagatgttagcagatttctcaaaagcatggttgatttataaggatatttatgcaaatgtgaaaaatcattagttgttcaatcttaactcatcaataagtatttaaggtagtacctatgcagggtttagtcagtggcactacacagagtgtaagaaacagaaaatctggtcccttttcatttgtcatttaaatttacaaaatttgtttgccatctggaaggcatatttttggatgtttacctaaaaaagaaaagctgcttataattcctgtgctctagttaaaaatattttatatttctaatggaaaattctccaacatttgcctttcaaattgaacagaccacttttaaagaggaaaattccaaataatttaattttggttgcttagcttaggaagtgtaagctttctctatggctgccaaaccttgctgagggcttgtgattaggaccagggtcaatatcaggcagcttccctccattaaccaggatctgatataagcccagattgcttacttaaaagcagcttgtaaatctgaacaaggactctgaggttgaattctgttagtgattgtttcagatgagttgactttttgataaaactgaaagaattaattttaaaacttggatagtatttttaaactattctttttctaaccattattctaggatacgaacagggctaggactcctaatggaagaaaaatagtttatttttagaactagatctctttgtcctacatgaggtatatggcagtactaaaagattaaagaacagaaaaaagtcttccatttcagtggctaaaatgtacagctatttctctaccttacggagtcttgctatttctcttcttctcgtggtacttcttgcttctgactttatgttctactctggctcatgttgccgaatagtttaagaagtgctccagtaagaatgtttgtactgttttgtatgtagcacagtgtatcacagcagtaaaaaatagtgttagaataagggcctaacttgcaagtggaaaagatttctagggaaaccaggagttggcagcagcatcatctttccaaactcaccaacatcttcatgtgttttctcctagctatctgctctatgcaagcacttagacaacctatgggaagaacaccgtggcagcgtggtcctgtttgcctggatgcaatttcttaaggaagagaccctagcatacttgaatattgtctctccttttgagctcaagattggttctcagaaaaaagtgcagagaaggacagctcaagcttctcccaacacagagctagattttggaggagctgctggatctgatgtagaccaagaggaaattgtggatgagagagcagtgcaggatgtggaatcactgtcaaatctgatccaggaaatcttggactttgatcaagctcagcagataaaatgctttaatagtaaattgttcctgtgcagtatctgtttctgtgagaagctgggtagtgaatgcatgtacttcttggagtgcaggcatgtgtactgcaaagcctgtctgaaggactactttgaaatccagatcagagatggccaggttcaatgcctcaactgcccagaaccaaagtgcccttcggtggccactcctggtcaggtaactgtttaccctgctgatggttgcctcctaattctcttccataaatggagatatcatctcaggaacttccttgatagggctcatggggcagtccgaggccttggagccagcccacaagttgttttgctgtatccattaaaaatgctatggtcttagtctactgcttaagcaaatggaatgcttcctttggccttgcagtgggcaaggatgagtgttaaagtagttattaagtaattgtgataatttactttgtatatctgctagtaggatcccataaaccttggggaatcactagcttattcttgtgtgaggttggcatctgaaggggacgtctcttagaatgat

SEQ ID NO: 118019 - DNA, 1046 bp, Homo sapiens
tcaaacctatggtgttttgtatttccctccaggtcaaagagttagtggaagcagagttatttgcccgttatgaccgccttctcctccagtcctccttggacctgatggcagatgtggtgtactgcccccggccgtgctgccagctgcctgtgatgcaggaacctggctgcaccatgggtatctgctccagctgcaattttgccttctgtactttgtgcaggttgacctaccatggggtctccccatgtaaggtgactgcaggtatgttttaactgtgaacccaaacccccatccccagtctctccctcacatttcactctactaccagggccttatgacttcattcttcaatttggaagtattcatttagcagatatttctgtgtcagtgactatctcaggccttggggctgtagtagtgaccagaagagacaaaatgtctgccctcatggaactcacattctaccaggggagacaggaaaacaaaataaggatattaggtggtggtaagtgctgaagaggcagaagaaataaagcaaggacaggatatgaaatgttctgaaggggaggggacttgggattttagttagggaaaacaggggaggcctcaccggcaaaatggtttaagtaaggacttgaaggaggtaagaaaaaccgtgcagataccagggaggaacattccaggagaaggaatggcacaggaaattctatatacaaacatggaataatgtagatcctggatggccaatgcagggcatctaagctgccattcttgtctccatggcacatgtgtttgactagtcatcaaatgctttctccttgagcccagagaggcctcagaatcttcctcaacatggcacttcggaaagctaccctctgatgaagtagacacaggagtgaaatgtgtttgccgtttccagtctacgtaaggaatcataaatcaggcccttaacgtcgatttaattggactttggtggcttagtcttcttcagactaacagggataatgataacagctacctcacaaaattgcagctagagcagataa

SEQ ID NO: 118020 - DNA, 1096 bp, Homo sapiens
tgtataatataagcctttactttagacttctgtaaccttttcattaaaagtcaacagtacatttcaagtgtttcacagcattcagggaagaaattgaagatagattcagggctttagcaaaattaggaatctctccctctctttgtatgtatatattatataaaatatgaaatacaattttattattttgggaagactaaagcaatataacctttgtccttaagatgcctaggaacacaaaaatgcattgaattattagagggatgagatttacattgcttcactgctacattgaagtagaggtgatgaagctgtgggaatgtactacacagagaaagaattcacaggtgaaagcaaagagtggagataggatataggattctataccagaagatgtcttttgctttaaaagggagatagacttccaaataatgtgaggaaagtaaactgataaaataactagaacattgttgagaaaactctttaattaattgtattgaaaaattaaggtaatacaactgtgaacaaaagccttttgtctgcaagtaaaacctttgggattggttacctgttccatttcagttaaatgatagagcagtagaagccagattgaagagtatcgagggaaaacttttcagcacctgtagcaaagcatagtacggggtgagacttgggtgctaagttttattcactgattttttttttttacacagaattgaagaggtagtctttgcccttaagccaaaagtgcctttgtatttggtaggcctcttcattatcaaacagtgaatggtgctgacttagtggaaaaatcaatgtctgtttcaacctttgtgtcttctagataagtcagtctttaactgcatacttctagatgcataaacataccaacattaagaaatcaaaatcaaaggaaaaaaatagcctatcttattctaccacttttagcagatacatcttttctagttgggggattcctttccatttattatcatttgtgcaagtataatttttactgggttataacataaatatactttttttctggattctgtgatgagtgttttaattgggttgtagcgaacctaattatgtt

SEQ ID NO: 118021 - DNA, 1064 bp, Homo sapiens
aagatacactcaggaattaatttgagtcaaaataattagacagatatattgcttcttgacaaaaatcttaatatgttttaaaatcaaaatacatcttagcatttgattctattgttctaatctgttatgtctgaactgaacatagtgggctccagttaaggaaactaggactatatgtaatcacttttttttttttttttttgatactgagtctctcttgcccaggctggagtgcggtagtgcaatctcagctaactgcaatccccgcctcccaggttcaaggaattttcatgcctcagcctcccgagtagctgggattacaggcgccagccaccacacctggctaatttttgtatttttagtagagacagggtttcaccatgttggccaggctggtctcgaactcctgacctcaaatgactcgcccaccttggcttcccaaagtgctgggattacaggcatgagccaccacacctggccatataatcacttttgacataccttagccctatgacagagtggaggacttggtaccaaatatttacttagatttctgtaaaaattaaaaacccacacgttacatccaaacattttaatattaatctaactacattttccagttatacttgtgtgatttttatctactgcttgtcagaagagattgtgccaagtaactaattgtagtaacactagctattttctgtattttacttctaatgcaaaatagaaagaattacatagtcatcagtgtgttacattgatatctcaaccctgcataagaaaagggagaggaccaagacaatgttgtactgaatcattttggcatgtgctgtctcttctgcttttacagccttgatatttttctctttctatccttcccaccagaaattagacggatgtaacaagatgacatgtactggctgtatgcaatatttctgttggatttgcatgggttctctctctagagcaaacccttacaaacatttcaatgaccctggttcaccatgttttaaccggtatgtatacacagaattcctcaggctcaccagcaatttttggtactt

SEQ ID NO: 118022 - DNA, 2371 bp, Homo sapiens
ggtcaaacttattttgtcccatatcattgctggagtggtgtggctaacctgcctcgcctccatctaggccctcagtgggacccctatggccaagggacttaaggccaaaagacagccaattaaatcttctaggccagtgggaatggagctggacaagtactcatccaccttaaatgggccattcttaactaactttagggtagattgttcagagggacccatatttcagccctcctcagtgcaatgattaaaggagaagaaaagatgtacaaagatgttataagagtacaaaaaatatttttcagcggagaggcaatttatattgtttcgttcaagtgtataaaaatgtaccttttttaatgcttccaggctgttttatgctgtggatgttgacgacgatatttgggaagatgaggtagaagactagttaactactgctcaagatatggaagtggattgtttttccctaatcttccgtcaagtacacaaagtaactttgcgggatatttagggtactattcattcactcttcctgcgtagaagatatggaagaacgaggtttatattttcatgtggtactactgaagaaggtgcattgatacatttttaaatgtaagttgagaaaaatttataagccaaaggttcagaaaattaaactacagaatattaaatattataatgtgcccaaagctctgaatagttaaaaattaaatatttattttcttccccaagctttaggtaaggagaagaggggtcaagagttaaacttagagaccctttgtctctgagaagcatccttctaagacattctgttggagttccctcagtactattccttacaactggagtgggtagaagccttatgaaaattatactgagaacctgatctcgtttactccatgttaatcacattcctaccaacctaaatttctgccaagtcagttctctttggaggaagcccattactccgtaactgactggatggtccagtgtcattttgatctgcttttcagaatggaaatttataatataaatatatgttttaataccacaaacactgtggggcacttgatatttattagtggtgtatatggtccactggtttcaggccaaatctagaatttagtgatactggctcagaagaatttaagttctattcagccttcctgggtgttagaacctagattcaaaatggcttgtctttgctacttttgttccacattctctctctttacctttgccctaccttctgtttgtaaggatgattttaatattaattccaggaacacatgtttttatttcctctgctggaataggagaaagcttaatatattcccaagctgaatgttcttgaattatatctgcatttaccactgtatatgcatatagtgacagtataacctgtctatactacagtagttccagtcctaactttctgaattatttttaaagatcttctctaacaagctatgggaatttggcttcatactctttctttgcaacagcagtgttctgggtgataattttgaattgatacctgttcctttttctgggttttgttggctttttgaaaaattgtctttccttatcattggtgggaggcttggtagcaaagtaacattttttggaaaagaggacagaaaaattgaactacagcttgagaacgtattctttttttcctactttgttattgcaaattgaggaatcacttttaactgttttaggtgtgtgtgtccagagtgagcaaggattatgtttttggattgtcaaagaggatgcttagtcttaaaataaaaataaatttaaaaatcatcttataattagaacagagttgctgctatttgttctgtcaccaaggcaactaatcacattttaaaactgttcggcatataacatattcttaaagtaagaaaaaaaaggtcacagaatagcatctcttttacctgggcttgtgactgagcttaggttttagggcccatattttgtttaaaccagatagtttcatggtcttccattcaggacattttgtgtaaaaattgaggttaatttgctgggcacagtggctcacgcctgtaatcccagcactttgggaggcctaggcgggcggatcacgaggtcaggagttcgagaccatcatggctaacacggtgaaaccccgtctctactaaaaatacaaaaaattagctgggcatggtggcaggcgcctgtagtcccagctactcaggaggctgaggcaggagaatggcatgaacctgggaggtggagcttgcagtgagccgagatagcgccactgcactccagcctgagcgacagagcgagactccttctcaaaaaaaaaaaaaaaaaaaattgaggttaaagaataaattaa

SEQ ID NO: 118023 - DNA, 1721 bp, Homo sapiens
ggatcataggtgtgagccacgatgcccagcccttcttttactttaaaaggatgcacactgctttaggcaaacatgtgaaaatcctcttttactcaagtaggtcaattaggaatttgtcctttgctgaaaagactaacctttaaatagccaactcccatagtgattgaatttataaaagttccatgaatgtagtactcactgtgaataactctttttatactcttagggtgtttatcatttggggatcatagagaaaagagagaagtgtcagctctaagacaaaatttgagagctcctggatgttatgattgataatcaaggaactcttgccactgcctgaattaactactttttgtttttaattttttgtaggtttaatgcttgttcataacaagttggtggaccccttgtacagtatcaaagagaaagaaactgagaaaagccaatcttcgaagaaaccatacagcgattagcctgtgctgggacctagtgtcaagtacccatagggaaaggcaggtctttctggaaattgtctttagaagaaagaattgtatttctttaatctagtatggttactccagataagtgggtgaacttattgttcttggccatgaggctgggagcctagtcacggagtttagctatagggagaatgtttgtaacttaatcagaaaaaaaatatctgcaaaatgtactccatcattttgatgtctgccaaacccaggttgggagttttaaactttttgttctgcttcagccatggttcacacatatgacacactcccgtcaggaatttctctccttacacgcactgattttcaagtgggagggaattaggggcttatgtatattggataccacctctttgaagagtcttgagagtccttcttgcacaggcctgccccttggttgagaaccattgttccaagtgaaggcacaaactctcaatatctaaaataagtgcaaggaagcagtctctttggtcagtaacaagtgcaatggaaagaaaacgatcccttccttcttccactttcacagcttttctctgaactaggagaacctgggggtggatttgggtgggtggggccaaagaggaggcttctattgataaatccagagcctcaaggggcccagccacgtcaaacttctctccctcagggactctccagcaccaaaaggcagaaggtggaagccgtttttcccccagagccctgtgtttttgtgaaagcctcactgtggctcctctgttttacatactcattagtaagtgggaggtccactggggcaacagacactgccacaatttcagtgttgtgttcagccaaggggacggtctgggcaggcagcttaagtgtgagtttagtcacaactcctgagtgtcccgctctcctgcttacctaggaggtgagtgccaggaaaatacaccaaatgcttctagtattgtttccccacttaaaatagtcctgcttaaattcacatggtgtggtctgatgttctgagagcatcaggaaatacaacccttttgcccatttacccttctccccggatcccaaggtggtctgttgctctggcttcctttcattgtcttaggccttcatggagtggatgctgcctcctcctggctgtttttgtgcctgtttgaagctactgctgcctccatttctgggaaagacctttgagagcctagcccaggcctaagggctatgtttggtaccagtgtt

SEQ ID NO: 118024 - DNA, 1439 bp, Homo sapiens
gaaaggtgacacagctttcaatgatttttcttcagaccctagttagggaaggagagattgtccattcttgaaatcttggatccctgggactgacagggctgcacgggctctctccctataggcatcggccctgatggacacattgccttcaacgagccaggctccagtctggtgtccaggacccgtgtgaagacgctggccatggataccatcctggccaatgctaggttcttcgatggagaactcaccaaggtgcccaccatggccttgacggtgggggtgggcactgtcatggatgctagagaggtaagggcataagggccccaccagcttgcgctggtggacttgtctttctcttgttaatcttaactatactggtaccacctacattcttattaaagatgaaggcatggtaaataaggctaaaatccctgctgaccctgttactcactgttcctcttgcgtctttggaagacatcattattcccagtgtgaggtgaatcccttgagcacgtttttggtgcctttggctgactgcctgagacagcaggctctctggcctcaggcccctttcatgcttttcacaggcagagaggaggccagcatcgctaatgttggaatatttgtacctgaccaggtatggagagaggggttcccttgttccttgtagttggtagaggtcactgttgggacaccaaggatgcttgtgcttctagccccgtgctcagagattaataaatgtggtgaagtatgattaaaatataagtgttttaaactgaatttagcttttcccctaaaaaattggctatcatttgaatgtgaattttttgtggttccaatttccttattttcattagaactttagaagcattttctcttcctttctgacgtgtatagacatgttagatttacatttctttgcccaagccaataaacaagcatctaaatcagtgaaaacttccctgtttaaagtgaacttttgtgaaatgagtgatggcacccagatttctgttgggtaatcttcaatcagtacgtggggtgggggtgtttactcgctgtttttagctctgcagcttggaaacaggtttagggccgtctttatcatgagggcatcttgatctgggaaaggacctggggctggaaatcaggaaattatcttttctaaagagttctgggttgctgaggggtccggaagaaatagtcacattccctctctgcttctgcattctaatcttttaagaaaggaacagtaaatcctgttcacaactctgtggcacatgtgaattaaaatgaaaggaaatctacagaactgagtttttttctcttttcctgcccttgaatagagctgagttctttaagatcacttacattctcgatattttaactgttaagtggagactgtgcctttgttttattatatattaacaaaaaccatcacc

SEQ ID NO: 118025 - DNA, 1085 bp, Homo sapiens
agacgcaagaggaacagtgagtaacagggtcagcagggattttagccttatttaccatgccttcatctttaataagaatgtaggtggtaccagtatagttaagattaacaagagaaagacaagtccaccagcgcaagctggtggggcccttatgcccttacctctctagcatccatgacagtgcccacccccaccgtcaaggccatggtgggcaccttggtgagttctccatcgaagaacctagcattggccaggatggtatccatggccagcgtcttcacacgggtcctggacaccagactggagcctggctcgttgaaggcaatgtgtccatcagggccgatgcctatagggagagagcccgtgcagccctgtcagtcccagggatccaagatttcaagaatggacaatctctccttccctaactagggtctgaagaaaaatcattgaaagctgtgtcacctttctcatttgcagccctgggcaggtacaccttaaacatgtgatctgtccccctccctaccatttctttctctttgccatactgtctcagaggagaccctccccatcatgtctatctgaggcacacacagacattgttaacttgctatcaccctcaaaaagctgaggaggaaacactccaaacagcttctgcctccccagattgtcagaaaagtggaccttctctgtctcttctgcctgtagttagagggtcctgctgctgggatagaggtgcagtgaacaaaacacccagagaacctggacaggggctgccaaggttctaaaatctcagaggatgagaggtcctgcccccctcctccccaccttgaagtatagaagagtgatctctagagcaataaaaggcagttcaatgttacccctcatgggtaactccagaggtggcgatagatggatacacagaagggcagcccagaggacccgagcacaaatccaagaagcacacacttgctcccacctgtgaaccttgagtgagtcacctaacttctctggggttcaactggctatctacaggggctgtgtggagccttccggaactacatgagtccatgatgttaaatgtttag

SEQ ID NO: 118026 - DNA, 1022 bp, Homo sapiens
agtctggccttctgaaaccattccctcgttcccatcattgcagagtcagatccaagctcttcagagtggcattcaaggccctccaaaacctggcctctccctgcctgtcctgcttgaaccaacaggacagcgtttccacacgggttccttggaacattgcttctgttagatgtagcacctgtcagggttctgagtggaaaccacagaaaccaactccagctaaattaagcagaaaaggagtttattggctagatactgggaagttcagagaattcatgggaaggctagaagtttggaaaatggcaggagagaggaagctatgtggctcaggcatagctaaggccttgtcacacggaccaactaattattttgggtgggctgcggggagctgccattcactcagcaggtatttattgagtaccctctgtatgcaaagctgttctagcctctaaggatacagcaatgaacaaaaaggatatgaacttctgccttctgaggcttaaattataatgggagagacataataattagcaaaatatagagtatgttagatggtgataagaggaaaggagaaacatgaagcaggaaaggatagggagtgtgtcggcaggggtggggctgtgcagtgttggatatggtggcagggagggtctcatagccaggggccaggttctgtggagccttagaataactggtgttgctgagggtgaaatgagaagctattggtgggttttgaaaagaggggtgacatgacgtaatctcgatgggttttttttctttcatttttttagtttgcaaaatttcaaatattcaaaaaagaggaaaaaaacaggtcaataccattcacctaaattcaccaattgttaccattttgccacatttgcttttacctttctctggctcttgttctttatctacacacacacacactttttttttctgaaccacatgaaaataagttccagacatcctgacacttatctctaaatccttcagcacatatctcctgagaataaggacat

SEQ ID NO: 118027 - DNA, 1028 bp, Homo sapiens
tttacatccattttttttttcttttaattcataccaaacccttatgaaccagggtttgttctcattgtcaaagactcaaagtggctcagtaacttgcctcaaggtcacaggctgctaagtagtgattataaggatatacacacactcacctacttaaaacacaggctcacagtccagatataggtgtatgcattagcagatatatacacatgcatatgtattctcttatgtacccatatatacgtatacagacatatctttgtacatttgtgtgcagttttatgagccccgatcatacttgcacatacttttgcacgtgtccatgtgtatcttgttctcagacatgtgcattcatacatttgcacatgtgtatcatgcacatgtatctacaaaggcatgctagataaataatgaaataggttcataattctattttgtaatgttcttcacacaatgttattaatgtcttctatataaaatatttttaatgtctgcatggcatgtaattgtatggctgaatcataatttaactaattgcttatctttggtcactaagaatgtttacagtttttttcattgaaatttatttcacatacgtcttcaaccgtttccttagcataaattactagccatggaaatgcctggtcagcgaatatgcatttttaaaaggcttttgaattatagaatgatggtgaattgtccaggcaacttgataggagcatgatactctttggttgtcacacagggctgttctgacttctatttgatctggttaatcaaattgagctagttttctcaccaagtaaatgtaatggaaaactgtatgattcattcataaatgcaaacacagttttgtctttatggtctttttattggtagtgtaatatgtggacaacttgaatttagcatagtgacagactatgcagaaagggtaggctcaaccaggtgtggtggctcacacctgtaatcacagcactttgggaggccgaggtgggcggatcacttgaggtcaggagttcgagaccagc

SEQ ID NO: 118028 - DNA, 1068 bp, Homo sapiens
taaaattggtcagaaattatatgacaggaaaaaaaatccagtgtccaacagctatttattatctatcacagtcactcaaaggatatcccccctacccttgcccaacatctctgtgcactgagagcagaagttcccagatctgtcccagttttcagatctgtctctctgagtatcccctacaacccagattctgtgacagttaaattggactcgggcttccactgacccagttgatggaagagactgagcatctttccaactctaacccaaacgtgacaatgccgcgtattctttcagaaagtgtcaggaaagagcccgaagatccctgagctccagggacatggcagggaggctgcacagaagggttcccaggggtggaaaaggggaatcttaaaaataaattttggaaccaagtaatcaattttatagcacactctagttctagcgcacatggttcctccacttgttagtgaatgcctgacttgttgcccctgaagtgtaaaaagatgtatatttaaggattccattgttcagcaagttattatgcatgcagatggcaggcactaagtgcttactctttttgaaggtgattgcctctccccgcgatccccctacattgcagtgttttgttttaaacagctttcttgatggagcctaatcttatcaccagcattatagaaataagccagagtgagaagcctgtacagtgaggtcttgggattataccatagtcataatggtgttttaaattgtttttatttttcaattgaaaaaagtacactattctaaagtagtgaattttagtggagcaaactcttcacctggaagtgtttttttccttaccaaagtgaaaattggtggttctaagaaggctggaatttatttgcactgtcatcttttactatggtgggggatgatcaaatttaacatttccaagtttccaggagacaggcagcctatcttataaatattgtcatagaagacctcttaacctctttgttctttggatttctgtatttcttagaattgtcatgcttcctttctgagacctaaattatgcaggggtaa

SEQ ID NO: 118029 - DNA, 1026 bp, Homo sapiens
aaaattgaagatttgactggcagaaaagttgctgagatagggaaaagggatatctattgacagatatatgtagaattagggagaattttatgttttcataagtgtctcaattatttaagatttaatttggtgtgcatgtggaatataatggtaacatggtttgtctgtgatttgtcttttgtcttaacagattatttttctaactttaaaaaagtatacatcacttgaggccaggagttttaaaccagtctgggcaacacaggaagaccccatctctacaaaacataaattttaaaaaaagttagccagggtcacagtgtgccataattgtgccactgcactcctgcctggacaacaagagtgagatcctgtctctccaaaaaaaaaaaagtatgcaagtgataaatattcactacaaaatatttgaacatgcagatacacaacaaaaaggaaaaattcccctgtactcctattacctagaaataacagtgttgaactgtaaatgtctcattctaggcctcctttccattatatgtctgcctttttaaaaaggattatatgatgcctattgtttggcaagtttagcttttttcatgtaataatagtacactgtaaatatctatttgagtaatgaaatttaatttttttttttttaaagacatggtctctctcatgccccaggctggagggcagtggcacaatcttagctcgctgcagccacgacctcctgggttcaagccatcctgctgcctcagcctcctgagtagctagaaccacaggtgcatgccaccactcccgggtaatttttgtattttttgtagagacagggtttgttttgccatgttgcccaggctagtcttgaactcctaaactctcctaatctcaagcgatcccacccacctaggcctcccagagtgctaggattacaggtgtgagccaccatgcctggctgaaatttaatgtatattttttttgacacagagtttcactctgttgcccaggctggagtgcagtggcaccatctca

SEQ ID NO: 118030 - DNA, 1443 bp, Homo sapiens
tagctttcgagaaaggctatttatttcagtttttgggttcttatctttctaattggctttatgcttacattaaaatatgaaatttttatttagttgcagaatgaagaagagtctggagaacctgaacaggctgcaggtgatgctcctccaccttacagcagcatttctgcagagagcgcaggtaggtaacagggcaaggtgatcacggaatccttaaaaacactctgtgctttgacattacagtttaaaaaaaaaaaagcttcagaagcagttggaagaaaggttacaaagcaagtctggattttaaataattgagaagtggatacatttaaaaatcacccccagtctcttacattcatctaagaatgtcttttggttcaattgttatgtatgtactcttaagggaatggctgggttttgtctgctagagttagtggaactccttttatttcaattcagctaatcatcaaaaaattgtgactgttaaaattctgcagcatattttgactacaaggatgagtctgggtttccaaagcccccatcttacaatgtagctacaacactgcccagttatgatgaagcggagaggaccaaggctgaagctactatccctttggttcctgggagagtgagtataatttgccatgttacttgatggctgctctgtgggaattaagttattttcattatccaattttgattcgttacttatgattgtattgattagtgaaagtagagctaattttaaaaatcaggtacatttgcttttgggataataaactcatctcttcttaaaaatgatgaggtaaattactagtcagacctgctcatttttccttcatctctcctattaccactactttttcaagtctcctgggatggctgaagtatcttgaagcagaagcacactaatgtttccttgattctgcacacttaatattttgctgttgggtggatagctgctagggaggtctaggaagagaataaatatatgcaaatttgtagaattaaactcataagagggatcttcacattgatttagatgaactccgttcttccagcagtccagatcatgtcatttgtggggacatagtgagttcagattccatctagcctgatgttgattcatggaggtggagattgggatgccatataaaccagtggagattattgggcactcttggttcttgatgtcagatatgtgagtgctgcatttgtcattttgtaaatattcatccagattgaggctgatgaaggtagggcattgtgggagaatggaagcaggataagtccccagaaatgcggggaccatcaggcctctaggctctattctagcaagtaactggagtgagtgatgagcaagtacagaagcctagtctgggcagtgtgatggcataggcccagatgttcccctcttggctttaagatagtagacagtttgca

SEQ ID NO: 118031 - DNA, 1054 bp, Homo sapiens
atactttcatttgatacaagtacatatttaggaacttcttaaagggctctagtattcagcagacatgtataaagcactttttaaatataagatgcagtatattttacagtggataggtaaaaagctttgtataaggcagtgttcctcattgttattcaaaagcctaaaatccaactagggtaaagggcccacaaatactgataactaagacacataagagcagtgggcatcaagaactgaaactttttactgggtgatcataggggaaaatgagatttgatgtgggcccggagttttgatgggtaagaacattccagagggaaaaaggcacagaaagcaggtgtgaattcagccaggtgaaggcagttctgtggatgtagtaattggctttgtatgagcaagagtttgtgaagggagatagaaagtcctgactacaactgttgtttatagaatctttggaatgttagatgggcgtatttaaacttcatatgtagcttttagagaatccttcagagtttttgagcaggggtatgagaggacttgtgtggtgttttggaaacattaacttggcagcaatttctaggatgcatcatggtagaagagataccaagaggacaggaagaacagttagaaggtgttcgtaatattattagatgttacttccatatattttttggagtatatctttgaatagttatgcaaaaaacaattagcttttaattttggcaaaaccttattctgctgatacgaagtaagaatactaggtatttaatgttttaaaaaattaattataaaaattcgtttttatagaaatttcaaacaatagaggaagtatgttaagttagaaaaggaagctgccattgccaccgacttccctttctctagttcccactccccaggggaaccactgttaacaatttgggtcttccagacccttttctgtgtacaacaagttttgatattccctaaaatatttttcatttaaggagccctcattgaactgtgtacaaatctatcacttttaagtatatattcaattatttttaaatatctc

SEQ ID NO: 118032 - DNA, 1285 bp, Homo sapiens
aggctggagtgcagtggtgggatcttggctcactgcaagctctgcctcccgggttcatgccattctcctgccttagcctcccgagtagctgggactacaggtgcccgccaccactcccggctaatttttttgtatttttagtagagacgggtttcaccatgttagccaggatggtctcgatctcctgacctcgtgatctgcctgccttggcctcccaaagtgctgggattacaggcatgagccactgcacctggctgattttatctctaattactaatattttaggtcctaaacaggtcctcgattactgatattctagaatttaaaccaaatgtgtaagtaaattttgtcttttgtcttttcttgaggtatatttttttaaaggaagagtaaatagttctttgtgaactattcttgaagtgtattgtttttgaagtgtattaaatttttgaagtgtattgttaaagaacttgggttataagatgaaaatttcatttagaacactggggatagaagaaagatttgcttcttttctaattatatattaataatgcaaaatggaattttaaacacacattgagcctttaatgctcataattttgaactgaaccaaagcaataacttttttccttgctactcaaatttaacccttcatttttctttatgtcttccctttgcctagaaataattctttttcttttcatttaggatgaggattttgtgggtcgggatgattttgatgatgctgaccagctgaggataggaaatgatgggattttcatgttaacttttttcagtaagtatgtatgcatatcagaaccaccccctacaaactagagtgctttggattatgggtgaatctgactgaattaaaataactagttgagctaatatattaatacattatgtttatttggtgccttttactggaatattcaaagcttaatatacctttgttttaatatcccttctctttgccttctattttcatgaatatctgtggaaaatataattaaagcagttatgaggatgctgcatttttacatgagctaagcctcatcttccaggtctacggggcccttttgcgttgcttctactcatacttaatctgtagaataggaattaaatgcctttgatgaattttgctctgaaagcttcttttttctgacagatcaaagtcagcctgattttctcccttcatgttacttgccatttatctttttgtgtgcctcacatagaagtgagcaaccatttcctttatttgttgtattagaaagataagaaa

SEQ ID NO: 118033 - DNA, 1047 bp, Homo sapiens
ccaaaatgtttggggagccaaaactgtttaacaagtattgctccattaggagcctacctctcaagtaaattacagagatgtatgtctttagtgacttcagagttaccagttagttaaatttgcatgaagtaatttacagttgtaaaagatctaggcttttaaagtatcctctgatttcagataaatttattgctatcgtcaaccttataaacaaaaccaatttatccgtcataaattggcatacttaactaactaatgggtgttgcttgaccactgtagtttttctacgtagtgccaccttatttattataaaacatttgttaacgtttttagggttccagaatcctttgggaatctgatgaaagttgtaagcttttcccccacatagctaatatgtactcatctataataatggactttaggttaagaactcgagccctaaagaggttttcattccttccctaaattttaattgttactttattaacaaagaaaatactatattttacttttcgaactacattaaactcttggacaccaaagcctccaaggaaaagagaaataaaattaattccagtcttttttttttttcaaactaaattttcaactgcatttaaaaagtgaatcaaatgggccgggtgcggtggctcacgcctgtaatcccagcactttgggaggccgaggcggacagatcacgaagtcaggagatcgagaccatcctggctaacatggtgaaaccccgtctctactaaaaaaatacaaaaaaaatagccagacatggtagcgggggcctgtagtcccagctactcgggaggctgaggaaggagaatggcgtgaacccaggaggtggagcttacagtgagccgagatcgtgccactgcactccagcctgggcgacagagcgagactccttctcaaaaaaaaaaaaaaagttaaatgaattaacttgtatcaggtaggatgcttttgactgtgagtaacaaaaacctagctcaaaatggcttagaaaaaaatttttaattgtttttttaaacggggaaattttat

SEQ ID NO: 118034 - DNA, 1180 bp, Homo sapiens
aaaattagctggctgtggttgctcatgcctatgatcccagctacttgggaggagaatggcttgaacccgagagacggaggttgcggtgagctgagatcgtgccactgcactccagcctgggtaacagagcaagattccatctcaaaaaaaaaaaaaaaaaaaaaaaatatatatatatatatatatatatatattaataagagtttggatacacttatgagcatttgtgcccaatattcgggtcattttgggaacttcccttttgaagagaaccagtttaatggtgttttgtcttgcagagctctgtgcagagctcccaagctggctgctcttgagctatagttagcctatagtttatttgttccacagttatttttcaagtttttttaaattagttgccaacattttaaaaatcaaaattatttcacataaaacgcctgaatgtttttacttttcttgaaagttggaatatcaagaaaagctagcctacatttcacatggcaccctttggctggagctgagttgttgctgtctcctccatacaggtcatgtgccttccagttcagtaagatcccaccaccataccccaacttagtatttgaaggggtaacccctgctcaatagtcacttgttgctttgggtcccaaacagaatgatgttccccaagctcagagctgacagctcttggttactgctaaaaatcagttcaactgtccaagtaccattttctaccactgagtatcccagtaaaagtatttaaaaaaaaaaatgtgctaaaggctcagagaccatctctgaaagaggaaggccaggaggagtatctgagtttccactggaggggcatatcacctctctgctgacagttttaggaggtacaaacttttgtgaatgtatagattctggtgtagtcacacaaaaagagtcttactaagaatagagaaataggctgggtacagtggttgacacctataatcccaactctttgggaggctgagacaggagaatcacttgagcctaggagttgaaggccagcctgagcaacatagcgagacccctatctctacagaaaattaaaaaattagctgggcatgaacctgttatcttagctacttgggaagcagaggcaggaggatcatctgggcccaggaattcaagcttgcagaggctgtgatcataccgc

SEQ ID NO: 118035 - DNA, 1048 bp, Homo sapiens
gacagaaaaaacagcccatgacaaggaaggttacattttttctttttacttgagaaaaacacagttataacctctttttgttgttgttgttgttgttgttgtttggagttcattatcttggaatgcttttttggaactcaataggtagattttgatgtttctcaatgaggctttcatatgtaaatgtttggctccatcttattttttatttcctttttagaccaattcaattctgaatgtgcaaaagacactattgactcttacattataccttctcattgaaggatggataatttggtatgaaaatcctctgcagattctggaggaaattgctaatgttttgattacctttagcagaaaaataacaatgtatcgctatcaggagagggatttctggggaggggacttaacatggaaattataaattcattcatgacttttcttttttaaattaggctttctcctgtttctcagaggatttatcaattatgcaaaagttcggaagatgccagaaactttctcaaatctccccaggaccagagttctctttatttattaaaggtattaaagaaaaaatttattctagtcccagtgtaaccatgtgctacattgtagatttctgttcagttttagagtaagtatctgtgataggggcatatagagaaagtaaagaaggcacagtccctgccttttagcagtttcttgtctagtaacagggatttttacaaaaagctattgataaagtcaaattagaaaaactgccataggagaaatcattacttcatgctttgacagtgtgaaagaggcaggggtcttagcagtcatcagaaagctgggatatttggctgcttgactgaattccagcatcctgaagccactgcttactgttgcaccagttccagaggatgacattcagaaggaacccttcaggcctaatcactcatctctgcccctaaatcccagaacctggagagactgtgtagtactttaagaactccttttgtctgggctgctgacaagcccaccaagtcttccatcttttaaaatt

SEQ ID NO: 118036 - DNA, 2487 bp, Homo sapiens
cttccattgtattcttttgttaagaggtttggaaagagagactcctgacttcaggagtttttagaaaaagcattccagttttttctagttctagaggccttgataactttaagaactgaaattttaatgtttattgaataccgtgatgtcagtatacagtaatcttaaaactatgttaaaatgcacttgtgtctccaaacatcctgccttcttttgtgactacatccttctcttagccaaaataacaagctaactagagtttcaatattcaatatccttctctggcagatgttttctggcaaaggccttcctgcatttatgaattctctctcaagaagcaagagaacacctgcaggaagtgaatcaagatgcagaacacagaggaataatcacctgctttaaaaaaataaagtactgttgaaaagatcatttctctctatttgttcctaggtgtaaaattttaatagttaatgcagaattctgtaatcattgaatcattagtggttaatgtttgaaaaagctcttgcaatcaagtctgtgatgtattaataatgccttatatattgtttgtagtcattttaagtagcatgagccatgtccctgtagtcggtagggggcagtcttgctttattcatcctccatctcaaaatgaacttggaattaaatattgtaagatatgtataatgctggccattttaaaggggttttctcaaaagttaaacttttgctatgactgtgtttttgcacataatccatatttgctgttcaagttaatctagaaatttattcaattctgtatgaacacctggaagcaaaatcatagtgcaaaaatacatttaaggtgtggtcaaaaataagtctttaattggtaaataataagcattaattttttatagcctgtattcacaattctgcggtaccttattgtacctaagggattctaaaggtgttgtcactgtataaaacagaaagcactaggatacaaatgaagcttaattactaaaatgtaattcttgacactctttctataattagcgttcttcacccccacccccacccccaccccccttattttccttttgtctcctggtgattaggccaaagtctgggagtaaggagaggattaggtacttaggagcaaagaaagaagtagcttggaacttttgagatgatccctaacatactgtactacttgcttttacaatgtgttagcagaaaccagtgggttataatgtagaatgatgtgctttctgcccaagtggtaattcatcttggtttgctatgttaaaactgtaaatacaacagaacattaataaatatctcttgtgtagcaccttttactgtagattagtgcttaatttcttggcttgcatttgttgattgctaaggcaattttttctaatcttagggaatcattcagtagatgcgattaaaaaactaatgttgggtcaatttttttcttcattttcagcacaagaagtcctcttatatcctactaaatacattcctaaaaatgtatttgaacattggttctgtaaaagataatggactaaaaaagtagagaggagttgtagagatcttaaatcattctggaattcctaattatgcttcaatttttagacataattttagataatttatttccagtgttttctgcatgttctcatttgttctttttctcagttgaatgcaccaactggtttgagtcctgtgagcattcagtcagttgaaattaaagattcctcatttctcctgatttctattcttgtctcaatcttaaatttagagaccagttgtttttatgatatcagccatttgatttttttcattttctatttaagaaatatgaagaaaaaatacaccaagatggtcaaattactacacaaatcagcaccagcacagtctgatagctgcaaatgtccattcatctgctgtgtatgtatatccagaatcagcataggaagtcgttcaggatatcagtatataatgcacagaagtgtgggttgtttgaaagccaaacaggaaaattaggagcctcctggattgacatttcaatgatccctctaaccagtttatggattattatgaataatagtgtagtgtgttctttttcagaagttatatttgataatagagaagggagttttatggaagtttctttgaagatttttttttttccatttcgaatcagattatagcaacaatggagtttggaagtttgtatggcctataatgttctaagttccagaatgaaaagatctgtaacaatctgaatagatgtggacacatatagcagagagaactatgtaaattatcttgcagaacaaaatagaagggtcctaaatcacgttaactcaaacattgtagactagctttgtgtttattcttcaggtccttgcgccttatttggttttgtatattcaacgaactgaaatatttggaattcctatttctacgtatttggtggtccataagactttgtcaaat

SEQ ID NO: 118037 - DNA, 1070 bp, Homo sapiens
tgctggaattacaggcgtgagccacctcacctggccagtaggagggtatattttatgaaaaagtagttgtgacccctattacctatgtgaatctggttcttggttaaacctcagtggtgaatataggttaatcatgtgcaaaatgtataataattttcaggttctgtgggtggttcagctgttcagaagattttcacctctcaggcttttagaatatgagttgaggaatgatgagggtcataacagaaggcaaaatatgcttccatagatggtttatatatttaaaaaaaatgtttttttgcgtattttaaaccctaaatagtgtttctatcctgtaagatggataaggtggattgggtgagagcatttgttaaagcagtagtacagtactcttgcatctccttttcccttttgcgtatacctgtacacgtttgtgtatgtgtataattgtgttcttttagactacctacagaaagtgccctttgacaagtagcctctgcatgttggttctttgtaggctctactgttaatgtggaagacatctcaaagaaatacactgggaattcccaaaggggagagtaagtttaggttgaaagtgaaagaggtgttcaggaggaaatgatggttgtagaaattgatttttgtatcatctccattctaaaaagaagctattttataacccagttgattgtatcacctacaactttatggcctatagaaagaactgctcttacgtaaagtacatgaattgagagctgtcctcccgaagccagtttccctgactataaaatctgaaatagtccatctactgcgtggcattttaatcccctcagtcctccattattctcagaattttccgcttataggataaatacattactcaaaggttttgtgttaatttttatacctgtttttacttatagcctgtttctttttttctttaccaaaaagcatcgtcttctgattttgagagttttaattcttaagtatcagttgatgaattaataaaatgtaaatgtaaatgcacatctcttaaacctgaatacagaacatattaatatagaggattc

SEQ ID NO: 118038 - DNA, 1315 bp, Homo sapiens
tctctggtcctcatacagagtccctccaacgtgaatcacaggttgtttattcaaattaaggaatatattttcttcctgagggcatggtaggaagaaatatgctatttgcaaaacaagagttacaagcaagacttcaggaagagagagattaaaaaacagggacacggcttctggaagtgtttgtgggtgttctttttctagaggctctcagggatgcactagctcagggcagctggttggggagtgggggacagggctgcatcctttgaggatcccttccagaaaatgtcagccttgggtaaagatggaagccaagtccagatggtttgaatgtagctgctcctctgagaatatgtttctggctatattcctgagccaaatgaaagtggtttttggattatccagtgttttattttaattcaagcctcatcttccattagtccaagccaacccatcgttaccagcatttgttctgtaattgtgagtcatcaatctatttctctatggccaatgggagtagtggtggtgtttggtgtcaaatagttggagttctaatccgaactaccattattagccatgtcattctggcaaattacttaatctccttgtgcctcagtttttccatgtgtagaatgagaacaatcatagtatctacttcattaggttcttgtgagattaaaatgagaaatgtattcatttattcctaagtattcacttaacacctgcttttaagtgctggcaatagagaactagacaggcagtgctcctgctcttgaaatgtgaacattctccagtgtgctcagcaaataataggtactattattgttgttgtgctgttgctattggtgttcttaccacccaactcatggggagggagagagatctaatcctaacctgtggctcagtttttctgaatatgcatggtctgaaagattcggcctggcacagtggctcttgcttgtaatcccagcactttgggaggccgaggtggaggcatcacttgagtttaggagttcaagaccagcctgggtaacatggagagatcccatctctacaaaaatataaaacaattagccaggcatcgtggtgtgtgcctgtgttcccagctacttgggaggctgaggtgggaggatcacttgcgcccagggagtcaaggcttcagtgagctatgaccaaaccaccatactccaggctgggtgacagggcaagatcctgtcaaaaaataaaaaaataaataaaataaaatccatcctttactgtgtaataaccattctcaggccaggtgtggtggctcacccctgtaatcccagcactt

SEQ ID NO: 118039 - DNA, 1054 bp, Homo sapiens
cgagcaccctgggaactgggtcttgggtagcaaagccctcccagagaaaagattgggcacaactaaggctttcctgagcaggaagggggtgaagaccaatcccttcctttggtcctttggtacgcaccccctcagagctgagatggaagacatggctagttcttttcagccttgtggagcctgtcagtcgccatcatacctcgagtgaggcccagctagataatgacttgtccaagatggcacacgtggaaagttgatctgcaccagaacccggatgactgtcaccttgaagcatcctgttctccttctgtgctgtcccaggaagtgtctggcgggcgtgggcagcacagctctacactgtacgattcactagggcatcctgcgagcctcactagccttctggttcatgcctttgacaagcatttttgtgccccctctgcttactgtgacagtcgatgatgaatcttgcgttgccattttctgctgtgggtaactgcgtgcagtgtcttgccttgctttctcttcttactgtcccacagcttggtttcatgttacaaacagaaaagctcgaggctcccaccccgccacatcccaacttcatttccccctcactgtagcccatttccaccccaccacaaagttgccacaggttttctttgtatagaatatttattttgaagctctattttaatagtatttattttagaaagtctactattgtaagagttcttctgtttgtgaagaaaaaaacaagttaaaaactgaatgtactgatttagaaaatatatataaatatatattgttaaatatacacgggactgccgtttctggtgtgtttgtgtgtttacttccctgacctcttcagccagcaaggcctcaagtttgagaataagcagccactgaaaggggaagagaagatagggcttcctgggctgggcaatcccttctcccagctctaggacgaccgtagaaccatcggaggaaagctgctcttcattatgaagcggaatactgcaaggagctgctagagcctccttcctgggaaagctgtccc

SEQ ID NO: 118040 - DNA, 1027 bp, Homo sapiens
tgtttttatagaataattaaaccggatgctaacggtgttttaaaaaataataataaaacaacttgtttccttttggccacccccaggaagggctgatttcaaaatctgggggcgagcaacctcaaggaacacaatttccctccctatcaacaagaggattttaacagcaaagaagagaggcagcacctcccattggcagaatgaccgctgagccaggctgggtttgggtttcttctcttctgattctgctgctcactgtcatagccttttgtgtatagtgatgtgtctgtatctttaatgtaaatagagagatgatgaaaaaagagtctattttagtgttaggaagccccagcaggggagtcggaagagcttggaagagctggggagagggtaggggaaaggtttttccaggggccactgggtttgagccctgcttctgtgcacagccacaccaccctctcccgacagccctcaaagacgtagcaactctttctctcaaggtgctaaaggactcagaaggtgcagcacgtccagtgggtaggtacttgttgcatgcaaaagctgtagtgtatctggtccttcctccccagcttttgtgtggggttcttgctttgtgtggtattttgttttcccctctaatgagagggcatggcctgagtcagaagagctaccccaggtgaaactggaagtgcatgaggcagagcgtccgtagcatttccagtttgttctgtataggaacagaggtgcctccgggaaggaggcagcgaggtaggtagctatgataggcacctaatgcttctcaaggacttattttttccttcttgaagactagtagtaacatcttatgatttagagtaagttgattgtaaccataggtatttattgattggaggaagggagggtcatattattttcggctttatttatgtaacatttgctagcttgtaaaaggcgaatgtgaaatattgcatctgcattttccaaggctgattcgtgtagctacccttgccacagttgtgacggatgt

SEQ ID NO: 118041 - DNA, 1041 bp, Homo sapiens
gaccttgggctcctaaccctggcctcttgccccaaactcatttattctagaagcaaggctttggaacacctattgagaataagtgggcaggctgaggtagcattccctggaattcctacgttgtcatcagcctgatccttggaaaaactcctctccatagatgcttacttgcattccctctctccagccctgaccacaggatctccaggggaggctgctttggcaagtggctactctttggtggcagacctgccagacacttaaggtaaactctgccacaaggaaatcgccaattcaaaggtgatgctatggtttcatccgaagagaacatgggggcaggcactgccactaggtaggctttctccaagacaggaaaaacaaggcgtgtaaagaaataccagcatccttttaagtaggcagggccatgggagcaaagccaatagttgatgccctgcgtgaatgggaaatatcagttgactgagcattgaacctcgcagaaaagactggatgctttttggatttagcagtgtaagtgatatacatactggagccccgtggatagccccctttttatccccttcataaacttttatctagagctagctttttattttagacaggttctagataaacctaacagcagaggggcaggatcagctctcctaattagaacatcgttagcatcttgatgcaaatttagtaaatgcaaaagcatttactaaaaccccaccccataatacattaatgcaatggcctttttttggttttgttttaaagacttatctttctcttttaccctccctccccattccctggggttcttaagattggggtggaatcttcccagagtgtaatctttcccttggattccaaattgtatccccttgagcagaggtcttggccttctgctgctatttctttaaattgatctccagcagaattccaaatgtaaaggtcagcaggcaaggaaatggcacttctaatagaaaacaatgtgcactttctaaatttgaaccaagcagtttccgctctttgatttaa

SEQ ID NO: 118042 - DNA, 1283 bp, Homo sapiens
atgtcttgttgtttgacatcttctagctccaagatttgtgcccccacagtgtgtttttctgtccttgggctatcctgttgatgagggcctgggtgttggtgcaaaggaggcctaggaaggagccctccctctttattcagaaaagtccagtgtttcttggagaatcatagtgttccatttggttctaaatccacagtgtttgtcatctggcctctacttaggtggcagttcccttgtgatgacaacctggctaaggattctcgcccaggcctctgaatttggagacaaagttgaaaatttggggttttgaatgtagacatgacagagtttttaaggaagggaaatggctagagtggagaaggttctatctcagggccgaccttatctccctgaaaggagaaagcagtgactcattagaatatgtttttgctctttcaaaagagccaggggtaggtgaacaactttcagaaagctgtattgtcccttccagaccaagccaggggctagaacagagcagatgtgtgactaggcaaacctgctaagcatggccttagcttccccatctgcacagtagagaaaataaactcttcccaaggggacagaggccagcagagctgctagtgagcggccaggactagggccatgctcatggttattattgggctcctaggaggagggcctagttttaagggtgcccctttcctgcacaggaggtgtggggtgttgcgtgatgtaagagggagggtattcttggctctcggggtctggggccaccctgcagatccggacagctgacaaggctggggaatgtatccgggacatgtggctgggcttaagaggctccacagttcagctgtgatcatgattgttctttccaaggacaggccccagtcagtgaaggaagcaagggcacaggggagggagcacagatgtgctggatctggcggagaagggaaggggcccttcggggcaggtggccacttgcagaagagtggtttcccttgtcagtagtctttttttggttgggggaaggggaagtcatttcctgctcctgtcccaggagtaagctaaaatctattattgtaagttcatttcttggtggagggtaagaagacaaataataagatcttagtgtctgtgggaggaagccctgccctaggagtctagggttctggtcccacccagacctggacttggccagtagttcccaaactatgccagtggttaacaggctccttctgactccttctttactgactcttggcttctaatccttctttatg

SEQ ID NO: 118043 - DNA, 1050 bp, Homo sapiens
gctcagagaggggcagtttcagatctccaaaccagccatggacttactttgaggagctgcagggtcacaagcatcgccccacgtctgtgtaaatcctgaagccggggcaggttagccgccgctgtactcgcagacgccggtcggaggaaccggcaaggctccctgcgctccacagcgccagctccgcgctgtcagctcagctcgctacctccgcggcgatgttgcaaccactgcctgggaaaatggcttttttatgaatgggagggaagggagcgccagtgcgcacgcgtgccgttcgcgattctatgaatgggtgggcacaacagaccctgagcgcgcatgcgctccgctcctttttttatgaatggggggcgggaaaagatcttaacccgtgattgctgggactggctcaagctccaccaggagccgtcgttcttttacaaagaggggtggaggttccagtggaggctgttgttgcctttttttttttttttttaatgaatggagggcggcggcgactgctgcagctgggccagctgcgcgggctgcaccccctcccagcctgcgagaggaggtaaaggccaccttcacgccactgcgggcctgggcaggaaccgtcagtgtcgctggggggtgggggacgctgcggcctccggatcccgggttgagagcagggtggtggagggcacacctagatctggggatctctgccccccgcaggcagtcaaaagggggggcgggaggacccctactgggggccttctcttgctctagaccagagacgccaggcgggaggggtcttgaagctgcgtttaccaaaaattaggaaaatgtccatcattcatatcaaagggtggggtgaggattggtgagtgaatctggttctttttcctgaggctgaatctctcgtgagtgctggccgcccctccccccatttcttgggtgtagacagtgactgggcccaggcctcttccggctccagtaccccccggggcgattctggcaactcagccagaggaagcctggccctcgcctcccagcgttcccccc

SEQ ID NO: 118044 - DNA, 1027 bp, Homo sapiens
aacaatagttttaatctcgttttcatattttgcattcctttaaaacgcttctgctgcttttttaaaagtctagaagccactatactagaaagaccttgaaatgtgtataacactagttaaacagccttctgcaatttggcagggcccccagaaaatcctgggatcaagaggttataggaattttaaggtctatgtaagtggtcataggtttatggaagttcctggagcaatacactgtgggaggggtatgatagggaggtgaaattcttactgaatttcagcaagactctattggtcattcttccttcaggagcaaaagtgatccctagaacatttctactagaacagctctgcttaccacttaattgctaaagctgcttttgactttccagactgccagcaaatacattttagaaatgcaaaatgaggtgggggaaagacaatatggccaacgttcttcttctgcaaaatgctgccacagctggaataaggcaatatctgtataaatgtgtgtgtgtgtgcatgtctgtgtgtgtgtgtgtgtgtgtgtgtctgtgtgtgtgttcagtgggctcagaagaaatttatgggtatgttatattctagcaaatcagggttgaagccagagcagggatccaggtgttccctaaatctgaagccaaagaaactttttatttatggtttcagcagacagacattttctttccaaaatctgcgttgtaatctgtatctacaagggtaaaagatctgcacacaaaccaagccctatgttatgatgttcactggttttcctggccaaaaagagggcattctccagttccccatcagctgggagaaatcctttccccaccctctcctgaacaagtgctttccctccccactaagcaagtgaattttaaatactactctaaagttgttggctggtgacccggaaaattccttttgctttgttatgctgttaatggtccatcagtttaaacctcatatccccagaaagtttccttctcttaactagattggagaagga

SEQ ID NO: 118045 - DNA, 1004 bp, Homo sapiens
tgtttggccactgctgtatcccctcagtgcctaaaacaatgtctgacacatagtatcagcaaatactcaaggtattcaataaatattttgcccaaaacaaattaatttagccaaaaattctcattagctatttttgactgtcctttctactagattctaaatttgacagcattttcttcatctcagtccccataactgccccccatccctccctgtttcaagtttagaatgacagttttgaacatagcaaaatattatttgatactgcaatgtgatttgggggtggcctgctgtttggggaattcattctcctctccactccccacaacaaatgggcactcagtagaaaactgtcttaggaaggctggaaaatgtctagcactttctcatcttatccctcggttaggttcctcccgtccctgctccctgaggctgatggacaggcaggcgggacagcccgatcgatcgatgcaaaggtgccctcctccgctcttgtttgctgctgcgtttctgactcacatcttccctgggctgtgggaaagtgttcagtgtgtggcttcacaaactgcagtgcagcagggagagcgggcagttggaaatgatatggaaaagaaaggatctaattaagcagagtaggtgatagtgtcgggaagaaaaagcaagcaagtggcaatttggatatctgcctgcaaataaaagagatgactgtcgttttctcctctggctcctgtttgccctataaatctcagttcacaaatccaagtgttttaattatcgctgtataatacaacatgctgtgctgggactatcttagggaaattaaaacaaaggagggggagacagagggattcaggctaccccgttctcccgtttctcttgtttacaataatccaaaggtgtttctccccccttctgccataaacacaacatggggttttccagtattaaacttatcaccttcctccactcacaaaaaggaacttcaggccctaagctgttgtcaa

SEQ ID NO: 118046 - DNA, 1046 bp, Homo sapiens
agatttgaagccaggactctaaggaccacactttcaactctgaccaagctggaaggtcgactgcctccggcaggggcttggcccaggcctgcccttccaagggctgtggtgtttactgccgagggttttggcatccttcggccttcttggtccctcaggggtcaccttgcaccccagccttccctgtagtatcccacggagcctgaggggctgtccctcagacttcctcacagctttgtaatccacaaatggaaaagtggcacttaaaatgaatttattcaggtgggagctgtgtaagacatgaaaataaggcttttgagctcctccacataaacttgagtgtaaatgaaaagctttttatttggtttctgagccagactttgagaagccagtggtccgtgcggtctggaagcgcatgttatgggcgctgggtcggaacaggggccactttgaatggcaaggagggagaatcgctccagcgaagctggaacggccaagaagctgggatgtcaataaacacaggcaggacacagaaagccttttccgaagagatggaaggcggggaagcgaaggaaaggcagtgcctcactcccggtgcatttgagaaggaaaatgcttgaggtaacccgtgttggcagcttttatagcttcctctcgataatgtgctgggcagaccctgaacaggctggtgttttattttcgtgtaacgaagccgagtggaccaggggcagctctccagcaatggctggcctggggctgtgctcacggagagaggcagggctacctgagacctggggcaggggccagcctcctgcctgctgggcaaactgtggggaaggcggggaccaggatttctgacttcctctggatgatgtttggtttgtcacaatccttagacgtaaggcccctttatgtccagtgccagtgagggaggtggcaggcagccgtgggaaggcaactgctctgagaaggagggcacaggtccacgctgtctaaatgttactggttgtgaactacacaggaaccttagcatggggaacccacag

SEQ ID NO: 118047 - DNA, 1053 bp, Homo sapiens
ttttgctgttctttgctactcaggctgaggccccgaatataagtagatgtgtgttaataagtgtctgtgcatgcatgtacatatacacagacatttcccctgctctctagagtcccttctcccagactggagaatgctgaactgaagaggacctcaggtattgagcacataatcctgactccttattaaacgggatgggaggatcaggccagcttggggaccatctgctgtgtcctgtgtggcctatccccaagggctctgggccatattctcctgtaaatcctctgccttattctcatggttgcctctccccaactctcctccagttgccccttttgcccaacttccagccacctggctctgcatgctgtcagttccatgcttgggtggcagtgggtttagcctgagatgcctggacttcactctcgcattgcttctgttatcctccagcctctgtgccccatggccagtgactgagacacgagaaaaggagaaaaagccacatgtataggaaagacctaggagaagaaatttctctaaagtcccctctagaggaaaagatatttttacctccaccccagtcactccctctcttttgttgccttctcttccccttttattcatagctgtaggtgccagcccaatccacttttgtaacccaaaaagcagacaaaggcctctgcccttgccttcccagacacagtcatggtctcatgatctgccaacctaagcagggctggcatgtgggatttaagtagctctgtccaagcttttacaggagtctgcgcttggaattgtcagagtgcagagcagtgttgttctagatccctaccacccacttcagaaaaaccagatgtgcctgccactctaggttgacctgacagttgtttgcacgtgtgtgcatgtgtatgagagcaactgacagcgtatgtgcgtacctagtggcctgtgtgggcctcctgaacatagaactaagcactcgcttgctgagccctgtggctgcttttggtagaaaagtgaccccagggccaggagctgcacctggtagagacc

SEQ ID NO: 118048 - DNA, 1084 bp, Homo sapiens
agcctctgaagcagcactgtccatttcctcattgcagtcatgtagtttgaatcaatgacagttctaccaaagtctagtttctcactaggtgaacatctggaatgtaaactccaggaggatggagaccttgcaaattgtgttcacagctgcatttccagtgctcagagtagcacctagcatgtcacaggctcagcacacatttgttgaatctttaatcctgacgggtctgccgctagcactaccagtttgtcttcctctgagctggaccatctcatgctgttctttgtgcatataatgctgttccctctgtgcaacatgctgttccctaccctgcctgcttagtaccctctccccttcaggtctcagcctaaatgtcacctctttagatgggctttcctgatctccatataggctgtcccctatgtccaaatagcgtgtctgtgttaaatggtctcataacacactgtacttttccttcaaggcatgtgtctcaatttataattatacttacgtgaatagaactgttttacatgtgacctctccttaaacttttagttccatgagggcagagatcctattttgctcactcttatcctcctagggcttagtagatgctcactaaacatttgtgagcaaatgagttctccactttccccaccaacaccaacatcccccagagtgatagattctaatgcatttagtatttacaactggatgaagccttttctccccatctctgaccctcacaaccacttccttggcactaatcagactccctgcttcacagacggaagggatttattttccctttggatctgccataactcaggttcagggaaggctgtgatctgccctcactgcagctacctagccccaggcccagggagccagggctgctgtttttagagcacctgagtaacttcaagttctcgagagtcatctataaaaagtcttagtcttcaaccctttattctgtggataaggtgaaaagagtggtgcctctgcagactgcctccctccttagcacacactctgccttttgttccttctccctgcttatgatgtcttgttagcactgaaatga

SEQ ID NO: 118049 - DNA, 1048 bp, Homo sapiens
gtttcttctgtttgagatttgttaagcttattgcacctgtgggtttctagttttccttaaatttggaagaattttggctattacttcttcagatatatttcttgccccttattcctgtcctgtttctcatgctccaattatattagcctgcttgacgttgtcccacagctcacagatgtgctgttcattttttttagttttttttttctgtcagtgtttttactgacagatgatttcaattcattaacctttttttttctgcagtatctaatgtcttaatctcatccagtttattttacatctcagacattctatttttcatctctggaagtttgattcataacctttttttgccttccatgtctctccttaacacgctcatgctttcctttaattttcttgaacgtacataattagaatgctgttttaatgttttcatatactaattgtgtcatctgtggcatctcggggtctattcctcaatagggggtatgttttcctactttttgcatgcctgtcaacttttgattggatgctaaatattgtgaagtctacattgtggagtgctggggtgctttgcatttccataaacattgttggactttgttctgggatgcagcgggatacagctgtgttgcttggaattaatctgatctttgagtctagcttttcagctttgtgagggtgagtctagaacagaacttagtccaagtctggagctgacaaactatggcccacagacaagctgccagtattggtaaataagattttattggaacacagctgcacccatttgtttgcctattgtctagggctgcttttatacttcagcagcagaattgggttgctgcagcagcagtggctgttatgaaccataagcctaaaaaaatttgtatctggtcctttaagaaaaaggttgcctggccgagcttggtggcccatgcctgtaatcccagcactttgggaggccaaggcaggtggatcacttggggtcaggagtttgagaccagccttaccaacatgcaaaaccctgtctctactgaaaaca

SEQ ID NO: 118050 - DNA, 1013 bp, Homo sapiens
tgtactggtgctcatattcagccctttgatccttaatatgcttgatttggaaaaggggaagtggttcattgcaccctcaagttaacacttctgagaaatgtatcagtcagaagtcaagcagagaagcaacaccagtaggagatacatgttttaataaacgtatgacaaggaattggcttacataattgtggggcttggctaagtaagcctgaaacccacagggcatactatcaggaaggaagaatcacatgggcattgctgaagcttgtccacaggcagccaaatagggaaaatccagtgaaggaaaagcaattgtggatccacctgctgttggaatctcttttaccaggaaaagctcaatcccttttaatggctcacctgattgagttgggcccatcgaatatcatctccctagattagagtcaactgattagggcctttaatcacatctataaaatcccttcacagcagcacctaggttagggtttgattgaataactaggagaaggtgtgtgtcacaaaaaggttgatgcccatgtatttagccacatagacacatctaaagatcattgcaatgatgtatcaaatgtagattttaggctggatgtggtagctcacaactgtaatcccagcactttgggaggccaaggtgtgaggattgcttgagcccaggagttcaggacaatcctaagcaacatagtgaaaccctgtctctctaaaaaatacaaaaattagtcaagtgtggtggcatgtgcctgtagtcccagctacttggaaggctgaggtgggaggatgatcaagcctgggaggttgaggctgcagtgagctgtgatcatgccactgcactctagccttggcaacatagcaagaccctgtctcaaaaaacaatgtaggttttaatgcaagttattttgtttctataacttggaatgatgagttctgcacaagtaaagtcacatgatttcacttggctgtcttcttatcaactgaggtttccttacttctcccttctt

SEQ ID NO: 118051 - DNA, 1001 bp, Homo sapiens
atcacctgctgatatggtttggatttatgtcgctgcccaaatctcgtcgaattgtaactaccagtgttggaggaggggtttgatgggaggtggtttgatcatgggggtagatttcccccttgcttttctcatgatagtaagttctcatgagatctggctatttaaaagtgtgtagcacctcccccttcaccttcttcctccttctccaaccatgtaagacgtgcctgcttcccctccactttctgccatgattgtaagtttccagaggcctccgtagccatgcttctcatacagcctatggaactgtgagtcagttgaacctcttttctttataaattacccagtctcagatacttctttacagaaatgcaagaatggactaatacacctgtcaaacaggaaagcaggcccacaatgccttgcatgctgcatttcttcctgatttggcagatatttgcaaaagtgtgtgttttcccctatacaggtgaatgtgttaaaataattttacatcagtaaaagcccctcttcatcagcctccttgtttttttcctcccctcccctttccactgtcacagggatccttggggggtctcttcgccagccagaaacctctgtggccagtggtgccatctgcctgagtattacttgcacccactgggttcattctgtctactcggtgtggcaggcagggcttggctcacgctaatgggctggatccacacctgccaagggtgagccaggtgcagagcagtgaggggtgtgtgggtgagcaagtgcggggtctggccactgtgcacagccaggcacattggctgctgtggcaaggcaggcacctacaggcaccaacataggtgttggctctgtgcaaggctgtggctggaccagatgtactgcatgcagcttctgctatgggcacctgtgtcttgatgaggggaacgtggtggcacccagaagcttgtaaacaccaggaaccacagaaccccaaagagggcgtcacagtc

SEQ ID NO: 118052 - DNA, 1145 bp, Homo sapiens
ctgttaatcactgataaacatcctgccttacatctctttatgtacatacagactagataaggctatatggatatagacttatgatatcatcaaaatgtcatgttttatttgatgttttaaaaatgaacaacaaacctatgaaaacattcaatactgctaacgagaaaaatgcaaattaaaaattatttatcatatgttagctatcctatgtgcaaagataaaaaaaaatttgtgcaaagataaaaaaccatttgcaagacttagaatgtgggaactaggcactgccatgcacagttggcgagaaaaattagtggaaactttctgaagacaatttagcaatatgtatcaaaatttacaagatgtattacctttgactcagcaatttcacttctaggaatctacccctaggagatggttgagtaagtgtacaactgtatttttgaggatggtctctgaaccaatggttataggggcaagcgattaggagtaacctatatgtccatggaaaggtgattggttaagtgggtaaaagaatatccgtacagtagaacccagtgcagctgtacatttattaagttgaaaatcagccacaacgtattaaagagtgcagttacttgaaaaaaatccagcaaccactattttgcttacttgtagtcaatctgttggtggaaggggaactcagtttttgaactttctattcgtcaagatcttagaatatatttattacatttgggtctaaaacaggtatattaaaacacttatgctggaactgagacatctgactttgctttgcctttttcaagtcgtgtgacccctgcagtctctcttcacccacagtggttggtgattccctgtctggcggtttccaattatattgttcattgttctctatgtgtgagcatgtttgtttctttagattataaaccctagtgaggaaggagatggaatcttgttggtcttctctccatcccccagacacagagccttgcaaataataggtgctcaccagctaagtaatgcatttaatttgattcttgagataatataaagcagtcagtaaagtcagcctttcttagtaaggaactgtgtaacaggaagtatcctgcttcttattcattcataatctagtgaaatgacaacagggt

SEQ ID NO: 118053 - DNA, 1049 bp, Homo sapiens
aaacaggctagggtaggtgattgcacagagaatactattctattcatttccttcctagccaaaaacaaaaacaaaaacaaaaatactttcctaacagaatttgaggattaattaatgtaatgtgcttagaaccatatctggcatacagtaaatgttcaagaagggtcattatattattatttgtggacatattttattatttacggataggtccagagtcggctattgagtaacaaatggtagggcaagccctcagcatttctaaagagataacaaacacatacttcaaaagactgcatctggagaagctaaattttctaggtcaaggggaaagaaaaaaaagatgcagccaacagaccatcttcctataagctggaatgttggctgatttcgagaaaggaatgtccttgccaggctggttctggaaattgtaacttgcacaacaacagattcaaaagatttttggagacacatcagtaagagaaggctaaaggaggtggcgaagggctgccagagcccctgcagaatcactttgcatttggcgtgaagccctggggctttaatgtgtccgtctgcaggaaggatatttccatttaagatgtgtgcaggtcttcaggatggcccagggccggccggatggtttggaccgtggtgtaccattaaagttcagacagaatgggggccggcagagcacaccattgcaccagggagcactctgtttttccttctggagtggatactgttttctctaagcacttaaaagaattcctgacctccaactgaatgatgctctatgagggggagtgttttgtggatgaataagccagactgcagggaaaaaacatacagaatcaagggaagaaataaaggatactacaggacacgtgtgtgtgtgtgtgtgtgtgtgtgtgtgtgtgtgtgtccgcttgtagttctctctcttcgttatgaagtgtgcaagctggggctgggactgagctgtttggtgacacagctggattagataacagccccacttcctgccagttacactagatgcaagcatctat

SEQ ID NO: 118054 - DNA, 1029 bp, Homo sapiens
cctccgagttagctcatcacacggcacctcactctttggggtgctgggagacatcgcattcctcagcctacagcaggcgtggtgggaagaaatgcccctgagtcaatattggaaggtggtagaaggagtggatgagaacctgggctttggcatccaactgacctgggttccaatcccagctcttctagttactagctctgtgactccaagcaagccctctaacctctctgatcctcaagttcctcatctgtaaaatgagtaaaataatagtacctactacagaggcattgggataagtaagaaagactatccctacaaatccttatcacaatgcctggcatgtaatcaacattcagtagggtgacagctgctgtcattgacagagttgttcttttaccaccttcctccaacggcctccattactcctccatcctttctgttttatttctgtgttaatctcactcagcttccacacccttacttcctccagaagtcatcctttacctctgatattctcctgagctcaggccacagcccaacctccctccacagtcactgctcatttctatcttgtctttctctcccttactttgtttttttgttttttttgtttgtttgttttagacggagtcttgctttgtcgcctaggctgaagcgcagtggtgcgatcttggctcattgcaagctctgcctcccgcgttcaagtcattctcctgcctcagcttcccaagtagctgggactacaggcgcctgccaccacacccggctaatttttttgtatttgtagtagagatggggtttcagtgtgttagccaggatggtctcgatctcctgacctcgtgatccgcctgcctcggcctcccaaagtgctgggattacaggcgtgagccaccgcacctggcctttttttttttttttttttttttttggagacagagtttcactctgtcacccaggctggagtgcagtggtgcaatttcagctcactgcaacctctgctgcctcagcctccgaagtagctgggattac

SEQ ID NO: 118055 - DNA, 1050 bp, Homo sapiens
ggcaaggatgctgtccactgaatctttcccttcagcccccaaacttgctaagttctctctccctggagaatcttgcccatccacctgctcccgccccgttctctgcttctctgcacagcccagctttctgaaggatgtcagcacccccccaacacctctcaggcatccccagccctctgcagtaccccatctagcccacccctccaccaaaacaaccttggaaaagcttgtccatggtctcctcccacacctgattgcggtggcctgaggccgtgtggtcagctgtgaatgttgttcttttttgacttgacttttactgattcagagattcctgctatctgggttccctttaacccccaggagacctggtccaccacactcgccatgctgctggctgctggctgcggctgcggccgagtgtctgcccaagactgggtctctaccacattctctgctggactctcagcccagtgggcagcggaactttccaacccactctggacaattcttgcccctctggtttcaataataacgctggtgtctgggtcttctttctccttctcttgcttagtatcttgccctggcttctctgcctttcaccaccttttggagtgtggtgtcctcaggggcctgtcctaggtggttctgtcttaaatgcatatatgctctctgggagtgctggtctgcctcacattctacccaggactcccaaatcctgccctgtgcctccaccctggtctttgcattcaaagctcccatcacctccaagaaatcttccaggacattctgcagataacagcccacggtggacgtcttgcattctccttcttccattgcctttgcttaattaatgacagtgcagtggttacaaaatagcccaagccacttaatatgccctagtcatattccctttccctcactcccacaggcatctccaaatgattctacctaaatatttcttaaatattccttccatcagtgtctcaggtcaggccagcaaattctcaagccttatccatggcaattgcttctagtttttctctctgtagc

SEQ ID NO: 118056 - DNA, 1054 bp, Homo sapiens
tactttctgtctctatagatttctcttccctgaaaaattaagctaaatggaatcatataatatgtagtcttatgcatctggcttctttcactaagcatgctgtgtttgaggctcatcgtgttgtagcatgtatcagtagtttgttcctttttattgctagaaaatattccattttgtaaaccataagttgtttatccattcaccagctgatgatttgggtcatttccagttttttgctcttatgaataatgctgctatgaatgtttgcatacgtgtcttcatgtgtatatatgttttcacttctaatttcattttttacctaggagtagaattttgctgggttgtatggtaaatttatgtttaagtttaatttaaacttgtgtttatttaaaaaaacctaccatactgttttccataacagaagcaccgtttcacattcccaccaacaatgtatgaggattctgatttctccacatcctcgccaatacttgttgttgtctttctttttgattgtagccactctagtgggtgtgaagtggtatctcgttgtggttttaatttgcattatcctggtgaccaatgaggatgagcaccttttcatgtgtttgttggccattggtgcgtcatctttgctgaaatgtctattcagatcttttttttcctttactttgtctcataaaacttttgatgattaagtgaacagcacttagtatattttctccatttgccctcttttggggactatttgtttccatgtgcttcaaccttagatgtatttaactgatcagtttcaggatctcaggaattaggaagtggttcttatgaggctgtggttcagatttctgctcttgttaggccagtgggcatcgctctgggcagatgccacacaggctggacttcctaattctggcctgcataagctaatgatccaagccctctcaatggacaaaatgagaaccggccaaggaagaactgttatcaccattgagctactggggaaagcaagttgtaaaggggactttgttatcctgtcaaggtcattgcatttctaaaa

SEQ ID NO: 118057 - DNA, 1039 bp, Homo sapiens
ttaatattagcatattttcatcattcccccaaagcaatcctgtagtccttagctaatatctgccattctttccatccctacctctcatccctaggcaaccacttccttaggatttttttttttttttttttttgagatggagtcttgctctgttgtccaggctggagtgcagtggcgcgatctcggctcactgcaagctccgcctccctcctgagttcatgccattctcttgcctcagcctcccaagtagctgggtctacaggcgcccaccaccatgcccggctaattttttgtatttttagtagagacagggtttcactgtgttagccaggatggtgtcgatctcctgatctcgtgatccgcccacctcggcctcccaaagtgccgggattccttaggatttttaactcatgtctccaagtgtggcactctcctatctgcttcgtctcttgatcttgtgaagccacatacccttttccttcagtgcatccaaacaatttgcagctcctcagaatgctgcagttccaacaccaggatgttccgacctggcactgttcttgctcttcacacattcttgtcctctgacagatttactagtgcaacctgactaatgcacactcactgccgagggggcctttaggcctctggtttcacacttcttttgtcttgtctgtcccttggtgttgatcttgctttagagagagtaattggaacgagagcgtgttatttctgcttgagaatgggtaccccaaatccagtaggtagatgcattccttcatttctacagaggaaaaaaattgccagtactatcctgatttggctggttgcacttcagggtttcagctttaaccattttagggactattgacaaaagtaaactttttatatgctgaaatggtgatgtttgggggtgtcagtggtcttaacaggaaagcccttcttcttcactagcaaccttgcattgttctaggaaattccagtccaaatgtagaaagcgtgttttctaccatctgtatgttttctctttctctcatttgct

SEQ ID NO: 118058 - DNA, 1056 bp, Homo sapiens
ctgccagactctcgtgactccaaaggatatcagcaggccctggtctctgcatctctcaactccactcttctctaggctggcgccattctcaggcagtcttttccttcacattggtgggatgacttggccaagattttgaagggaagccctcagcatggttctcattggctctttgttgaagcctgtgctcatccttgagataatccctgaagccgacctgacccagccccagagtagagttgacagtgggtaaaataagtgttctgaaagtcagggagggatgatttcccagaggaatactggggtgctataaatacagaaggaggggggacagaggccaaggcaacgcagttactccacactggcataagtaaattgagcacggtcatctgtggaagagaaagggccctgccttccagatatagcatggttgttacccacatttgaaaattactttgggcgatcaggctgtggtttaataaagtaaccctggacattcaaatttgtagggggaaaaatgagatacttttagtattttagtattaggcaccaccaggattgggcagactgtgagcagcctaagaatagtgtttgggagttaagtgcctagagagtagggaacagggatgtcaggcagataggagggagagaggggactgcccctgttgggacagatgataagaaatgaaaacaaaatgatgtatgagaactattaagtaatgccacagagttctgtaataccccggccaatgattgactgccctgtagcccagccagtacgagagctagttctttatcttccagagtctctttctctttatgatatttacattttgggaaataaactataactaatagagcttgttgtgaatctgttgatgtctcgtataatggattagactacaaaggtgggcaagctttttctgtaaagggccagttagtaaattttttaggctttgtgcgccacatagtgtctctgtcatatcttcttcttctttttttttaaaaaaatttatagccctttaataatgtaaaaaccattcctaactcacaggt

SEQ ID NO: 118059 - DNA, 1185 bp, Homo sapiens
tttactaaggtgtttttctgtgtgtgtgtgtgtgtgtgtgtgtgtgtgtgtgtgttacgtctctcctactagaatgaaaactccacaagggcaaagatgtttgccattgttcatttctgtataaccagtgcttaggatggcatctgctgtatggacaaatatttgtggaattaatgaatgaatgctttgattcttatattggaatgtttgctacatcctattctctctggccaaagaagacataagacttgggtttaaatattgactctgccacaaattgcctctgtctttgagcaaattatttaatctcttaggaccgtagttctcttatctttaaaataaggggttagagtaaatgattgctaaagttcctactagttctgtagttctgtgattataatcgctggttaaaagagatgatgtactgctattaaaattcccacatatatttcctaaaaacagtttgaatttcattggtgggcaaagtgaatcaagagtttcagaaaaaagtctttggaggcaccttctgctttcactaaaacagttctcaagtattacagtgtagttgctttcaagaacgtttctgctagcccttttaggataaagttcagacgtcttgatagggctttctgagccctgtggactctggcccctgccagctcctccagcctcacattgcctatgtgtataagctctctgctccagtcctgaatctgttttgattttttctaatggataatgggtttcccagcatcagtccactgaatatttctgttccttctgcctggtgtctctggtaccatccctgtcctcctttgtttggccagtgcctactggttgtttaggtctcaacacacagagggtgtggacttagggagggattgccaatggggttccgtttccactgggaagctcactagctatagcgtggtgtcagaaactgactagcctggttggctatatcatctgtgcaataagaatccaaaagttgttggaattagattgcagaaggtttaggtgacacagtgaagagtctttgttcagtggacactgggaagtcactgtaagttttttgagtagcatagtgacataatcaaagctttgtgaactaaatagcccggatatacctctaagagcattgtatcatttctctgatccctaaaacatcctttgggagataaatgc

SEQ ID NO: 118060 - DNA, 1051 bp, Homo sapiens
ccaattaaatctagtgttgccagataaaatatgggacacccagtaaaatttgaacttcagataaataatgaaaaattttcagaataaatatgtcccaatataattgtagtttaccttaaatttaactagttgttctgcatttttattggtgaagtctggcacctctaattttgtctcattgtttccccatttggaatcttttggctgcctttatgatagctgaaaatgagttgaggaatttcaaataggatgcagaggtatgattttatttgcatctgccccatagctcctgtcctttgttgttgctaatagaaacctggcctttcacgaaaggtcccgtcatctattaaaacactggttgcatagcagccaaacatttttgttgagaaataagccggacggaaatctctgtgatgacacttccttcaacctcacgctattgccgaacatgcgacaaggaggatgttgggaatggaatcataagaatcctcctgcagcacgtcagcagttcaccctggagcagttagaggtcagcaggcagggactctggtggcatctggggatgtgttcttgggctttaatagcaggtaggaagccttatctgtggaggagtccagcagtgaacatcccattctgcatgccaagggaacgcacaaataggcaacatacaaaaacaaaagaagtcaaaggcctggtccttgatcactgaggagtgtatagttccagagagggataggaccagcaggtatttacacaacacttcctttgtgactttgtatcagcactggtaggtgctttccacgcactgtcatagtaatccttaacagcagccctgtgaacaagatcctgttattattcccattttccacatgaggagactgaagcttaggctgtgggatggagcctgcagccgtaaagtcagcctgacctaaaagttcctgttctgtctctactccttatcaaatattgcaagtataggttgaatcatatgaaattgccagtatgtaacaattttgacctacaaaaaacgacagttttatatggttcaact

SEQ ID NO: 118061 - DNA, 1052 bp, Homo sapiens
gttattgttaagtttcagtgagccagtgcatacggactttgcttattagcacaatgcctggccttccacttttcctgatcatctataggcactggccccttgaataacttcactctgtatgctgggtatacagtaatattgccagcgctgaagcagaagatgcagacactgtgaaatgtgctgtggtcaaccaagctgtccacatgccaggagatttatttcccatctcttcagcaagctctctccatcctgggtggcatagagtagaagctgagagtgtgggctctggacgccgacagcatggcttccaatcctggcctgtccgtcacgtgtagttggtaagtaccttatctttttcatgtattcaacaaaaaaacactgtgtgcctgctgtgggccagccactgttctaggctctaaggatttgctagtgaacaatctgagggacagaatcatgcctttgcggagcttatattctggccttattttagtctcttaaatggaagtaataatagacttacctcctggggttattgttaagtttaagtgagccaatgcatacagagcctgcttattagcacaatgcctggcgtgcagctattacttaataaatgctagcttttcacttatgatactcttgtgcgcagccttgcaccaggcttagaacccattttcatcattccgttcctgctctggcttcagtagcacccaactgaaatattctctccttatttcttggcctctaagtaattcttgaaacctcccagctctaggaacctcttatggcttgcagcctcctcacctaatcatagcactcgaagaactcctggtcacctcctgaaataagcttactcatcacctagctgctgtgatgagttggcattctcatctcctggatgacgttttttggaaaggatcttttgtgaaaggctccccctccccaccccgtctactgccttttccccccagtgcttcctcttcgcttcctgtagtatgagggttgttcgggcagacatcctgaccttgcagttgctgtaaggatctttttaaccc

SEQ ID NO: 118062 - DNA, 1061 bp, Homo sapiens
tgacataattttctggccttctggcaggagggaaagccctctcctcccatagcctgctctgccaggcatgtgcagactgaggctgttaggtcttctggagtttgccagaatagacagccttctgcatcacaggccatgcatgcctcataaaatcctcacatggttccagatctctggattacacaaactgatgttacctgaacaggaagagtagtcatatataggtgataggggagatgattttaggtgtacagtgacacaatgttttatactgataattatatgctgtatttggaaaacttataactaaggatcaaacccacaatttcacaatcattacatagaaaatttactttcattatagatgtaagtaataatgagtttcttataaaaatttacatagtatggacttgattttttttttaaagtgaaggtgggataattgaatgatgaaagttaagaagccctgactggtgttgcatacaccagggttcttacctgtgaacctgtgggaagacttcaggaggcctgtgaagcccttgaagttgtagacaacattttggatttacttaccggtctgccgttgtttgtggaggagggagagtgagtcatcgcttggtttagaaatttagtgttggaactttctgggggttatttattaaaggttccaatttccttccccagagattttgatgtagcagtggaaatggaatccacgaatgtgcatttcacatgcatttagatgaggagtgcaggtggttctcagacctcacattgaggaacactgcttatcaagagtttcaggagaccccaacgttgagaattcagttctgagccatcccaacttcttaggattgttgtgcggtggttaaaactttcttgttaagagtttttgagatctttggacgaaaggtttctggataaatttatatcacaaattagtaagggtttcatagtaaggtggctttcttttccctgatcagtcattttgtggttgggtttgatctttttagtccaagatgcttaaaaaaacaaaaaaacaaacaaaaaaaacccaccta

SEQ ID NO: 118063 - DNA, 1030 bp, Homo sapiens
aaaaagttagagatgacaaactattaacctgttaaacatactccaatcccccataaagctgttcttctaagagttcattggtgggtttaaggaaatgattgcactggcttctcaacttgtcatgattaccttggaacagtctttactggtctctcttcttcctcttcttgccttttgcctagaattgactcactctccatctttctatcacactaactgtttgatgaatcatcaacagtagggcagtttagtcttaatttgctcagagtgctgcctgatgactcagactcacagttaataaatgcagcatctttagttttgtgattatatgttttctggtgacatacatgctgggctctgttaatctcgaaaggggaaggctatcttcattttggcatgctttgatctggcagctcctccagttaatgctgaactttagctcactgttgaacattaactctctgtgagtgtgttggcaagagatctgcagggttaaatctcggtataattcctaaataggaaacaagtataatgtggtactggagatacatacacaaatacacacacatggtgtttgtgtacatatttatcagataccatatatatatatagctgatatatatgtatatgtataatatatatacacatatatctcaccatgtgtgtgtatgcacacacaccatacatatatgtatattcatgtcacaattaaagtccattctaaattacagtaaagcattcgaatggttggattgtgtgtgcttcttactggtcttcatctggaaccttggacattatattggttatatgacagtctctccagtggaggagttgttgaaggctaaaccccatattattccctttatatccctaacctctagcctggtgccaggcacgtgggagaccagtcagtaaatagttgctgagtgatggatgaaccatctagggatcaataactgtgctggtttaccagtgagcccttatttattgaaatatgaatgatgttgataatagcagctatcatttattg

SEQ ID NO: 118064 - DNA, 1114 bp, Homo sapiens
ggctccttgatttaatttgtttcctgcccacaagccacctgaagttcaaagggttattatttttctattgtaattccttagcgggacgatacattccttctgggacctgcaggactttttttggaaagctaaattggcaacactgactcaaggaaaaggcaagtagttaagagccgatattccgaagcaaggtattctaaaaaggcttttctgtccagtagagactccagatcagagagcaggaaacttttcctgagccagaaagtatcatttataggtgtccttggcggaatccctcagaacacagttctcgaatctgcctgtaacaatgttgcctttcccgtgctgtgtgctggcttgggaattgtggaattctgcacatgatgcatctgggtatttagtttctggtggccgaggagagatgatgaggaagcaaagatagaagacctagattttcttatcgatttgctggttaacccagggaaaattactctgtgcttcattgatagaattagaacatctttctgtctcacgagagtgttaatgaccagtcagacagtgttgaatctgggaattatttttcaaggagggggatatgatatgtgatcaaattgtcttttatatatttaacagactaatgaactgatgcttcgtctgtccattattatcagggaacggaggctgcttcctaggtcagatttccagataactggagattgtccatacacttgtcatggtagagtaagactcacatccggggtggaggaggcgctgtacacagttaactcatttaacccctaccacaatcccatcatgttaggaattgtcatactacccattttgcagagcaggaaattgaagtttaaagaggggtaaataagtttaaagaggggtaaataagttgcccggttcattcaattattggatagccatttattgaatttcaactacgtgctagcacgaggattattatcaccacggtgagtggaccaggcttgggttgtccgtaggggagttaggattcttcccagggatgtctggcaggtgacttgtcgccacaccatgttctctctcacaggattttagtggtgggaggtacagggccttcttgaga

SEQ ID NO: 118065 - DNA, 1081 bp, Homo sapiens
gttgttacaattctcaccattaataacttcaaaaagctagagatctgcagagcagagggcacctcacatcaccattgtggagagggtgaggtgcagtgtgatataattggtatttatctctgtggcctgcttgccgcactggattaaaacaaaccaagaatttcaaggctaattggctaaaattatatgtgtaattagagagagtagaaaagctaaaggaaatgaacttacccagtgtcacctggtcaagcaggtaatggtgaacaaggagtgtgtgcccaggtgtgtctggctgtctccactgccccttactgtccaccatattggcctaatgttttccactcatgacactgaggatggtgtcattctcagcatgcaggggatgagctgattcagagcatggtcattgttcccactgctgtcttcccacagctaggaagtggcagaggttaggtttaagctcaggcctttataccattattactttggggagggctaaatggtggatgttttcgacctgatgagaatagtaggaaggggcaattggtgtgaggaaatattggcccagggtgaaccttttcaagtttattggtgtgagttaagtcatttccctagaatgttggccaagcctcaggaacatagcacgtggggatgttattcatgttcaataaatgtcaagtagcatccacagatttgtgggtttgtaaatccaaatggagtgctattattcaggtttcttgcatgctcaggattgctagcatttgtttttgaacagttctaataaaatagctcattactatcaagtatggattaaatacctggctgagaaaagtaaggtgatttatatatcttctaattagtgcaattgagagtgactatggcaatgattaaaaattattttgtggtgataataagttgcggtggagggtaggaaggggaagtgaaggatttttccgtttgtgttacatttccacaggtttgggatgtttctgacagtacgttatggcagtcagtctgtttttccataattgtgatgacctctgagtgaagacttgacttttaaaattaatgatctgatcaa

SEQ ID NO: 118066 - DNA, 1049 bp, Homo sapiens
ctctgctgcctcctgcagcctcatgccctcattgtgttccctaggcctcttcagagctctgcctacctctcctgctctgcctatggcttgtccccttcttttggccctactatttcccgtgtgtgcagcccagtgtcctgcctctgtgcttttgtttaaattgtcccctcttcccataggggttattctccccatctctccttggtcaattcctttgtgaccagtttaactcctccttccttagaggaacatcatcctttcagtgggggcagtttctcctctgactgaattcttattacagatgctctctctctctctctatggtgcttactgctttttctttttcttgcaaccagcattaaaaacaacaacaacaacaacaaaacacacaaaaaaacaacattctgtatttttgaagcatggtagagttgttaagagtaaattaggagtcagacctatacttgcatacaaactttcgaagttattagctatataaggtggaaaagtttcttaatatctctgagcctcagtctctccgtaaaataggtataatgatgccttcctgattgagctcttgggaggattgaaggagatggtataagtcaatgtcagacacatagtaggtcctctattagtcctatttctacctcctcccttctcattaggctgctaacttcttcagtctgcatacattttagttttgtattatgcagagccctgtgcctcatatgtagcaaataaggaatagctattagctggatagccaatggatctgaaaggactttaaagagaaaggattttaagagaatcactggtatagccaatgcttctactgtgcaaatgtctagcattagagtggtggataagctcgatatgcagtgtcaaccaggccacaggaagatttttgtatcacctctgagacacgaatagtttacactacagattaatcaggatggatttaatgatgaaataatttaattgtttcacagatgagtggattttgtatttttgttcccatggaaaatacattttttttttttttttcctga

SEQ ID NO: 118067 - DNA, 1062 bp, Homo sapiens
gggctgcaggcagaggtggcatgtggtggcaggtaggagttgggcatgccccgggaactggcagaggctggagcagctggagcccagagaggggtgtggggaggccagaccctgcagggcctctcaggccttgggagggactttcgtcttcacctccagagctctgggaagccatcacagggctcactgctggtattgacacaactgggtggagaactgatttgacggacaaaagtggatgtggggaggccagagaggagcagttgcagttatctgggcaaatggaggtgttttgtttaggggttgctgatagtgatgggaaggagtgggcagaattgagatgtgcttaggagacttgggaatggacatggcacatgagggagcctgctgtgtgagaggatgacatgtactggtgacttgtgcggcagggtgaatggtggtgcccttcgttacactggggatgcaggaagaggccctcggctggctctctggggagagggtggcagagggtgtttgagtagagagagttttgttttgagtgtgttgagtttgacctaggaatgggggtgtgggctaaacctgaagtctctctggggctcgtgtccatccatgtctcagctgtctgtcatgggtcctctctggagactctcaggtattccacctgtaagccagcttgtgtttccttgcccgctcacatcgtacaacaggtttggagggacactgtgtccagccctgtccgaggcactctttgtgcattgtgacatgaagccattcatgactagttccagaattattccaaatacaaggtgatgaggcacagagagtaactggcgtccaggaaaggaagagattaacaaggcccggggactttggtattcttgaactttaggcagccatgaggccaatcctgttgcaagttctaacctcaatgatggcctttctgagctgtaatcactttcttttcttttctttttctttttcttttttcttttttttttttttttgagacagcgtctcacactgtcgcctaggctggagtgcaatggtgcaacctcggctcac

SEQ ID NO: 118068 - DNA, 1004 bp, Homo sapiens
tgtgtaataacctgatactacaaatgtactagagggaaactgagtcagaaccctggtctttggtttctgaggaaatgatgttctcagcaggtggtgaggcccacagggcaagggcatgggtgttgatgccaaggagacctggtttcaagttctggctgccacttactgtgtgttttggggcaagtttcttaacctctctgaacctgcttcctcattattaaaatggggataacagtagtgcttaggtcatgggatgttgtgagtactcacccagggcatggaagggcatagtgcctggcacacaattggtgctctttaaatgtcagccattattattctttattttagactttcaagccagtgttgggagctcagatacagctacataatacctcttttcaacctggttatgtgacctttgcctttcttccttcattacagctgctggccttcctgcaaggactcttcactttctatcaccatggttacgaactggccaaggatttcggggacttcaagacacagttaaccattagcatacagaacgtgagtgggcatagggacaggcttcttttatctggttaaggaaaaacaaaatatgggcctgattgccctagaaaccatccaggtggcttggaatgtaggtgaggagggtgggtcttgcttgggttcagagggaaactaggggcaggcgtttctagagtgcttggtggttctgagttagaccatcatcctcttctccattatttcaaagccctatttatgttctcggaagtgctgctgctggttatgtttcaaatttgtagcgtctgtagcattggagtcaggatttcctttggcggtggaaatcccagcccaacccagcctccattctatgcatctagctgcctgactacatgagaccgtgtggagtgtgtgttctgggaatgggggctggggacacatgctggcctccagctcaaaggatgttctcttgtccaactcttaggaaggctggcaggaaa

SEQ ID NO: 118069 - DNA, 1028 bp, Homo sapiens
gttcctggaaggttgaatgtcctttatctcattttagatctaaggattctattaggttgatctggattgttaaaacagatactttgtttctttgatttgaataaaattattttcatcctagacaagaaatcgctttgaaggcactagatcagaagtggaatcactgatgaaaaagatgaaggagaatccccttgagcacaagaccatcagtccctacaccatggagggatacctctacgtgcaggagaaacgtgagtgctttgactagcaacagcttgggatgtactcaggcctcttacctagaaggtggaggatgtattcagcagtgcctaccttactgtagatacatgcttggataacaagaacaattttatagttcacctttccaaagagaaagatgatgtccacagaatcttgtctacctttgtttttctttatgaatgggaattcctttgggaacctgcaattctttaaggctctgtggttgctcttctctctctaatgttactctactcttggggttcctgtacccctagtccagctttatgtaccataccctgagcatagcagccttggaaaggtcttacatgctaggcccctgttatctatcagcagtgtatcctttggtagacttaatacttggtgattctgttttcatttgacattgtttcagcaaggcccaaacaatcatgacttaggcctttttcctcttctcctcaactcatttcattccaacacttgaattttatgaaaagtaggaacaaaggctcacttcaagagccaagaagaaggctgcatgcggtggctcacgtctgtaatcccagcacttttggaggctgaggtcggtggattgcttgagctcaggagttcaagaccagcctgggcaacatagtgaaaccctgtctctacaaaaatacaaaaagtagccaggtgtggtggtgtgcacctgtgggcccagctacttgggaggctgaggtgggaggattgcttaccggagtgagcctgttgaggtttataagagctcagga

SEQ ID NO: 118070 - DNA, 1087 bp, Homo sapiens
cagctgccctgctgtttctccaagcctatgtggaccctgaccccagggcctgtccacctgctccattccctcctccttattttatttcctatgaattctttcagtttcagctcaagaaagcttttcctaaccttcctgaccaggtcagatctccttaactttggctttttaaaaacagaatttttcatggttataacttttcatttacttgtttaagtgatatccacgtcccccactttttaaagcaatcaatagttgaacagaccatctttatagatttttgctgatatggtatggtcatccttggaacagaatattaatcttcctcctctttctgcatgtatttggtgatcctttatatatccctattccctcccatttctctgggacacctcatgtaatctttcaaagtggaagctggtccatagccattaaatcagatttatagttagacatcagcaaaatcagaatctcttatgtttgggtgtttgcactcagatattttacagactagagaaagagcagttctgtctgagaaattaatctttgctattcagtggaagacaataggtataaggcctgtgaatataaactgtctcctcctaggccttctgtgttttgtttgctcttctgatattagtgggtggttaaattttaccttatgtagccacactttctgttatttcaacaaactgggcaagcttgctaatttcccctgttagtttagataaaaaagattgacagaggcaggagaaacagaaaccctaacaaattcctaagtgacagtaagaagaaatcagggacagcaacttctgtgtttctgggcaataaactagtgctatgagatgaaattgtcacattcagttgaacaatggaatactactcaacaataaagagaaataagcccttgatatgcacaacaatgtggatgaatagcaaagcaattacgttaagtgaaaaaagccagacaaaaagagcacatactgtgtagttccatttatataaaattatagactatgcaaactaatcaatagttacagaaagcagattcagcgattgcttggggatgtactaggaggagggatgg

SEQ ID NO: 118071 - DNA, 1049 bp, Homo sapiens
caggagatacccttgtgccccttctcagtcactgcccatatctcttttcaaaaaaaaaaaaaaaatcactcttctgacttctgttgccatagatgagttttgcaagtatttgaacatcatagaagtggagtcacacagtcacataatcttttgtgtctggtctctttccctcatcattatgtctctgagattcattcgtgttgttgcatttagcagtagttgactctttttttaaaaaaattgttgtatggtatgccattgttcaaatatacaacagtttatccatttatcaatggatatttatttgttgttgtttttgcaatttttggctattctaaataaaactgcaggtattcctgaatgcgtcttttggtggacatatgcactcatttctcttgagtatatatgtagaggtagaattgctaggtcatagggcaggtttatgtttagttctagcagatattgccaaagtagttccatcaacttattctcccatcagcaatgtatgagagtcccagttactctacattttttgccagtattggttattggtggccttctaatgccctctattcaggagggtacttgttatatctcattgtggttttaatcacatttccctcataagtaatcagtttgggctctatttcttagccttattggccatttggatgtcctcttttatgaagtgcttattcaagtatttattgtattgggtggttcattttttcttactcacttgtaggcattctttacatattctggatatgattcttgcaggagatagatattacagatatcttctctcactctggtttgacttttaattttttaaataaaagtaattaagtaattaaattcatcttttgatgagtgtaagttcttcattttggtgaagtccaatttttcaatattttttctttatgattaggactttttgtgtgtgtgtgtttttttttttttttttaaaactcattgccttttccatctcttgagtattttaagacagataaaacatggagaaccacttctatagaaagtaagcccca

SEQ ID NO: 118072 - DNA, 1047 bp, Homo sapiens
gtagattcctttttcagcagccttccttaactattgtgaccttgagatacaggtatgctaattagctgggaaaaatgagtgtcattagcaaattcaacataggccgggtgcagtggctcatacctataatcccagagctttgggaggccagggccagaggatcacttgaagccaggagtttgagaccagcttggatgacacagtgagacgctgtctcttaaaaaaaaaaaaaaagaaaaaaaaaaagaaaggaaaatatatagaggaaaatgtgcatatttgtttttagttgttttctaatgtaataaggaattattaaacttagagactatcagagcttgagaagaccttaatagtcattttgagcacttctctcatttatagaaaaaaggcccagagaaagaaaattcatttttgtgagtcacacaagtggctggtagcacagtctgaacccagagctgctggcccttaattttatgctccattatgtcatgctattatgtggacatttgtacagatgatagaacaaaagcacattcatttattttatcattctttgtcaaacttactagacactcacttcaccaagtatattagttttctgtcagtgtaaccagccaccacaaaatgattagcttaaaacaacctccatttatgagctcatagttctgaagctcagaaatctggcatgctgtgtgtgtgtcctctgctcaggctagaaatcaaggtgttggttagctgtgctttcacctggacttggggcccttttccaaacacatgcctgtgattggcagattgggtttcttgtggttgtaggacttgagtccacagatccttgctggctgtcagccaggaccccctcccagcctctggaggcagcgccatgttcctcctcttgaggctcctccatgttcaagccaaggccagcatgttgaatccaccctatgcttcacatcactctgacttcttttgctaccagccagagaaaacttcctgcttttaaagagctcatgtgattcaattaagcccatctggatatctctgtat

SEQ ID NO: 118073 - DNA, 1075 bp, Homo sapiens
ggattgctggatcaaatggtagttctgtttttagctgtttgaggaattgccgtactgctttccacagtggttgaactaatttacactcccacaatataagcattttcttttctccacaaccttaccagcatctcttatttttttactttttaatataggaaggcttaactcttaatatctaaacaccgtacttacaaaacaaattaggattaaaataactacatcaaaattattactaaatctcagatctcagcctaaatgtcacctgtgccttctcagagaggtgattactcctgattactcttctttataaaattagcactttccctcttcccaacctctagaaccttctatcaaatcacctgcttatcttctgtgcagcccactatgttttcttgtttataattcctctccctcctttagaatggcattctttgaattagaggatctctgtgcctattttattagaatatctgcaatattttttatagatcatcagaaatttaacagagtggaaaactgaaaggtgaagtgttccaagtcattaaagattaaaaagtaaccagaattcacgagaaagcaaagttaagttataatgattttttaaatggacataaggatcaatgggaaatcaagataaagcaaagctgaaattatggtattttgatggacttagtgtctagttttaaatgttttgttttgactgacagaactgaaatgctagactgtctgtttctatataggatacctggcaactgaagtaagacatatgatattaaaatatagccttttaccctgaaggatataacagttatgttgaggagatgaagacataaaaaagataagcatgaaatgtaagtaggcttaatgcagtttcccaaactttagttttctccctaccccgctttcagttttgatcatatacctgtaacatttgttctatttactaaattcttttctttgatttgattcactttctttatttacaaaatttccttttaaaaaaataagtgcgtatcctactacctatatcagtatcacttgctgaataaggaaaccctaaaaataagttaaa

SEQ ID NO: 118074 - DNA, 1007 bp, Homo sapiens
ggccactttttcaggagtcatttaaataggaattgtttttttagggtattgattgatttctaagctggcaaaccagtgtgatggtctggtttagtgcttcctcacccttttttgagtttggaccctttcccacatggtacaggttcttagcttcccctccttggtggggttgttttactgtatctcttgattgcagtaatttacaatttaatgcaaaccccccataaggctcatctaccacaggtggcgctaatgctctgggtcttgattgttctgcaacactccttctgtttatgacacaatctaaactcttttaaagatatgaagccaatctgatatgaatttaagagtgagacactgctcttcttaaccagattccaaatgtctagagtccaaattccaaatgtccggcattttcttttctaggaaatgttttggtgggaatttcaatgcaaacattttatcagagagccagaatgttctgaaggagcagttaacaaaagggaatttctgaattcgtttgctttcatctcgaagtttctctcagggcatacggtgcctgtggagtataagacagggccataagtaatgtctgtcagctgctggtattttccaaatgacccagttgccagggagaggatggcagctgataaatatatgtacatttctttgcagagccttttcttctcctcttctctatgctctgtttggatctcaggtttagagagatgaattcatcacactcccctgttcatggcacattatcagcacaggtttcttgattcattcattctttcgtttcattttatttattcatccattcccttttagttcttttttctaaaatgtgtgtcttttatcttcctgtgttcttgataaatggtgtgtgttaataaatggttctgggtcttgttttatttcttactttgtgccctcatcattgtgtcaggagccattcgtattcctctgtgtccttttatgctgtggcttctgattactgcataatt

SEQ ID NO: 118075 - DNA, 1003 bp, Homo sapiens
taattattagtaatctaatcagcaggaaactcaagttgatgagagtggaaatcaagctctttgtgtgtgtgcatgcatgcacatgtgtgtgtgtgaaaaagaagagacaaagagagatgggggtccccaggcagtgggcaatgtgataatttacactagttccagtttagaggtttagagcagtggttgataacctgtatttcttgaattccttgttggagaaacagttgtttgaaagagattccatttcttaacacagtgttatctgtttataggctgtaaataattatcatcaatatgcaattttaatacattagaggctaacagagttatcttgagctcataatgtttgactttgcaatatgtaaatatcgtatccatttgaacttagacaactaagataaactgagaaatactggattacacatgtcatatgtaagacctttatgtgtaacatctgtgtaagacttaattccaagaaaaggagtttgctggtttcaaacaaattggagaatctctaacgctgggaaaaccaaaggaggaacatttactcagattgaatgtggaggttttgctttgccatttaccaaaagaagtaattgtagtagtgggtaaaattttgattattttctggatgtatttggaagcgtccattttattcttttccagtaaatattacttacctagaaaaggatgcacttcctacagtgccacacacacaaaaaaaggttcaatgactgatttgcctctagagggttatgtccactaattgggctgatggctttacatgcatgtatcttctgaccactggggtcatcactgtcagatgctaggttcttttcaatttttcaaaacttttatcgatgttcagagggtaaagaaatagcctttgtctagggcagaagttcgtcaatgcctagaataagaccatgttcacaagcctactcttgaaacatcctagttcagaatcaatgtctgcagctccccgtagcactgtgtaaaa

SEQ ID NO: 118076 - DNA, 1050 bp, Homo sapiens
tagattctccttgttctgctattttcctgattcctgttagaatcattatcttacctgatgattggaggggtattgtacataatttgagccaactttctggtattcttaaagctttcatttagtgaacctataagcctgcattgatttttcctggttttggtatttggtcatggtcctgggagaagccggatttactcctggataatctgaagcatgctgtggttcttcccttatgactctcatgtttcttctacggctctccttctgattcacttgccttgatataagaggacccccctccacttctgctctgtagtctgatttcattgcctggattataatcttatgacagctctgggtgccccagaaagtagcccccaaaagtgtgtttgctggagtggggttggggggttgcagcatggcctttcccccacacccctgggtggcttgggctatgttgttggtgggcagagggccaccacctatcacattgtttccccagctggattttcctcaggccttcatctaagctttgcctagtggatatcctggtggcaggagaatgttgactgagagcctaattttctgtgctgttaaaaatttgtgtcccttttttgtgtgtttttaccatgatgataaaggactgcaaattcagcatcactgtttttctcgtcctgtaaccttttttgttcttcttcttctttttttttttttaaaccacatttaaagcaaacttagtaaaacagagaacacaatgaaggtattatacagcagtgctgtaaagcacggaattatagtagcatgcttcacccacttaccgccgatccagccatgaactatccttccttactctgggaccttgaatgtctgcatttctttttttatgccccttatttcccataccttttcacagagtggcataaataaaagcaatcaatgacttctttctgaagaaatcaaaatgctttatgatgatttctaagacctaaaggcttacataggattaagtggaaacagcccagactttgaagactggagcctactggagta

SEQ ID NO: 118077 - DNA, 1052 bp, Homo sapiens
aattgaaccatcagacatcgcaaagcaacctcaagggcgcttgtggtacctggcatcctactacatttctctaggccatttcttctcttctagatgatcatctcagatgttgcttttcattccacagagaaaatagatacaatcagaagagaacttctgcaagctaccaccacaatatccacacctgtgcctatgtttctgccatctctcctgtgcgacaggggaacccagtgctcctacctaaaggcattccctttcctgggacactagagccgattgactccccgttggatctgtaaggacttgggtgcttgagtagtttctccctctttcttctacgccattaacttttctgtctctactaaatctttcccatcagcacataagcatgttgtaatttatgcaatcctttgaaacatgagaaaggaaaaagcaacaactacaaagaatctttctcaatcccatatccccttttaggtactatcccatttttctgtgcttttcccagaagaactcaaatagttgtctgtgcttgctgttcccaaatcctctcttcccactcattctttcttgaacctcaggctttttatgcacactagtccactgaaatgcctcattatcagtattgctgatgacctcatgttgctgaatcaatttcagtgttcccttccttaattgctctgaaggatttaacacagattcccactctctcctccttgataagctttcttcacttggcttccaggacaccatactctcctggttttcctcctgcctccttgacttctgcttctcagtcctgtttgctatgccccaggactctgtccttcaggcctcagacctcatctcccctcctgccatcctctctccttcccaatgaggtcttcctcgattgttttaagattgcagtctccagctccttcactccctacctactagaattgcttaattttttcccataaccatgtcagtatctaatatactatatatttgatttgtttactcgttgttttcttctccccgaaatgtaagctccacgaggttggcaattg

SEQ ID NO: 118078 - DNA, 1011 bp, Homo sapiens
ttgcagcactgttcacaatagcaaagacttggaaccaacccaaatgcccatgaatgttagactggataaaaaaaaaaatgtggcacatatacaccatggaatactatgaagccataaaaaagaataagttcatgtcctttgcagggacatggatgaagctggaaaccattctcagcaaactaagagaaggaacagaaaaccaaacactgcatgttctcactcgtaagtgggagttgaacagtgagaacatatgggcacagggaggggcacagcatacaccgggacctaacagggggtagggggaagaggaggataaccttgggagaaatacctaatgtagatgacgggttgatgggtgcagcaaacgaccatggcacatgtatacctatgtaaccagcacattctgcacgtgtatcccagaacttaaagtataataaaaatatatatatatacacacaatggaatattattcaaccttagaaaaggagatcctgctatttgttacaacatggatagacctagagaaaaaaaaaaagagagaaatgaaacttaagataaaagctttcaaaatagcaataccttattttggtgctagtgaaagcaccaaaaggaaaaataaaggtcctagggaaatgggcatattaaaattttctaggtgggaatgtaaattgacatagatctcatgggtgacagtttggtaatatctattaaaaatatttatgctggctaggcacagtgactcacgcctgtaatcccagcactctgggaagccgaagcaggtggatcatttgaggtcaggagtttgagaccagcctgaccaacatggtgaaaccccatctctactaaaaatacaaaaattaccctgcaggtagtggcacgcacctgtaatcccagctacctgggagacagaggcaggagaatcgcttgagcctgggaggctgaggttgcagtgagccgagatcacaccactgcactccagtctgggcgagagagtgagaacctgtctcaaaa

SEQ ID NO: 118079 - DNA, 1051 bp, Homo sapiens
aagtagatgatttatatgtttttatacatggggccagcaagtgaacaatcgagttttatagctaggtcctggtggcctgggtatggagttcagatacatcttttgagtagttgtttattcaaaaatatgcctacgtctttagcaaattactcacagggtcagcgactgttgaccctgtgtgtttgttagactttgagtgtaagtgacaatataaacacagccatatagatgaatatacactagtgcatttttatttctgtttatgccctgtttcacttaatgtgagccatatgtttaatctgatcggcctttaatactttacatctaaagtgctgaatttccttacttggttttaaatatccagatctgcccatttaaaaaattatgtctatttaatgcttatgtttgcaaatgtattaaagccatcaagaggttttacatttgccatggagaaaaatgctaacgattgcagtttaagcagctgccaagtacataaattgtaattaagagggattagcagttacctggacttgcaaaacagggattcagatgttcaaaggttagtaatttggcagatagttgctttggttggttggttgttctaggcaaaatggaaatgataaagcgtgtcatatcctgaaatagcaaaatagcctggatgctgaagatttctgaaatgtggtagattttctgactcctgtggcatctgacgatgacccaagttctggctcctacagatgaggagtctataaataggaagataggaaggatacagggtggttggtatctctgtgtacacgatttgtctcattggtaccttttcttttccttcctcccagtgttgctaacaaccacaagcagaatttgatgacggtggcaaaccttggtgtggtgtttggacccactctgctgaggcctcaggaagaaacagtagcagccatcatggacatcaaatttcagaacattgtcattgagatcctaatagaaaaccacgaaaaggtaatatgtaattgatcacttgcagtgaagaatgtacctggggggaagctgc

SEQ ID NO: 118080 - DNA, 1050 bp, Homo sapiens
cccgggtgccctgggcacacctgtttgctttggcagatgacatgtttattcacatggattcctgttgtcacacgggctgcagaaggtgtgtaatgtgtttcttgggttaactatgtgtaattactacacgtgactgaaaaccacgttgataatgtggctattaaaaaatgatgctgtggaaagctggtggcaggaaaaaagttccagctagacccattaaatgaaaacaagccattctaggcgcatacttttggcactatcaccaagtgaacaaagcagataccattaagtatgatgtgagtctgcttcgttaaaaaagtacatgtctgtgtgtgtgtatatgtatatattcctctgtgtagcagatcgattggacatttacacaccaaaatgaatacaactggagcgtggcccatacgggatatctgtgtgcagatgcaaatgcttttctagactttctaaattggagagaaatgcatatttcttatatattcacttggttttaagttattaaaaacaaaactccctaattgcacctttcatgtactatctcaaacccattttgctgtgagtcatggtataaaagtaggtgtgtagtttccttctaatgagcaagaatataagccgtctgtacgtggactccctcagatcccagtcaactgtaagttaacgggaaaccaacttttcctaaaagcaagtctcacatagaaaagagggctgtcttgtgagtaatacagtgtccatttaactctgatcattcaaccccctagtcaacattcatcagaggcccattcctcctttgcggtttctgaaatggtgttttagggccagtcttcctcattgtgcctccacgtctctttcctgtggatcagtgcaatcccaggccacccacagtgacttccccattctctcatgaaattcagttttattggcattttttccctttgcaaagaaaagggttattacaggtgctgcagggagtcagtctgtccacacagaaccaaaatcagaagtcgttttgctgaagataatctgtcaaaggttttaata

SEQ ID NO: 118081 - DNA, 1224 bp, Homo sapiens
atcttctctggtgaggctctatggaattggaggtgggacatggcctgatcaattagagcaatattagaggcaggagttttagaataaaaggtgagtgtcacagaagccaaggggatctgggtgaatgtgaggggtctgtggaggcttttctctactctggcaatctgccagtcaaaagaagatgcaatttatggtgccatagtagggccactcttagaaaaaatcctggcttatattaaaggggagatatatcctgttatgacgaggaaaggggtttgctttaaaatttcgagtcacctgttcccccttgactcttcctttcccacttttaattcttaaccttttctatgttgtttcttaagcttccctgggatcagagatcttgatccagtcttattctttatacatttttgtgcatgtagcaatagactgtccctatgcaataatattaatatgggacttgtggcttttcccccccagaggaacaaaggaacagcatcatcaactccagtttggaatctgtctcatcaaatccaaacagcatccttaattccagcagcagcttacagcccaacatgaactccagtgacccagacctggctgtggtcaaacccacccggcccaactcactgtaagtatgatgtccagctgcctaccccacaagggctttggtcagccattccacctagaatttgctgtctggctccatctgactttggaccattatcccctgaacattatttaaacctcctccctaaactgggagctcagctggcttgttgtgggtttttaaagcatcatcatctcagagggagtcgttattcttaacatactgcttcttagccttggtgatttttgatttactgtcctgctgagatggctttggtgatagctattgcctgtgctggctgctaggcatgaaaagcaatttctgtaagttttacaaacgtccagggactgtagcagctctgtggccgagtttgtttcactcatctatgttgtctcggtttccctccccactgactatgttggaaatgttcaatgccaactccatgtccacttccataaggaagagcccccaggagccctttgtgtcttcacatcctcaaaccttagcatgactatgacttcttgacagagactatgaaagagaagaaccctttttgctttatttttcagcattgagcacccatagtcaggacaattagtttgggggctggttgt

SEQ ID NO: 118082 - DNA, 1085 bp, Homo sapiens
tggtctctataatctcacagctggcctgcttcacttttatacctaatgcctgtaggcccatagtagattaaaaatggccatagaatctttgcaacccctcccattaagagctggagcccttgaatctaggctgacctttaccctttgacttattttggccaatagaatgtggaggaagtgacatcatgtgccttcccaggcccaggccacaatgcctcacagctttctctctcattctcttggaacccagtcaccatgtaaagaagcctgttgtagcctccttaaagatgacggattactggagagagaagcccagctatctctctcagcgcagctcagcattgggaccaccagtcagttgaatgcagccacctgggttagtcaggcaagaccagccaaagcttcccagacaacctatagattcatgataaatatcacattgtgattattggaacccagtgagtttagggtggtttaatatgcagtgatagtaaactgacacaagtcctgtgagtttgtgaccgcggagtcatgggcagctgtcttgggatggggctgagctgtctgcatgaatagaaaggtatggaagagtctcactatagtatagtgcagcatggagactagcctctcggttttcagaatcttcttggaaagaaaacaacttgtaactgagattctaagaaatttgggaaacaaaatttatggctaatggctgaggcaaacaagaaaggtggctcaaatattggaatggaaagcaggaaaccctaggttttagttctggcatcgacattgcctggctgatgatactggtctctggacctgagcatgcccactaccaccatcttccactgtctctggtggaagaaatggggctgatccacctccaaggatgagggtcgttcaatgggtgcttactgagggctgcagaaataaatcattctctccttccacagtgaccagtggggcatcatgccaactcctttctgggagagagtgattttaaaggaggaagtaaacaaatgctgagaaagaagtcagggaatgccccaccagggacataacatgctgcagtaatttccccaaat

SEQ ID NO: 118083 - DNA, 1846 bp, Homo sapiens
ttaaaaatgaagaaaatgttatcttcctacttagccctggacacagttgattcatttaaaaaacaaatttctgggaaaaggctttcattatcagtgcccattacaggttattagagaacaaatggcaaacaccggtgtgctggggctggcctccattcattttaatgacagtgttgtggagagtgcatcttagaatgtgactaagcagaaggaaaagaatctgaaaaggactggccccttgtcttctgtgagagccatgaacatgcaaaaacagtggctcagcagctctgagagctcctcagacacaggccactgggtggtggcatcttttggtggcctgccagaaacagtggggcagccagcatccacctcacgagctttgcaaaagtctccaacttgttgtgacattgtccaaaacctatgagtttggataagaactgtttcttctgccaggaatcacattgagcggctggaaaattccacctcagtttgatcttccagtgcctggttcatatcctgagaacaaattttgttctcaaaggttgaaatgaagtctccatgagctatggtgatgataatggtggtaatgacaatgataattcacattaaggaagccccagtgtcccaggcattttacatgtgtgtacttatttaatcaacataatgccggaggtactgttgtactccacattttgcacatgaggcatagagagattacctaacttacctgagggtagaggtgggatttgaacccaggtggtcaggttctagtactgccccacccacaaccactatgcttagttgcttctgcgggcaatggttgggtattggcaagctacagaagctgggtgtgttgggaaagagactgaagcagcccagtcatgtttcttctttttcttgccctccattctctggtatcgttcaagtatcagatgctgggggagtttggggagacaacaagagcatgggagaataggaagcagagaatgagtacctaaaaacagaggtcagcgggccagagtttaagagaaaaagagaggggaaaaaagagcaggaaatccttgaaaggagctataataaaggacagagaatataaaggataaaaatggattccaaggaggaaaaagaatgggaggaatgtttattgaccatctgctgttgccaggcactagcctagggcttttccatatgttatctaatcttagaacccagttagatgaacaaccactatcaatattcccattttacagatggggaaactgggtttcagggggataaagtgacttccccaaggtcacagaaagcagcagtttgagctgaggcctgtgtgacccccagccaacaagtcatccatcgtcttgagggctagtccctcattcctggccatggtttgtagccctagatgagagccgcacttgagatcttgagatttgacagatacttggagatcatactccaaggaatatggccattcctttgctgggaggcagttgctgtgtacttgcatcacaaggaggagaggggaggggagaggaataaagttttatgggacacctccttacttcccaagtttcaaacttttatcaagccaactctttaaactttaaatatgttgccagaggtgctgtcacttccttaagcattccataactctccaatctcaggtaagctatttttttcccatacttgtgagatttcctcctacatttgcccatttctgccattaaaaacaaaactaaaaactttccctcaaaagctgaccatctgcttgtcactacgctttcttccaaattgaagaggtggtagcaggatgtttgcaagcccagtatttatctctggcgtaggc

SEQ ID NO: 118084 - DNA, 1067 bp, Homo sapiens
aggcacagtggctcacgcctgtaatcccagcactttgggagggtgaggcaggtggatcaactgaggtcaggagttcgagaccagcctggcaaacatggtgaaaccccttctctactaaaaatacaaaaattagccgggcgtggtggtgtgcccctgtaatcccagctactcaggaggccgaggcatgggaatcacttgaacccaggaggtggaggtttcagtgagctgagatggcaccactgcactccagcctgggtgacagagtgagactgtgtctcaaataagtaaataaataaataaataaatgaaatatgacacgtgacaatgaaacagaattgtctttatgagatttatgtcttctcttagccagagattagccaagcatttgttccttaaaaatgaaaagtcatgatgcctgtgtagtgagccatctgctgctcagcagactgcataagagacttgccagccacttctgcttttatatttatgaactgacgttcacttcttagatggtaggaattaatccagtgggactctactttgaaagtaagtttcttatgggaatttacctgcaggcttggcaggcgaaccctttgggcagaatagtgactcccaagcaccatggcatgtttgttttcgagagtttttgtgtccctcctctggttcttcttcctgggagcaccacctccatgctcatatgcattgacatagaagtcctttcaccactgaatgtaaagagccagcctaaaaatgagaaattaatttaccttcgccccagggtagcttagagacagcttttaaattttgatgttaaaaagcacttggaaagacagttcattttggagcctgcggaaggaattactttagttaagggcttaacgtaaacctaagtagcagaccattaggcagaggtctacatttggcattgaaacttaaatttcaatactataatgaaaatttccaccataaaagagactcgggtgtctgattttcatcgttatgcaattttcagctcataatctcagaatccgtaaatgcctttaggatctaatttgcaaagagaatta

SEQ ID NO: 118085 - DNA, 1024 bp, Homo sapiens
ccattggggagctttgctgtgcagacacagtgacagggctgtgctaagacaggaagtaatcctagaatgaaagctctagaacctgagatgtagtactttttctctctttccatttggttgcatgatgatgcaattctgtcttcattttcacttctgtgtggatcagtgccttaggatttagagatggtacaaataccaagtccttaaatctactcttcattttaaaataaaagcagcattttttcaggacaagccaagcatattctaattataacagctaccatttagtaaacactatatgccaggctttaatatactaagtatattgtatatattatctcctttaattatcaccaatcctatgaggtgtaagtattattaatgatccccattttgcaggcaaagaaaatgagggacacagaggttaagttgcccagggtgacacagctaataagtggcagagccagtaattgaaggctatctgaccctaaactcctgcacttaactgttaattcagtattcttaagaatattgttttcttttagaaatctgcttatcaagtatgacaagttttctctgaaaacagataacccatgaaactattgagaagcttccaagccattttttcctcttttctatttaatgtgtatttatgagatcatggaatggcatttcacctgtttcaacagcttctagggcaattcaagcaaattttctggaagtctgcttggtttgtgtcaggcatttcctggtcccttgtgtctgccgggcttgtggaggaggcgtgtggaagcttttttctgagccatccgccctgtggaagccacacaggcaaggccagaggagaacagtggcacaggcattcagaaaagcccagtttcccgacgtcagtttgcctgaggtcaggcggagcaccagcactttctggctcttagaaaatgactcaacccctccaacctgcagcttacccctatgcaaaatcagggctgcccttgcaggactgttgggacgagtcagtgacagg

SEQ ID NO: 118086 - DNA, 1048 bp, Homo sapiens
ttattaattcagtggataagaagcttacacatatttccagagccaaaaagaataataaaatccatgcaaacaaataaaaggttttagaggaacaaagtaatcacaacagtgttttgctactaagtacaatacgtgggggcattcacacttcccagtcatttccagagctgacctagaacacaataggaaccaagatcagtggttcccatctctggttgctcatcagaaccacaaggccagagcaggaatagtattttgaagatatagcttcttaggccccaaccctgccatagtcattcaatttcttgctaatgttaggacttgccattttgtaaagtacatttgattttctttcatttttgtaattttgtcatttgtaatagtccttcccggaggggagtctcccttccttcctatagttttctgggagaatgacagaaaatttgagtatatatagtagagtaccattttgtcatgataaggctgggtgacaatgttggaagaaggaagagctgacagagacatgctgtggggttttggggatgacattgtggaaagtttaccctcactaacatttcaggtaggtatatttgaaagtgtagactgatgatttctgaagggaactgaatgagcttgtaccactgtgaccatgaataccgttgcaagtgaattaacataaatatactgacaaaaagtgagtagaactttagaactgttacatctcaggtagtgaaagtgagggtaacctagaaaaaggaggtgtaataactgtagtatcaaacagtgtgttgcatcctgcaaatagctagagatgtggcaggttacacagaagaagagaagtccctgggctgtttgtttggggcttgtgtagttccccgtttccaaaatggaacaagcgacatactcttttaagggtgcacagagacttcattgaaaaggcaagcatttgtttccctaaacagaatgactttttagctttaccaagaaacaatttcttgcaggaaaagtatgttttgctgttatcagctactactgggaattctgctac

SEQ ID NO: 118087 - DNA, 1024 bp, Homo sapiens
gagccctcagcagtctactttgttgagatctcggctcagatgtcacccaaaagaagttgccctagccacagaatccaaattacacccacacaccctccccacccaggcacctgctttcacactgccttgattttagttgatttcatagctcttaataccacctaaaattatcttctttggttgtttacgagtttattttctgctttacacactcataagtagtatttcctaaattttttccattaggataataattaaaatattatcaaaaagcatgtacttccaataagtgtttgtttttatttacttaattataaagtgtatacctgccttagtaattgctatattacacacattagaaaacataaaaaatataaatgttataagaatcagatatttaaaatgccaataggagctttgatatttttctcctccaccagcctgtgttctcgcccaccctaccttgaagcctactgaacttgaatgtaagctgcctgagagcagagggcttgcttggcttgttacctgctgtgtttccagtgcctacaactgtgcctagcatgtactaggtgctaagtaaatatttgattattaaatatttattgttgagtagtaaacaaggctaaggcacaattcactcttccaggctcctaatagctaaggttttactacatctttggaggacagaaggaggggggggaaaaaaaaaaaaagacctggtttctggggttcagaatgccttcctaatacaatatgtgctgaataaggatttactgtaatgattcaaatccttcaccaaagaggtaattacagcttccttggtaagagcagagctcaggcagacagacaggtggtttctagtttctcttataacagatggcacaaatggaccagcttctgaagctttttgaggaaatttgctcataaacagttttaaatatttttcttttatatcttccaacacatgcttcttaaagtaaaaatgcttcagtagattgcaggcaagggcacatattatgaatag

SEQ ID NO: 118088 - DNA, 1020 bp, Homo sapiens
tcagtggttgcctgtggctgagcatgggagcagggcttaactgcaaatggcaggaaggacctttttggggtgatggtggcattataaaactgaatatggatgatgcttgcacagctccatcagtattctaaaagttgtacacttaagtaaggcagataaatttcatggtatataaattatacctcaataaagctgttttaaactctcccaggagtacaaagcattccttaaatgttgataactgttgttgtttttattattctgtaggtagtgtagacaaatgataccaaaattaagagagaaacattaaatgactgtgtacaccttgcttgagtggacaaatatgcttttcattcattaaattggctcttccaaataattaagtagatcttgggaaaatatatgccacacttttacaagagggtataaaaggattagtggccgagaacagaaatttccaaaatgtgagctgtgtgacactgagatagctgaaatagctttaagtggtgcttgggtgaactttattctatatactaataataatgagatattatttgcaatgggctaaagtagacatttgttaaagagatcaatctaaagaaaatattaagaaaatatgtattaaaattacatgtgatacacagatgtgacaaacgtcatgaaggtgggacactcatgactgagtttgggcgccaccacccagtagccaggagcaagaacaatgccagtgggtggctgagaatgaatactgaaacacaggcattcatccaagtttatgcccaatgtgcctgtctccctcccaaccagaaatgaaatgtctgaatgtccccttccatcgtatttgtcaggcctgtcttaggcaagccgacaagtggccatatgtggagctgtcgtgacaacaccagaatgagagctgtaccgttttatgacatcagataattctgactcagaaatgtctgccttccctgtctgccagcagtcttacccttggtttctggtagatccatttccattctttta

SEQ ID NO: 118089 - DNA, 1067 bp, Homo sapiens
acctcaacagcaccccagatgttgattttgaggttacagatacattttagtaagtaggtgaatttgcaaataaggaatatggaaataatgaggatagactgtatatatccctaaatgcaacattttattgttttgagttcaacttcatttgctcaaccacatttaagtcatttatgttgctgtagttcattttcattgctgtagagtgcaccattgtattaatacacaaaaattatttttttattccactttttctaaaattttgaatttccattttctgcttttacaaataatttgctctacacattctaatacatgtcttccagtgtacacataacacacctttctctggggtgtatgtctagcaatggaactactgggtccaagggaatggtatcttcacctttgctagataatgctacactatttttgaaaatgattgtagcaatttacacccctcctgcagcaaaatatgagttacagatgagaatgagatgtacctcattctcataaacctctggtatttccagcattttgatgttagctatttagtcattctggtgggtgtgcagtaacatctcactgtggttttaatctgcatttcctgcagcacagaaaggttgagtgccttttcttttggattttctcttttaacatccctattcaggtttcttgcccatttcccacttggttgtgttttactcaccagtaagaaatctttacatagtctggttataaaccctttgttcatttttatgttgtaggctgcctttttacccttttaatattgtttttgatatgccctctctatgccctactggataaattccaacccctgtttgggaaccttcagtttctggaattatttcttctaaaatctttattgtttgcctttggcatttaggtctataatccatctggaacacatttgttatgtatggtgtgaggtaggggattctgtcatttttttccatatagatatccagttagtctagcaccgtgtataaaagagcactttccactagtagcataaaatcgtataggcccatgataaattcctaacagta

SEQ ID NO: 118090 - DNA, 1144 bp, Homo sapiens
tctgggctgctgaacactggtgctgtggtggttttcaaggttaattcctaggctaaccgtatggcctatagtttaaaagcacatctatgttcactgccactctgaaaaagggaattatttctcagtctttcaaggcttgagactaatataggccattgtgattcaggaagaaacccaaggttggagggtgggatgagtaccctctgaaaaagggaatttgctggtgaaaagaggctggatcttgtggaagactgtcttggatggggaagtactacctggagatttcaaattcacttggcctgcaaacaacagagttatccgtatcttccacatgtgaatgtcattgcaagggtgactctagacaaactacaaaccgatggaccgtcaagctccccaggagccccttggatggcagcgttgcttcagagtgtttcctgtttctggaattccttgttagggaactttaaagaagaaaagaaaaacttgaattgtgttgaattactgtatcttttacttttttttttttgaaaagataaacttgtaaatagagtgatttgaaatactatatggcaaagttttatatttgatattctttaagttagttgctcacacacttaggctttgattgctgaagaagtatgtttaagagggagagaggggaggcaaagctgaagagagtcaaggtcactgtccccgcttcggcctgaaggaaagagaagacatttctatggccttgctctctgctgtcctgttggtgggcacgacacatcagtggtgttcagtctttatgtgtttttaagcatcccttgggctttggatttggagatgggaagagcatctccaggcaatgagtttttcaaagaatgcctacttagtagtaagatgaagctcaggatttaaataagtggggtcaggcattcgagtttttgtctttcttctcaggtgtatttcttggtacccccaagatatcaggccagaaagagatgagtcagttgctgtgctctttacttctttttctccacatcttctgaggctttagaaatgtggacaagctagttttcaaattttgtgtgcgtctgtaagttcttaaagaaccagcttcttagaatgttcagttctcaatgtgctgctgctttcccttctc

SEQ ID NO: 118091 - DNA, 1044 bp, Homo sapiens
tatacagcacatatttacatctatgaagacatagacacttacagagacccacatgagctggcactttctgagcctttacagcctttaagactcggaggttgagaattagagacacaagagaggctgtggatggcctattaaaatgattaaagatgtaaattcagtgccattttaaaactgttcatatttatcaaacaattactgtctacagctacattttttgttaacttacttaaagtcatgtcgcaagaaagatcaaacccatgaatgcttagtagctaaggctagtgttcaaaagcactctaaaagacattttgtccacattttggaaaagaaaatatttgcatgtttaattcataatttaggctatctttgagtatactgtaaagtgctgtgtgatataatatcaataaagtacttattaaatggcactttaatgttttcttttaaaataacgcactgttctaaacttcagtattgactattgactcgtgcatagaatccaatgctgtaattagaaagtaatctgtgactagaatagacctttgtccctgttagtagccctgttgccatgttcaggcttttaaaaaatgcttttgtgtcaccaaatatatctataaagaaaacaaaatttctgttcagaggcctctgaaacttggctttcttacatgtggttggtttatgtgacaatccctatgaaatgagtggacgtatgatttttgaattaaatgacttttccatttggtggtattttcttgagtttctgatagagtttgactcaatacatgctttaatatgtcttcaaataagcatatatacatgatgatcaaaggtcacaagtctcggctcctgcggtttttggtgacaaccaccgtgcttatttctgatgagctctgagaagctttgctttccatttaggaagaggtcagatgctaggaaacttgagaatttgctcctcaggcatattaaacaattgagcccgaagagtcatagtccacttcacatttctaacgttcttctcttagaatacatattgttttattc

SEQ ID NO: 118092 - DNA, 1352 bp, Homo sapiens
ctaatgtgtgccatagagtttaacacaagtcctgtgaatttcttcactgttgaaaattattttaaacaaaatagaagctgtagtagccctttctgtgtgcaccttaccaactttctgtaaactcaaaacttaacatatttactaagccacaagaaatttgatttctattcaaggtggccaaattatttgtgtaatagaaaactgaaaatctaatattaaaaatatggaacttctaatatatttttatatttagttatagtttcagatatatatcatattggtattcactaatctgggaagggaagggctactgcagctttacatgcaatttattaaaatgattgtaaaatagcttgtatagtgtaaaataagaatgatttttagatgagattgttttatcatgacatgttatatattttttgtaggggtcaaagaaatgctgatggataacctatatgatttatagtttgtacatgcattcatacaggcagcgatggtctcagaaaccaaacagtttgctctaggggaagagggagatggagactggtcctgtgtgcagtgaaggttgctgaggctctgacccagtgagattacagaggaagttatcctctgcctcccattctgaccacccttctcattccaacagtgagtctgtcagcgcaggtttagtttactcaatctccccttgcactaaagtatgtaaagtatgtaaacaggagacaggaaggtggtgcttacatccttaaaggcaccatctaatagcgggttactttcacatacagccctcccccagcagttgaatgacaacagaagcttcagaagtttggcaatagtttgcatagaggtaccagcaatatgtaaatagtgcagaatctcataggttgccaataatacactaattcctttctatcctacaacaagagtttatttccaaataaaatgaggacatgtttttgttttctttgaatgctttttgaatgttatttgttattttcagtattttggagaaattatttaataaaaaaacaatcatttgctttttgaatgctctctaaaagggaatgtaatattttaagatggtgtgtaacccggctggataaatttttggtgcctaagaaaactgcttgaatattcttatcaatgacagtgttaagtttcaaaaagagcttctaaaacgtagattatcattcctttatagaatgttatgtggttaaaaccagaaagcacatctcacacattaatctgattttcatcccaacaatcttggcgctcaaaaaatagaactcaatgagaaaaagaagattatgtgcacttcgttgtcaataataagtcaactgatgctcatcgacaac

SEQ ID NO: 118093 - DNA, 1028 bp, Homo sapiens
gtttatttctaagttccatcttttttagagaaaaggcaaattaagaaaagtttagagagaggtactagtatatttatgaacttgtatagatgataagcaaaacggactttaatatgtagaattccagaatcaacaggttgccagcatccatgtttttgaagatttgcttaagaacacaaccaaaaatggaatgggcagtctctaattacaagcagaaggctacaaaatcattttagctgcataatacagttttggttctaaagtcagcacgtaagaggaaaattccttaggaaaatacaacattgaaaaccattgtgtcatgtaatatgaaatgcaataattaatttttcctccagtaatagaaagatcactgtttcattggtttataaaaatatatctttatcattaaatgtggcaaaatgttaagacttggtgaatattggtgaaaagtatatatccattgtacaattctttccaattttttttgagattgaaaatttttaaaacaacaaattatcttttaaacagctaataatcactagacctgcactctttgtggtgagactatgaaaaatgttagagacctagtaagagaagcagattcacatttctgtcttcttcttcaagccaaacagtcatagagtggagtgggcagaatggaactcacttttgaaagcctagtgctttgtccaatcttactgcaagccagacaggaaggttatagaaaatgtttctggatcagtcttctctgagtcatatgaaattgtggtttcagccaagatgacattaggaattagagacatgggacaaaaactttaagattgtaaaaaaattttgactctagtaggaaacatgggtagaattgtaatgacacttgattgaattttaaaagatgcctgtataagatcttaaaattaggaaaaaaattatggcctaagcaattaaaggcataggaggcatctttttgggatgatggaaatatcctctctcctgattgtgatagtagttacatgaatattcatttaaca

SEQ ID NO: 118094 - DNA, 1084 bp, Homo sapiens
atccttcccagtttactgatgaggaaactcaggggtcaaagtagtagatacctacccaaggtaacagaagctgtgaagtggtacagctgggatctaaaatatgtcagcttcaccgtagataggctccctgatgaaccacctgccacggcccgtatgaccgcatccaggggtgatgatgtcattttcacagggttattgagagctaaaactacgaagtactacaaactattatttaaaatataaatacatactatatatgcatatgtgtgtatatataattaatggggtaaacattacagaatactgtcctaacctttaaacaatgcactcgttttctgtaaactaatatacaaacaactgtttggtccctaaaaatagatgtcaggtgacagagactggctgagcaagaataggagtatcttcagaatagaagccagaggagtttttgcttccccaacacattgtcgcaccattcactgttccaggaccttcctacttctctggaaaactctggcccaaagcagctcctctacattagtcacaagtttccattaatcaggggtggcctgtgccggacctacagcagagtcatttcaggttattctgttacaggctttcgacgtgtagtcagtccactcgcccaaatctagcagggaatgaatgccttgtaatacggaagcatctacaaattcttcttaacagtgttcagagaacaatgtgaaaccctggggccttttcccagaattagggtggtgggaatgctgtcctattgactaagcctgttaggtaagcaggcagttggcaagattcaggaagcttcatttgaagatagaatttagggcgatcgtttggatttactggcttaattacttaaggtaacatttataaaagaaattgtcattccattattattaccttttaacttttattcctaaacggaacattagcaacaaactacattacttgataaatgtaatttctaaccagattgataactagaaaaaaattttaagttactttgctctgtgaattagtttaaacatatttgtaattgagacttactactgttattggctgaaataaa

SEQ ID NO: 118095 - DNA, 1997 bp, Homo sapiens
ttcctttaaattgtttcagtggatatgtagggacctgagtgtgaagtgagagcagcagcatcaaaacctgagggaaatccagatagcaaaagaaacttgtctagtatactggcatgacagagaaaccaaaaagttctcaagttaatgtgagaatctaagaattaaagaattaagcctttgcctttgagggaaggaaaggggtaatgtggctttaaatcaggttgagattggttctgagggttccttttccttcctttatattgatatgaatatagacacaactgttctgcatttccatttgtttttataaatgtctttttaggatttaggaactgctaattatgcaatatgagatatctgttagtttgaggaacatttgaaaatttggtcaaatgacacagatcgtcacacagttttaagacaaatgtttttacctatttgacctagtctggcaatccctatttgggcaaaaatcttcatttgcaggtcatgattggaggcaggcacagaaaaaaaattgccaccttttttgcattatgtcatcaagacatcaaacttcagcctacaaagtagaaagtgttatttctcaagttgaaggcctggatatacctcagcttctcagttctgacactttatcatagtggaaaatgaagaagattgcttaagaacactgatgttggtgtcagaaagacctgggtttgaaccctgactttactagttacttagatcactttaggcaactcaacttttctaaatcttgtttcttcatctgtaaatgctgaaaatagtacccacctcttaggtctgtggagaggattaaatgagataatctatacaaagaaagagcttgcataatagtgccaagtaatggtgaggttatacctgtattctgattataatctcataaatatttaccatgttagctgtctcagagttcttttgcaaaacagataaagatagaaagtataaataagaaaaataagtgaacatatactgaactttgtacaagatgctggcgatatggagagacccaagacatgggccctacctaaaagagattattgatagaaacaggatacatatacatcaaaaggtaacataggatcatctgtgcaaagtgctatatggcagtgttttaggaagtctagaagctgtcatggatcaggaataccatggtggacacttcaggcagggaaaacagatcttagcaaaagctactcctatcataggtacttgataaatatttgtagaatccaggatccctgtagtgataaagaaactacatggattatgtaggggagtgataagacatatgactggaaaaataaaaagaccaaattatggaccatactgagcttgtactataaacagtggaggagcccttcagatttttaatcatgttgagaaaagagttttagcagtgtgtgggggatagaatggaaagagaagccagtgccagaaggactacttagtatcaaccattgcagtggttaaagcaagaggtgagagaaggcatgcattagaatggcagcggtcagagtggatgggaaggaataggtcctgacatagtgttacagggagtaataaataggatgtggaagatgggttagaattggcaaaatctctgcatgtaagtctgggttactaaatatagtgagagaaattcaaatctctctttaagaatcgaataaaatatttagaaataagttactgttgtatttgaggtgaacacaaatggcatttcaaagatgctcgagataccttgttggaaaaagtcaataactgcactattgtctccaacatgttcttgccttctctgaagacatcatgttcctaattctgaattatgaaccatctattatccttgtatgctcttatgtgtgaggaaccataaggtgggaacaaaatccggtcttcattctagaaataactatgcgatcaaaaagtttttagtctttcttcttaccatactggttcttggtattctgtttaccatt

SEQ ID NO: 118096 - DNA, 1090 bp, Homo sapiens
gaaatagaatattgccaataccttggaggcctccagtatgaccatataagtttacaaatcctattttgttcctcctccccagaggtaaccactgccctgacaaatgtgatcgttgttttcttgtttttcttactacctatataaacatccttaaacaatataactcagtttgtatattttgaattccatgttaatagaatatcatatgtatatgaattttatgtgaatagaatattatatatgtcattttgcatcttgcttttttcattcaacattgtaggattcattcatgttgtagtgtacagctgtcgtttattcattgctgtatagaattatatcctcagagataagatatatggatgtttataaatcattccactattatgaacatttgactagtttgtagtttttatttaaccaaaaaaatgctgctgccaacattcttacacattttactgtatatgcacattaatttatttacaagtataaatttctttttgaatacatatctattgatggagttgctacatcataggacattcttgtctttgactttactggataataccaaactgtcttccaaaatgattacatccttaaactcaggacacatcttattgtcaaatgtttaatttttgtcagtctgatgggtatgtaagttattttattgtcgttttaatttgcatttccctgattactaattaagctgagtaacttttcatatgtttattggccatttggagttcctgtattgtaaagtataagtttttttgtccatttttctagttttctgtccttttagttgaaatccaaatttgcctaaatctgttattctctgagcacaagtaacttgggatgctttcctttagatttagcctaattctttatcattttgtcagcttgatggtgcttttaaggagatatatatgtgtgtgtgcgcacacatgtgcgtgtgtgtatatatatatatgtatatgtatgtatgtattttttgagacagggtctcactctgtcacccaggctggagtgcagcggcacagtcttggctcactgcagcctccacctcctgggttcaagcttttccctgtct

SEQ ID NO: 118097 - DNA, 1056 bp, Homo sapiens
actaattattaagtatttcataaggtcttttagggcttataagatcttttaggaatggcctggaagttattagtactgtttcattgaatctgaatacctttaacatgataatgagaagtttttaaagggtggttttatagttaaacggaatttctcaaattggcttgctccttatgttgatttatttaggatcacatttgggagtttctctgccctactttcaatgtatttaatttactgaccatcactatttggggggaaaatgttatatgatatttagaaaccaagagttttggagtttttcccccattagatgtatttatttatttatttattattttttaaagacagggtcttgctctgtcacccaggctggagcacagtggcatgatcctagctcactgtattcttgaactcctgggctcagactgtcctcccacctcagcccaagtggctaagtatcaagtaagaatcacctggcaaattccaaggctgtataccagatttcctaaattagaattttggggttgggtatctgaattttagtaaagccctccaaatgtttctggtattgcttctaagaacaattgataacataatagctgtggccattataggggtattctgtcatatttagatataagcataccttgttttattgtacttcccaaatattgcgtgtttattttgttttgtttcacttacaaattgaaggtttgtggcaaccctatattaagcgagtctgtcagtgccatttttccaacagcttgtgctcattttgtgtctctgtgtcacattttggtaattctctcaatatatcaaactttttcatcatttttgtatctgttacgaccagtgatcagtgatctttgattttttctttttttttttttttttgagacggacttttgctctgtcacccaggctggagtgcagtggttcaatcttggctcacagcaacctctgcctcccaggttcaagcaatcctcctgcctcagcctccccagtagccgggcctacaggcgtgtgccaccacgcctggctaatttttgtatt

SEQ ID NO: 118098 - DNA, 1052 bp, Homo sapiens
ggcaattcagatatgtcaaagagaagctgtaaattgcttcccttaagtgaaagatgaaaattctagacttatatataaagaaaagaaatcatatgctgagactgctaagatctatgataagaatgaatcttttatacatgaaattgtgaagaatgaaaaagaaatgcgtgctggttttgctgtcatatctcagactgcaaaagtttgcagccaatgtgtatgataagtgcttagttaaaaggaaaaaggcatttaaggtaagtatatatagtgtttggtactacctgtgatttcaggcatccattgggggtctcctgagtataaggggagactactcttttagtgttaaatgaacactaaggaacagagatggggaagaggttggagaagattagttcagcagtttgagtataggtaaacagttgtttgagaaagaagaaaaatgtgattagtattttaccttagcaatagtggcatagataatgataaattatagtcacacagaactcttagtatttacagaacgttcacatttgtgatcccatttaacaataactctgaaagaaaggtatcatctaccactgctttattgataaagatataaaaggtaagagagatgaaacatattggccaatgatacccatctggtaagagacagggatggggtgggaccccaaggctcttctcgccaagcccacggtttttttgctttatacttttttgcctcctgatcaccatggctgcagtttctactgtggacaatgtctgtcagcaagcattgatcccctgccttcagcactcttacgtcttagcaaggactggaaagaaaaagccaggagtttacagtctgctggagcaacagaaaagaatgatatgaaatatgaagagaccaaaatgatttataataaggtgctagactatgtagtaaaaatctgctttagctgtaagtcaaaagcaagagcagtcttttcagaatggaatagaaatgttggaattaaaggaattttcaaagttgtgaatttttttcaagataaacatgttttattttggta

SEQ ID NO: 118099 - DNA, 1540 bp, Homo sapiens
tttagaattgtactaaaagcaaactgttttcttggatatttgttctttctccccaaaagatgatttataagttttcagagctaagaaatgggaaggaagagccatcctagcatggcaggtaatgttttactgctaacaggttttctctgcactgctttatttgccttgaacctcttactttgttctgtcagctgggaggctggtagattttctattaggtagcaaatgcttctcatcactaaacacatatcatgggctggtgttagtgcagtctgtggatgggcactacatttttaatcaagaaatgtttttaaaggaaagacaaattggtgaagtaatttctaattcagtattttagggatgagtgaccttttaattgataatgatatttaacagagctgtacagtgctttgggggtcccacagacatgtttaaacaagaaaacagtaaataaggaagccagaaggaaaagttataaaactattaagaaagaaaatgaaaattctaaacttcaattctggtgcctggctaaatttgatttttgtatgcctcagtgtttctctatggacactgggaaatcaataagcaacctagctacgttattatgttcgtaagtggaagaactaaagaactacaaagacatgttctaggccaagaattctggtggtaggtagagtgggaggttaactagatgatctccaaggtccttctaattgcacttggcagcagcaagcatttatcaagctagacactgggcatatggagatgaagaagatgaatatccccagcagcatggagagcactctgatgatagtcatccctgcctccccctccctcagtttgctttttgaaatgtgagcttgaaagatctcaaactccttcctgggaagacataactgaaacttcatggaggaaagtgcatgaatgaatgggaaacaagatttgattcaactatttggaataagaaaaggggcaacaaggagtctgaaacaaatgaaagaaaagatggaaagaattagttgactagatgaggactgagtacataggaatgagccaacaggagacttcagcaactaatggatgaaagtattatgtgcatgcatgttgtcatcaaatatcacatgatacaagacaaggagaaaacatgactttcaccataacctcagtttgtgtaccctagttgcaagatatttttttcttctagtcacttaagaatatccttattgtctaggagaaataatcctctttctgggctccccagtgtataagcccaaatctgaggaaaatttacctgaaatgttctttccccagatacccacatggtttactctctcatttaaatgtcagctctgtaaaagagatctctgactgctctatctgaaatagtagaatctttcacagtctttccttcttcttgacatcatctatttgtgtcttatctgctcacctgctacaatgtaagctccatgagagcagtgatactgtctgccttgcttactcctgtatgccagcgtctagaatagtgtctagcacatagtaa

SEQ ID NO: 118100 - DNA, 2167 bp, Homo sapiens
atttaaatattaattacatcccaatagagctgcatgcttaaacatgctttttcagagtaacccaagtattaatttcgagtgcttttaaatattttttctttttagcaagtttcaacaacattaatcctgtctataatgcagcaagttcagtgaaagtacctgttgttttataatttttttttcattctcactgtagggcaccaaaaatatatataaggggaaaaaagttttaatgatatgattagttgtaaatgtttacgcattatcttaccttgaatttttatttttgtaactaataatttgagagttcaataagtatgcagtgtttaagacatagtttgttgcaaaaagtgttaacttactatttctttttacaataaaattagcctttattctagttgatttcataactgtccataatatttagctgtggctattatgaaagtatatttgatagccaaattttgaaagctattatgaaatgatacaattcactacatgatttattatttcatgctggttggggcagtgctgtgacttatgaccttatgattgtcacatgctgaacactaaagctctaccagtttgttatggacactgttttactttatgttatcgttttaatgttttcttttataattattgaggataagagcttccttaattttaagactatttaaattgcagattttgcttttttatttttttaaccatcccttccaaagaatttgatttagatattcagtagtagaaacagaagaaaaatactcaactaaaagtccaaagacctagtttctaatgctaagggagacagtccatggcctccaactaggtactttggagtcaaaaatactttctttacaactgtgtttgaattgttttcaaaacacctgtgtgtgtgtttctaaaattccacaatccttttaacccgtcaatttgatgagggaagtaattagggtagggaatggtataacaaagttggttctttgacattttctttatagattatcgaatgtaagacaaatagatgtgaatgcagatttggtgtttttataagataaggatttaaaataatgtagttggtgatatataaaaataaactattgctgctgttagcacccgagaggtggggctcttgggttctcagagcttgttttctatgttcgttacagttattttagattagaacttaaaagaacttgagagtttccctaattctaccccctaattttttcgaatgagaaattgagatccatagaaagtgttgaggtaaagatcacaaaacacttaatgagcggtgttgccagtttgaatatctcaattcttagttatctaagttccctggtaggcttctttaattatctgggtctcttctagacatctggaacaaatagttgattgacataatacagactagccacatattttataagagttacttttgactcatttagatttttaaaatatacagtgtctgtattcttctctattcattttgttaatttttttttacctaataatgattaagcaccaattatgtgacagcactatgctaagcactttgcatgcattcatctcatttaaatctcaactctgtgaaagtttttattctagttactgtattaagtctcaattctgtcaatatccatgaagcacagaaggcagctgttatttaccttaattttacagatgtgaaaactaaaggcatttaaagagaaaaagaaaaaaaaaaccaggaaaccttaacacttatctgaagggaaatatttaatattgggtatgttagttcctcatgtatctttaataatttttgtcaacagcgaatctttaaataaaatataaaggatcaggcctctgctctcctgcatatatttgtaaagtcacttactgctttttgtcacagtttcaatttctgtaaaatagtgagagggtttttacctgacaggatttgtgcatgtacgtttactttgaaaattaaaaagcattaggccaggcgcggtggctcacgcctgtaatcccagcactttgggaggccgaggcgggcagatcatgaggtcaggagattgagaccatcctggctaacacggtgaaaccctgtctctactaaaaatacagaaaattagccgggcatggtggctggtgcctgtagtcccagctactcgggagc

SEQ ID NO: 118101 - DNA, 5249 bp, Homo sapiens
acgaatgagagtccttggagatcagacctgttgatagatgaaaactgtttgctttctcctctggcgggagaagacgattcattccttttggaaggaaactcgaatgaggactgcaagcctctcattttaccggacactaaacccaaaattaaggataatggagatctggttttgtcaagccccagtaatgtaacactgccccaagtgaaaacagaaaaagaagatttcatcgaactctgcacccctggggtaattaagcaagagaaactgggcacagtttactgtcaggcaagctttcctggagcaaatataattggtaataaaatgtctgccatttctgttcatggtgtgagtacctctggaggacagatgtaccactatgacatgaatacagcatccctttctcaacagcaggatcagaagcctatttttaatgtcattccaccaattcccgttggttccgaaaattggaataggtgccaaggatctggagatgacaacttgacttctctggggactctgaacttccctggtcgaacagttttttctaatggctattcaaggtaagatcagtgtttttctgtttcttaagaatggtacatttaaggtagattaatagatgtaaatcttcattgatttatatgtgttctctaaagattcatgtgcttttttatatgaataagtttaagtggccttttgaaagtaggaaaggtagacaacctaagtgacatctgtacgtaaccatttcaggttttttccttaaatagtggttttcagtatcccattggccaacggtgaggattttatttaacatttttaaaataatgttgctcattaacagatatcttaacgaaaaattatataaattcaggagagtataatgtctcataatatcatattgtgttgtgcatggtcattcagctgttttagaatatgttcttatattacaataaatgatacccttacttacatagtcaaaagttgtgctgccttatttgtaaattcgttaagtgttagcttgagattaaagagttaaaagcagaagtactaacaaagagccctattcttcaaactgaatcttctgttaaagaatttgagttttgaagttgctaaagcaatgcagtgaacagtgtaccagaccatagtattagacacaggtcttgctcacagggttcttgccataaagtagacaagttatgtctgctgatcaatctctttaagagaggaattggtgtcaacatggtgcaaaacaaaattttacgttcaaatgttcctgcaagttctcaagtagataactgatggccaaaattgttaagcttcaattttcagctttcgtttgatttttctcttttttttactcagtcgtttataagcatactgatatttttgtctgacccaaaaaggtcagaaaatggaattatcagaaaaaagttctaaatgtagatatacgtgttggtaggggtgaatttctctaccccgtaacctcatccccaattcagataaatgctaggttttatatccattttagttgtgaaggaaaatataaaaatgtggattgtagtgacacaagattgattaatcagcgggtttttttaaaagaagacatggtagacagtgatttatttgtatgtaactattgaagttttttcttaaatgttagtgatattcatcgttcccattaactagttattcagatttttgaaaatcctttttctgtgaaagctatcctaacctggaggatgtctcttttctttcctctgtacttaagaagcttttcttgttagggaaataatttagaattagatttaggctatgttctgttcttctaaaaggcttagttgtcaaaaaaaaaaaaaaaaaaaccaaaaaaccttggttcttacatgtcttaatgtgaactacctcctaatctattgtttaaataattatcctttatttagaagaacactacttcaacctgagttgaaggtttaaaatcttttcagtaaggagatttgagatctttattattgcataagctgttgtgttttaaatgctaaaagacatgctgtgttttaaaattttcaattgcaaatttttggcaatagaattcgcatacttggttttcttaaaagagttaagtacggttgatttgactaagctatctgtaggaaactcttaaattgatttataaaacatgtaattatacaaagaaaaataaaacatcttaggaaactcttggggattattaatggattttgccctgataatcatcatggcatggttttcattttccttactataaagaaaaggcaagggacaaaacttattttccatttgctatgaacttttaaaccctataaaatctgggatatagagtataagtagatgaacatagttactcttaaatcactaaaggtgattttaatgctttaacttttatagtacttcatgacataaagtatctttacgtatttttaatttgggtcccataaccttatggaggtagtaggcaaggcaatgatgatgcggctctttagaagttctttaatatcaaatgaaattattatttttatgccaatctgtgattgggaaatataatcagtagtctgtgtcctaacaagaaggtataatactttatacagggtattttgttaatatttgaagattttataccttatggcattaacttagcactgggaactatgattacccaaaacaaagcttcatccaaataaattgaaacagtgtttcttttaaaccatcattgaattagtctattgtttccaaacaacagccctgatatagctaaaattagttgctttctcttctctatatgttacatgactgtagccaaacatttgctatgaccagtgaccctgagtgatcagcaaataatcaacacattgagaccacaacttgaatactgaccttctgactttacgaagaaaaatattaaatgccactaataacttgaattccttttaaattaaaaaaagttataaattgcaatttgactttttaaaatgccacctaaaattgtttttatcagaatacttaaaaaaaaatcctcactttattctctgggggtgggaagaggcaattccttccttccaccacaacattgaattatcacataaaattgtaaaattatgaatattatgattgagcttagtaaagcattttctaagttcatttatagtaaaacaagagaaaccttattctcaaaatctattctttaagtaaaacaaactagtcattctaacttaatatgcttttaaaaatactgaagttcagtacatttagcataaacttattgacgaaggcacatttctgcattatttgattttcagccttgtttcatttaagcattaatgacagaggtagagaacagaaatggttttaggtggtattagagcttttattgggattatgttgaaattttagtgttaaaaaattgttcgtatcctgaagggagggattattggagagaatgaatgatgtaggatgaacttgtaaattcagttttcggcagagtctaaaattaagtgatgattggcacttaatgaagctactaaaatttatgtagattttaatgtctcattagtaatcgcatctgtatctggttttataaaagtaatgaaattgaagacctgtacaaatacagaatgaatgaagcaaattctgctaacatcatgttgaatgttttctcagaaaaagaggaaatacgaagagaagagatttgttttgactgtgatttaccctcacccccatggatactttctttacttcctaccttttttctttttcttttccttctaaagattctggcaatgggtgtttcagtgttttttaagcttaatatttctggtactcatttatgtaaagtgatttctgaatgttaaaggagatttctttttaaatatattttcacttatttttagctttatgatgagaatcttattttttaaatctgtaacttgttatggctacatgattagtaaaaaaagtttttaaaacacactgtgtattcaggtgtgtcattttagtgtgaaatgactaatgcagaaatatgtgactagcatgtggtcagattttattgaaattacttacgatgtttctatggctagtccccttgtatttttataattggtaacataattcatatgttattttggtcttgtctatttgtgttacatgtattttagtctgaccacttttgctacttatttaatgtttatacattttatgaaagacttattctgaaatataccttgcataaatgtaggttaaatgcaaattgtattaatagtgaaatggatatgtgggtagagatcactttaggggccttttgagatttagtgaaggaaagattggatcaaaagggtttactttaatgtgactgcctaatgtgaaagtcggaacatctgcattaattggttagttacataaatcttagtctactctggcctgcaggtgactgaaacagcccaggaaatcttaatttacattaagcttagacaaggtctgaggcttaggcttagttcttaaagcacattcttttttactttaatgattattcctaattttaatgagcagtgggttctcattgtgtactagtacttaggtgggcaaattaaataagcaaaataggtttgtgctgaatagcatttacccttctgaggacatcctggtaatattttcatcaagagtaattgtgtaatgcaatatttacaggtatttgccagattaatgggcacttgttttcatatttctgagtcatggaaaatatacattgatgattcctgttgcataaagagttttcaagaaaattttgttgaattaagctataactacaaaaaaaaatccattacatattgacctttagaaaggatttttaaaagcccatgctgtccttatttctgcagcttcagagagccgactgctcttattttcttctggcatattctattaatacttgggttttgtatttttcaagtaaataaaatattcctattgagaatttcaattttaaaaaagaaaaggtctactaagtgttcctttccctgttgaattatgtgtgatcatttctatgctaaactagattagggtgtgacttgtgatggtgatttttgttcattttacatattaagaaagaaatagaattttattgcagttcaaaattatttgtagacagtggttttaacccccagacacctaattgtgacaggttgctttccttagtgctcaatactgttgtaaatgtctct

SEQ ID NO: 118102 - DNA, 1003 bp, Homo sapiens
tatcggaagcagtgtgccagtaacaaggtttcaaggttgttggaaacgccttaaggaagaattgctttatgtgctttaatgaatacataagaatgatgtcattaccctgccaagcatacagtgtttgtttttatacagtctgaataaaacctagcctccccactctctacaatctaggctatcattactttgcacccctaatgaagaaagaattaactttttaaaaaattaactctgcttctccaccatccaaattattgaagtttgaattgtagtacattactaatacttgaatttcagtaagttaatttgttcattaataattaaatatccattttgtaactgggcaataggtaaaatgaaacattaaatatttaaattgtcaatttctatggattggtagagtacttaaacttatgttattattaacaaatatgtatcttaggatggtgaccatcaaaaccaaagaatgcagtttgatagtatgcagttctgattttgcatcacaggtggaaatatttctgctgcccttgagcacaaagttcctactctggttaatgaagaacattatctgctgatggagcacaatgtcctgtgtttgtgtaaataaattaaaatgattacatactcaaatgaggactaattaaatagagagctgttctaatttaaaagcacaaatactttcttgagcacattaggttccaaaaatcggatattacatttttttgtgagcttaactaattaggcttaccttgcatgtatgaatttggtttatttctgcaactagcactaaatctgctgattgcttgcagagtgattaattatgcattaaggtgttttcaatagcttatcagcacttgtggcacacacatgaataaagaaaaaaatgagaaaacaaataagtactcagcagaaacatttaacatgcttgtaaattatacttttaatctagttggatgacttttattttcctacaaacagaaaaaatagttattttctattt

SEQ ID NO: 118103 - DNA, 1256 bp, Homo sapiens
gtctgatggggggcaagggtgctacttatatcttatgtacagaggccagggatgctgctgaacattctgacagtgcacaggacagcccccacaacaaagatagcatccagcccaaatgtcagtagtgccaagaatgagagaccttatatttttaaaaagtaaaacatagttctaaaaaagctgtttatcccatgaaatgattcaccatcattgaatttactgtgaggtacattttagcatttgaaaaaaaaaatcctgattatttttgcatatgtctacttgcagatttaaaatgtaaatttaaaatgctttagaataggttattgtagtattcttacataactaatctcatctgcttttttttcttctcccccctttttccttgttgtttacagaggaatggtaggaatcattctcactgctgggattattggatggtgtagtttttctgcttccaaaatatttatttctgcattagccatggaaggacagcaacttttagtagcatatccttgcgctttgttatatggagtctttgccctgatttccgtcttttgaaaatttatctgggatgtggacatcagtgggccagatgtacaaaaaggaccttgaactcttaaattggaccagcaaactgctgcagcgcaactctcatgcagatttacatttgactgttggagcaatgaaagtaaacgtgtatctcttgttcatttttatagaacttttgcatactatattggatttacctgcggtgtgactagctttaaatgtttgtgtttatacagataagaaatgctatttctttctggttcctgcagccattgaaaaacctttttccttgcaaattataatgtttttgatagatttttatcaactgtgggaaaccaaacacaaagctgataacctttcttaaaaacgacccagtcacagtaaagaagacacaagacggccgggcgtggtagctcacgcctgtaatcccagcactttgggaggccgaggcgggcggatcacaagggcaggagatcgagaccatcctggttaacacggtgaaaccccgactctactaaaactacaaaaaaaattagctgggcgtggtggcgggcgcctgtagtcccagctactcaggaggctgaggcaggagaagtgtgaacccaggaggcggagcttgcagtgagccgagatcacaccactgcactccatccagcctgggtgacagggtgagactctgtctcaaaaaaaaaaaaaaaaggagacac

SEQ ID NO: 118104 - DNA, 1023 bp, Homo sapiens
aaaaatagacacaatttttacattttcatttgttgacctcctaacctttaacagtttgtaaaatgcttagtgctatgtaagtgaatattggtatcattaagaatattttctataaaaattatgatttttttattgtagataataagcttgatcttagtgatcatttcaaccatgatttataaaaattggcaaagtttgtacctgaggaatttcacaactaaggttctttagctgtcacatgaaaatttaggaatttaagggatattaactgtacagagttgaaatacctctgaaaaatttaactttctttcatttatagacagtatgctggctatgactattcgcagcaaggcagatttgtccctccagacatgatgcagccacaacagccatacaccgggcagatttaccagccaactcaggcatatactccagcttcacctcagcctttctatggaaacaactttgaggatgagccacctttattagaaggtaagatttgttgcaacacttgatagtactcaatagtattcagctggttagtgaaaattaatcttaatttggagaaattgtcttttcctttaaaaaaaataatctgtagaaaaaagttttctgctaaacaactcattttaaacagagtatatgcgaaaccacattgggccagaggggaccagatttttaatagatcttttaatagtgataataaagtatgttactatgtcagcatcgacttttacttcaggttattgactaaattctgctagtgggaaaagtgagaagaaaaagtgtgctatccattattctgtgtggaaataaactggcagaactagtgacatcactaaaaaaatggtgattttcaaattgtgttccaaaacctaggaagtggtagttctgaactttttttttaactagataactctttgaaaatctaatgaaaggtatgaacactctcctcagaagaaatgcacacatatgcatagagacgtagttttgtatacagttaaatgggcccccgggtattcc

SEQ ID NO: 118105 - DNA, 1621 bp, Homo sapiens
atagggtaaccatctcattaggttgtaaagattaaataatacatacaaacactttagcacagtgcttgaatcacagtaaatgctgacaccgaggcattgtaggcattgtagtttgtggacaggagaggggactccgtctgtctcattttagcgcctcccagtcttcctccatcacctaggtctgagaaactcctcctcctacctacgagtaagcagcaattgctacgcctgcgctttcctggttccacccctaaccaggctgccggaagcactttcctctttggcacgggccagccgcaggttgggtagatactgcgcaagctccatactcgtgtctcctcctcccgcccaccggtgcccaacctgctaacacgcctgcgcgagcgggcgtgccccggaagccgttctttggccctgtgacacgtagcaacggggctggttcagggtctgaaacagagtttgggggttgtttgggattagtgaagctactgcctttgccgccagcgcagcctcagagtttggtgagtgacccaggcccgtggcacagtgttcagcttctctccacacccgtgcaaatgggcttgttgccgtctttcggcgccgcgccctggtcctttcgctcagaccctcgctctcattcaagcccttgccctgacgcggtcccctgcacctcaggcgcgaccttccagattctgcactttttcctggcaggccgcaggccttattttgcaaggaagcagtcgccttgtcagctgtaaagcccagtcctaaggtgaaaaatcatctttgttgttattgatattttagaccgcttatggaaccacaactcccacgacctcgcccctaatggaaggcatatcagctctttaaggtggagttgtcttactgggccgcaacttaaaagaatatacattttcttactctctctccgctaccgtcgttcaaatgctgcgtactttccgcccccatcccctctccgaattactgaaaaaatatttgttgtgtttctatttgcttaagcagactgccaggaacgaattcagtagaaccttgggcataaggaatatttgccatttctcttttattacagattatttgcaatgtcaggctttgaaaacttaaacacggatttctaccagacaagttacagcatcgatgatcagtcacagcagtcctatgattatggaggaagtggaggaccctatagcaagtaacttttcatctttggcaattaatttagtctacattgcagtgaaaacacatatttagaatatttggttctgcctaaaacaatatgtgaacatgtcctttatcaggagtatgatctttcatgcataatcttcttcctctagagagatatgtgacactggcttggcttcgaaggtattgttctatttaagagttgagtgtcttctgcaaactcttcaggtgtaccatgaatggaaaagtagcttgtttgaagaactgttttctagtaacagtatttctgtatttagaagatgatgggagcttcaggtacctaggagataggctgttagttcataggaccagtgaaaaattaaagtattttgttagtagttaaatcagtccaactctgagacttttatcagtgctaattgaa

SEQ ID NO: 118106 - DNA, 1103 bp, Homo sapiens
cccgcatccagtattttcccctttggatctatcctccttgctgcaaatatgatgagatttctaaggagtgactgaccatgtcactcctttgcttaaagttcataattgtcttacaactgctcttgtattcaaatacaaactctttaacatgaaccacatccttttgtgaaatcgcttctgcttccctcctcagcctctactgttgccattctgccctctttgcatttataaccttagccataacagatcttttttagttcttggatacttttgtgtacttgcatgttcattttttgtgagtgatgttccctctgcctggaactctgcctccatctgctttggttagctaaatgttcagtttcccaatccagaagttacttcttctgggaagactttcctagtccaccatacctggattaggtaccccttatctttgcctcttaagatcctatttttctatatcacagcacatataataatgtattctacttggttatttacctgtctttccaactgtaagctttgtgaagccagaagctatatctgtcatcttcattattgtacctgattcagtgcctggaacaaatgtaggtatagtactttataaatatttctttagaatgcatttttaaaagttcttactgcaatattctgttttggtcatagatgctactgtcttgaatatactattgtattgtctcttaatagaagaactggagggcagtgatggtttgattgatgctttaaataataataataatgttattttctaactttcactgagtgctaagcattttacatactagttggatttctcactgaaaggtgctctactcttcgcacctgcgcaaagattctagctctagggaactgagaaaaacacttaccagcagcaaagactcctgtggtctccttttagttggttcatccaagcaggagtaaattgaagctggatgtgaccagggtttaaggagcaacccaggattcagaaaagtgctgcaaaattgataaatatccccaatagaaaaagagctctactagaaggcaactgtactgtgagaccgacaaggttgccttcttaattttcttactgccaaagtatt

SEQ ID NO: 118107 - DNA, 1397 bp, Homo sapiens
cacaatggaagtgattaatagatggtttcctccccctatccctcaccttgatttcaacctgtggcttttcggaacctagagtaatatatgatggatttaaaaattaagaatacaacttaaattgtatatctgatcactgtggaattagaataaccttttgtgaatatcagcctagagagtattccctttcatggtgacagaaaatggttattgagtatgtcactgacaataggatcattgaaattgctccagaaatgaaaacaagacattttgcttcacactgtgagtagctgtgttatgtggcattcaaaggaaataagattgctaatgggatgggagtctgttactgtgtgacccattcaaaaactgccccgtgtgaagaaattcatacttctctccttttattcatcagttccattccagagaagaaagttataataatttcctcagtcaaatttacagcaactttttattctgagtaaatctgatataatctgattaggagttagttgtattgatgaaaatagaaagcaactcattgaacataatttggtggcaaagttaagagactgtcagccgggcgcggtggctcacacctgtaatcccagcactttgggggactgaggtgggtggattgcctgagctcaggagtttgagaccagcctggccaacatggggaaattccatctctactaaaattacaaaaattagccgagtatggtgacgggcgcctgtagtcccagttactcgggaggctgaggcaggagaattgcttgaacccgggaggtggaggttgcagtgagccgtcatcacgccactgcaccccagcctaggccacagagggagactctgtctggaaaaaaaaaaaaaaaagaaaaagagagagagactctcaggctgtttggctgttttagacaacattgtggactgtccaggtcaacaatgagaaaatagagaaaaggacagctaagctctggtagtggtaacttttttgtaaaggggactctggagcagcacagaaattctagtaattagactaaaggaaattaggcatatggatattaaaatgtggcagaggcatggaattaaaaccaagggaattctcttgacttggagaagagtttcagagttctgaagctaccccaaacagagaatgagctggatcacgttgaaaagcacatcaagcactggtcaggcatcagtgctaattttcttatggcttaagcactcatttacatcagttaaagacattttcctatgggcatatgcctgccaaattacacagtaattcaaatggaaggtagaatccagtttttactaattttctttctagtcaactaggtgagatttttttttccttaaatagagggatatctgtgtggagttgttcaattttg

SEQ ID NO: 118108 - DNA, 1071 bp, Homo sapiens
tctcactttctcttccccaccttttgtacctgggcaagaattctagatgaattgttcttcttgtggataacttagaagaaaatctacatatgtgaataatggatttcacatctgtctatttaatacccaaggaaaaacagctgattagaatataaaaataattgaattgaatttgctcatgtcctgaactttgaaacctgatttctgtaacttatatggtttcagatcacctaaacgcaagatgtgctttaaacgtaataggaatggaaatgagattataagagccaatctggaagatgctattagatgtatcagatcaatatttcctttgattctagctccgcttcttttacacgtttgagtttcttcttcatttttccttcataaaatgtttagtaatacttttcttgctgtaggaaaagtaaaactatactaccatgggtgtgcccctctttgatttaaatgctacatcagcaagaatgtgtttggctgcaagtaagaaaaaatacagccaaaacagctttaagcaatgaaagatttattgactctaagaagaaggtctgaagtcaggatgggttcagggttggttaagcaatgcaatcaaggacaactctacaaggccggatatctctccttatagtcccaagttggctacagaggttcagacatttcatcagatatatactacatatgttgcagaagaattgtacttcagtaggtctccttttaatatggagtaaaacactttcaagatattcctaccatatcccagcgagagataggactaactagatttcctaggctaagaatccctaagcctagctgggaaggtgatcgcatccacctttcaacatggggcttgcaacttagctcacatccgaccaatcaggtagtaaagagagctcattaaaatgctaattaggcaaaaacaggaggtaaagaaatagccaattatctatcgcctgagagcacagcgggagggacaaagatcaggatataaaggcaggcattcgagccggcaacggctaccctcttttggtcccctccctttgtatgggagctctgttttca

SEQ ID NO: 118109 - DNA, 1101 bp, Homo sapiens
ttattgaatacttattctgtggcagtcactcttctaaatagttttgggatattttcttttttaaattttacgcaaaattaagtaagttttatgtaaaaattaggttttattactatccccttttaaaaatgagaagattgtggtgaagatagtttaagtgacttgcccaagagcaaatagctagaggcagtagagcttcaaacccagcttttctgaccccagagcacattcataggtgatcattataaaaagtgaagagacaggcaggtttagcactgcacagtggtcaagtgtcttcaagcttaatagtatcactttatgaatttcaaagtactctgggcaggtgtcagggagaagaaaaaaatgaaaagaaacaaaaggagaaagagaaataagtttaaaacaagaatatatgttgtcacagtaagtgtgtaataaatatttttgaatgaagtgaaatatgaaagacaaaaacaaaggaggattttatggcaggtggtagaagatggtgttcaaccatgactttgggttctatctttggtacagaagaactacagacttcaagtatgattgcttttctaggttgcagcttcactcatccctggctatatctagacttgttaacaaatttataaatcttcacccactgatttttctttctggttagaatcagcccaaatgacttttagcttcctgaatacttattatcgtacgtcaaatacagtatcaaagaaagaataacttaactgtaaaacaccctgtttttctgattctagctctgacattcaacatccttggaaaaatcagttgctctagtgtatagaatgttttcaaattgcatgagagattatgccacagttgtatgtgatgaaaacagtttttaataatttgatatggacagaatgattaaaaagcccacttggcctcttctttcctcattgttctgtctctttaaacttggatccctttgggttggctgtaagcagtggaaaagaaatgcagcctatagaatgagcagcaggatattgtggaatatggaaatcatttctatattgtacagggaaatctaattacctctatcgatcattcatccagtctttc

SEQ ID NO: 118110 - DNA, 1016 bp, Homo sapiens
agcactattcacaatagccaacatataaaaccaacctaggtgtccaccaatgaataaataaagaaaatgtattatactgtatatacacaatggagtactattagccttaataagaaagaaatcctgtcatttgcaacaacatgaagctagagggcattatgttaagtaaaccagactcataaagacaaaaactgcagtatctcacttatatgtggagtgtgaaaaagtcaaacagagagtagaatggtggttatcagaggctgtggggtggggaactggaaagatattggtcaaaggtcacaaaatttcagtgagatagtagaaataagttcaagagatgcactgtacatcagggttacttctgttaatcacaacatattgtatatagaaattgctaagacagtagattttaactattcttaacaaaaaaataagtatatgtgttcgtgcatgtgttaaatagcttgatttagctatctcacaatgtatacatctatcaaaacatcatgttgtatacatcactatatgctatttttatttgtcaattaaaaataaagaaaataaagcagaggcataatatgataatgtcctcttcttaggattgcaataatatcaatggcaaacaaactaggactgttgattctctaggcttggggactggtaccaaggataagagaagggaataagggcagacatatgaagaaaccgcaggtgataggacattgtgaggttcattcatattgaatacgaagtggggatgtactggcagagaatgataactgaatgaatactagggaataaatggtgtcagctaatactcctcccaccccaaacactggtgacacacaaactctgtctctggttctctcccctgaaactggtgctacttggaaaagagtttcattccagcttgtctgccctggaactctttgttctctggtttccgtggttgcagaatctagcaaattgaacacagttcctacagagcactgaattgtggatgttaaaatttacga

SEQ ID NO: 118111 - DNA, 1014 bp, Homo sapiens
tttattaagtatgtcatttctatgcctttgttatattcttgtgtaatttaaataagatgtttaaagtgcattaaaatcatctcacatgtgtcatcaatggcaggttaacttcattagattagccctagtcaaggcaacagaatagacttgtgtttttcaattattcaagtaaacagctaatgtaccaggcatggattgagctgaaccaacgtgttatttggcctcttctctctgcttcactgcatatagacagatggttgttttgtattaaatgactttttacaatgcattaatcttatgctaacattcgtcataggagaaaatgcaagcatccgtgaaatgggatttggcgatattaattgtggcctttctcttagatgccttggcttcagagtgaatattcatttacaactcatggagaaagggatgcatcctggaatactgacgtttggcaattgtcagatgaactttctgctttcagcatattttgtgctcaaaagtagattctttttattatgaaatgtttgaggcaggtatatgccttttacgactacccatgtcttccttctctcctgcccataaggttttcccatttttatgcctgctctttggcctaactccccacatgttcccatggatgacaagaaagatatgagagggagtctcttttcatatttaggctgtgtttacacattgggttagactttggataaagattggaggattagtaaatagatatttcacgtactagaagaagaggggcttacttgaaatgggtttagaattgtaataagatgaatttaggtgtcctataaataagctttgtgactatagggactgtgagagaacagagtgcattactgatggagggtttgggagttacttttggaggatatctttaagaatatcattataatagattaaagacaaggagttcatttgggagcttgggggcatgttccagtcctaaatatggttgttattttattttcaaaggtaacatcttcaacaagt

SEQ ID NO: 118112 - DNA, 1053 bp, Homo sapiens
ttgttcttatgtttttcatgtaagcttgttgccactcagagatattatttccagaaatgtgtaaagacaggatatgataaaacagatacgtgtattagattggcagaaaaactaagttaagagcaaggcaaataatctttaatctcttcttttctacagagctcaataactattgacttgccctctcagttgattggaaagggccctctgttgtgaactgagtgtagctagggtgtgtacttcatgccttccgaatggcagctccatcactaaagcatcccagttgcacagtaaccaattccagggaaccccaaatactttcataaagttagtagcaagaggagtttcttgagatttctaggcattgtcaaaatactgatgattggtcatttaagactggtatattttttaggtagttattgaccactctatgggtagtactgtggatagtactgtggtactatggtcacatttgttctctctttctctctctttcatttgtacagttcctactttagactctgtatatgctcatgactgtgcagtccattgtaaatactcaatacatatttactaagtgaacaaatatgtatgtctgcaatgacagggaacacatttccatctttttatattccctgaatttcttagcttaatgcactgcttataagagacgcttagttaatgcatgtaggtgaagaaaaaaagaatgaaaattggcacattccagagtgctttgatggtttatttggtaaaacaaaaaaacaaacaaaacaaaaaaaacagccattcctcaaagactcagaactaacaataacaactcaggctccatcagtctgaatgtgctaatgcacatgagagtacttggtaagctttaaagtggtattattgttgttgtaaaagacaactccaggctcacccaactaaaatagcttacatctgtagagccctttaccaattacaaagcactttttttttttgagacacaatcctcctctgttggggtacagtgcagtggctggttcatggctcactgcagcctcagtctcccaggct

SEQ ID NO: 118113 - DNA, 1142 bp, Homo sapiens
ctttatgaagacacagagctaattaatctatgtcaaattgttttttaaatacttgtcttttggtataattcaagttcactcttgcaggaattaatcactcctttgccatttgtaattgtcgacctgacaggcatttactttgattttttttgtagtataaaaagtgtttatggtgcaaaattaacattgttagacaaaatgtcaccttttgggtgaaaacactgagcatttttacctcttggtgtcaactcagactcttctgattgatgcatggagctattcctggagaaaggctccagctggtcaagtattccctttgctaatattcagaaacacacagcagggttacacatgaggcctagggggtatgtgtgtgtttgtgtgtgtgtgtgtacctccatgtacacataagcttgtagaattggctggacaaaaatacatataaacctttcctgtcccatcgactgcaactctcaaaaacattcaagtacgatcagtttaaaatctatttaccaatcaactcaataagcattaattgagcatactatgtgctcagcactgttataaatgccggcatagaaagatgaatgagaacctcaaggagtgtgtggcattgtgaaaatatgagccaggtaaatgagtatttgaaatcatgagatagtgtcacagataacgataagagcaggtaacagcatcagctgcaatcagggagggaggggattcaagcaagcatcatagaggaggactcgcttgtgataggtcttgaaggatgcattcatcaggtggccagggtggtattccagacaaaagaagaaggtggtcaaaggcacagaggcatgaaacagcatggagtattcagggtattcagtagggtgttctgtgctgctggagacaggatcctgaggtgctagagaagtagcccttcttctggtcaatcttgggctccatgaaggaacaactgaggccaaccactggctgtcttttgattaagatttttggactctgtgaaaacccaggagtcttaggtaattttttttttgagatggagtctcactctgtcgcccaggctggagtgcagtggcgtaatctcggcttactgcaagcttcgcctcccaggtttaagcaattctcctgcctcagcc

SEQ ID NO: 118114 - DNA, 1151 bp, Homo sapiens
cattaggagggagaaatgcaatttcaagaattatccgtagtgatagaattcaagtggactctgaagagttgcttcagaaaagagggcaaataagtattgattggtgagacatgtttatgaggtgataaagcctgtttgctttctcttgcaggagagctgtatccatgtctacttatttatttatttattttttttttgagaatcacttcttggccacagcacatcacagacacagtttctggaatacaggtttgaggatacagtgttggcagcttcaagaagagaagaccttcttgccaggacataaaatgataccctcctctgggagcctgcttcgaatagtgggactcagggagataagaccttcttgctggatttttatgacacaatctctttataattttacaaataaaggaaaaaagaaccatgtaagatatgtgtgcccttcctcagggtgttctgctggttgtctgatgatggtgtcagggcagctaaggacaggataaaggcctggagagggtgcttgtgcccttatgttatcagcaccgttgttcctaggattcgtgaggggattctggaaccaataagggagttgaactggtacctgattcacgggtggactggaacaaacaggaatgtaccagacctatgttgaagctaagccgtatttataacaatgtttaagattctcagaaatcaggagatttttatcctatccataagtaatatgtaactgccataagtatagcttttagaatgtaatatgtaaactgtgatttggtcctctggaaaaaaaaaaatgaaatgaagagtgggaaggcagtttcttttctgctaattcgttctgtgatggtgagcaagcaaatcattaacctctctgttttttattgggcaaatggggataatcaggcacaggtctttccgccaatgcgttatgatgattaaagaaggtaattttgtgcagggttttaagtcaacagacagacctgggtttgaatccaagtgctggcacctacttgctcagtgatcatgaacacaattttaaatctttctgaatctcatttaaaaaaatttgtgaaacaagatgatagaattaattttgtgagattgttggactgatttgagatcatgcctatgaagtacctagcaca

SEQ ID NO: 118115 - DNA, 1034 bp, Homo sapiens
tgttagtgactcttagaggtgatgtgaagggtgaggaaaatgtgagcaagcatgaggtgagcccctgctggtatttcctataggtcatcagcctctagctgaatgtggggaggtgcctcactgcgggagtcccattatgaggggcccctagtcagatagagtccatatataaatcagtagctactttttaggacatgggaagaatgggaggtaatggttaacaaaagtctgttgtgtgccagtagctttatatgttgcctcatttaatcttcaggagtgatcctgcagtgaagtgtacttattctcttccctctacacattttcaggcacagaaacacattcagtgaggtaagtaagcactcgttgtggaatgaggtggagaaatccagatttaaatcctaggtctgccacttgctagctacatgactttgaacaagtcatttacctctccgaggctgagttttcttacctggaaatggtgagagcagaactgtcttacctcacgggactattgagagggttaaatgagataatgtaagtaaagtgtcagcatacagtaaccccataataaattatcattagattcaatattgaggtttggtgagattggtttttgactgaaatatggctttgaaaaattctattttgttgaaaggaaacacctgacttgaagacacagtagactgaccttttatgtaaagaagatcattgacttatagaattgcatgaacctgtggggaaggagaagggtagagatacaagataaaagcagaattatctgggcagctgttagatttatttattatttgagcatcaattggattcatttattctgttaaagacaatttgttgataaaatgtacaagcatgctgctaaccactttatctcagaatagggaagaaaaaagggaaaattatgactgagcttaagtctgatgaatagtgaaaaaatggctgataaaggggaaataataggaaccttgttgcttttcacttgggcacagttgagagtacaggagttggtactgggatgg

SEQ ID NO: 118116 - DNA, 1055 bp, Homo sapiens
aatttattgagtgtttaccatgagccaagtgctacactgttgtatgaacatttagttttcccagttaccttctggaacagagactgtggttactcccacctttctgttttacagatgaggaaatagaagcacacaaaggtccaattccttgcacaaagtcatcagccagtaagtggcagagctggaatttgaatccaggtggtctgacctcagagcccatcctctcaaccgccattcactttgattccctgacaagggaggtcagagtcccagagagttcagatgaaggagacaagacaaatgcatggcttgtctctatcagcactgggtgtacatatgactttgaagtagatacttgttagactatagggaaaaatgtcctcatcttcaaaacacttaatatgagacttgctttcttagtgttcctctactctcacacccactagttcctctaatctctccaaagagatttgggagctgtgttctctccgctgtgctggatggaaattccaaccaatctattagttttctgaacctcttctctcactcttttgtgctaaattcaaagacaaagacaatgagaaaataggaatttgtggccactataaatcttcatgtacctcgtataaacctatggcaggcatagaattgaaagctgctacagctctggccaggctgcattgaaataccaaaaacaaattgtgtatttgtatgtgtgtatatagatatagtatatatatatatatagtgtatatatatagatatagtatatatatagtatatatatatagtgtgtgtgtatatatatatagtatatatagtgtatatatataagtgtatatatatagtgtgtatatatagtatatatatagtgtgtatatatatagtatatatatagtgtgtatatagatatactatatatctatatacacacacatacatatataaaaatataaatataggggctgcatctgcacattgtgtggactaagtgcctttaggaacacatctgttgtaaatcaaaaaaaggcatcattacttacaggattgggctt

SEQ ID NO: 118117 - DNA, 1331 bp, Homo sapiens
tatgctgtgcctttagaaagattgttcagtgtgaaacaaagttttgtctgtatgtttaacatagggattgtgtatgaagctttagagaaaagcttcttggcccttgattaggctttctcacttcccacaagtcacacttttctctctcagaccctaaactttctctctctagaatgaagtgatcataaaccccattttataggatttttaaaggattaagtgaggttacatatgtgaaatatgcctggcacatagtaaaacctcaatcattgtcagctttaagagacattctctgctaagaagtatatttttataggtaatagccttttaaatacaaacattttagatataccgtggtacagggcaagtttgtggtatttcttttaaaaatgatatatttttatcattttcttgaattataaaattactaaatattcattttcaatttttaattaaagtgcaagtaagataaaatcattcataattctaatactcagtgtattcacatttaacattttgacgtagatctttttatatgtctgttcatgtttgcaaatgtatgtatatgtatgtttttttaaaaaaaaaaaaaacaaagttgggattatttagcccaactatttcatttgtggacatatttataaacatttttttctgtgtcattacatattccttggaaacatgatttttgatgcctgcataatattccatcggcataatagctgttattgttggtttctatttttcttcactattatgaataatattggaataaatttttgaatataaatgccatataaatatttgtgtacatttcttgttgctttctgagctaagacctttcatgcttattgccaaattttctcccaagagaattccgcaaatttggcactggatatcatccatattctggctgtataacttgaatgaaagacttaacttcttaaaacttccatttatcattaataaattaggctaatctcacttcataaaattgttgagaagaaaacaaaattgttaggtcttgtcttctgatatctactttgaagactactgaaagttaatgattctgccattaactagttgtttgactttagtccacctccatgaattttttttcttttcttttcttttttttttttttttaagctcaccacaacctctgcctttcagattcaaacaattcttgtgcctcaacctcccaagtagctgagactacaggtgtgcaccaccatgcccggctaatttttttgtatttttagtaaagaccaggttttgccatgttggccaggctggtatcggacctgtggcctcaagtgatctgcccacct

SEQ ID NO: 118118 - DNA, 1033 bp, Homo sapiens
actctctttagtaatagtagctaacatttagtaaatgcttatgtgttaggaactcttcatattcctgtgatgtgtgataactcatttacttgccacagtagttgtaaaagaaagatactatggtcgttcccattttacatgtgaggaaaccgagttatagagagtctaaataatttacctaaggtcatatcattgataattacctcagactcaattttaaaaagagattttgcagcatgaaatgaatattctttaatttgaataagactgttaatattatataaactataagttacttttaacaaaatcttcttataataggtagttattgaattattaaggatattattttttattgattataagtggtaattatgcagctagaaatgtctgtcgtttacatatccaagcatagaatgacatcaaagatgtgttttttgttttttttgcaggacagagttcattcaaagaggcaggatttcaatcacaggggttggatttctcaactgtgttttagaaacttttgccagcacattcttacgacagggagcccagaaggtaaccatatttctgctttgaaccaacattaattttaaaaaacaataggagttccaatagggttattgaataagactcatgagcagacataatgagaaaaacatatagttaataaacaaatatatgcaaaaataatcaacctcaaaattattacataaattcaaatcaaagtaaaactaaagtggcatttatggctcattaaattaaaaatatgccaatgaagagtatgtgaaaatttggagcatacttataatctaattaaaagaaataatcagaatgaataataatgtatagtatgatgacaactatttaataaagataatgatagttaatatttattgagcacttactatgtactactgactgctaaaagaatttgtattattaactcattgaatcctcacaaacctttgcaggagctgttattgttgtcctaatattatggatgaggaaaatacagagaccccaattgtcc

SEQ ID NO: 118119 - DNA, 1065 bp, Homo sapiens
agtagcatgatttataatcctttgggtatatacccagtaatgggatggctgggtcaaatggtaattctagttctaggtccttgaggaatcaccacactgtcttccacaatggttgaactaatttgcacagatgtgagtctttttgtatttatcctagttgaagttcattgagctttctcaatttgtatgccaatttcctccctcaaatttggggaattttcagccattatttcttcaaataggcactcactctgcttctttctcactctcttctcattctgagattcccgtaatgtggataatgatctgtttgatgatgtcttataagtcccttaggctctcttgacttttctttattctttttatttgttttttggttcctgactcaataatttcaaataacctatctttaagtttgctgattcttctgcttgatcaagtttgctattgaatgagccactctagtgaattgtgttttagttccattattgtattcttcaactctggaatttctgcttggttctcatttttctcatagtttctttttgttgatagtctcattttattcttgcgctttatttttcctgatccatttagttgtctattttagttcatggagcattttaagatggttatttcaagttctttgtgaggtaattcatagatctctgtttcttcagtgttggtttctagagatttattttgtttctttgattgggccatgtttccttgtttctttgcatgcattgtgatcttttgttgaggtttgggtatataaaaaaacagccacttctcccagtcttatggactggcttcatacagggaagaccttcactagtcagcctagcttgagattctgggggcctctcaaacctttttgagggatgcatcttctctggacttgtgtgtaatttcccagtcacagaggactgcccctgttctcaagagcccatgatcttttgttacccttgttgtctgtctgaggtactgcaggctctctagtgtaacaagccaccatgcttgcttttgaaagtatattgccatttcctttagcactctgagtca

SEQ ID NO: 118120 - DNA, 1051 bp, Homo sapiens
aaatctaaggggtgaaaactgcttagacggaaggtatttatgtcagagtggatgggataactcgtgtgtgtgtgtgtgtgtgtgtgtgtgtgtgtgtaagagaaggggaggaaagggaagggggagagggagagaggaattctgaaggcttccttttattgtatgcatgatctaaatgtagaggctactgctattagtgaggtctaattaagaggttttaataaccattttgaccaaaatgacagtttgttggatccagtattttctcagattttttttgattgtttcagtgcatgtgctcacatatgcatgcatataaacacatgccaactatacatacaggagacgtggctctcatttcctttccacagagatgtaaggttgagaaaatgttttctgttttgaatattttttattacaaagaaattgaattaattcatttaacaaatgctcattgaactcattcagtgtaagcactatggtgaaaatggggaataggagattgcctaaaagcattaaggaatggcaaggagcgttttagtcagtggcgcagatgtgactattaatctataccgagtacttggtgtcctcagaagacaagccaccgttaccttcagggtaaagcctaaacttctcagcctgaggccatttgcaatcttgtcttcaattatcctttcagcctcataccctaacatctcccacacccaccttatgctccagtcattcctgtgggaagaatttatcaagccccataccatgtactgggcatttttagataacttgtggctcctcagacatctctcttccttcacgcctccttacctgggtccttgtggttttcctctgatggaatgcttcacctccaattgctgacacactcccacttgcctgtgtgccttttccactagccagtgagatcctggaggagagagaccatctccttctctgtgggcctctagcagtcagtatggcacttagcatatagtagccatgcagtcagtgtgttgaacaaatgaatgaatgaggcaaagttaagtgtaatccaaatctg

SEQ ID NO: 118121 - DNA, 1110 bp, Homo sapiens
cagggtgggacaggagtctgggaagttgggaggcttctgttccaagagctttgaatgttaaaactggggtggggaaggggttcattcccttcattgccaagtggtttatggtgattgagttccacctagaagttaatgaattacagagtcttggagttgcctcgggctggattttcacagtggttatttgacttctcagccactgtgctttttttttttttttttactttaaattggaataataatggtggttgtagtagaacagcataattattactaatgttagtactgtttactcacatttgttgggtgcttacacatagtactttgagtgctttccgcatattgccttattcaaccttgtgagaactcatgaaataggtattattaaccccattttagagaagagcgaacttcacagagcttcaggaacttactacgtgggtgggtaggcaagctaaaacaagatgtgaatgtaaatggtctaattccaggagccgcgccttcgttccctgtcttaaaggcatgtatatgtatatatagtgtgtgtgtgtgtgattttacacgtataaatacacatgttcatgttaaggctgaaactacatagcatgtattgagagctctgcaaattgcattggttttctgtggaggcagttatgtaaatgggttcagacagacagcatgggagagactacatagtctgccatcctggagcagcagtgagtcaagaagtctctgcagcagcagcagagccagggagttggtcaggagtgagtgggcagtctgacttgaagaccccgtgtttcctttgggacccttatttctgtgtgcttacaggagaatgctaaaaacatgattagaactgaggtcatcacaacaagagtatctgtggaagctttttttgcccctcaaagacactttaattagattcccatcatgaaaacaattaggcaagatttgccatacctaaccagtcaataattcaaggacaggatctcattaagagcttttgctttcccggaaactgccgttttgaggattcagcactggtgactgcgtgctctggggattaattcctgatccatatttcccctgaacttttttattttc

SEQ ID NO: 118122 - DNA, 1027 bp, Homo sapiens
gcctcataatcatggtggaaggtgaaggaggagcccagatacatgttacatggcagcaggcaagagagcgtgtgcaggggaactgccctttataaaaccatcagatctggtgagacttattcactatcatgggaacagcacaggaaaacccgcccccgtgattcagttacctcccactgagtctctcccatgacatgtggggattatgggagctacaattcaagatgagatttgggaggggacacagccaaaccatatcagatgtggaacccagcttggctcctgccgattagcttgcaaattaaattgctgtgctgtatgtggaacaaatggcagcttccgtcacttccttatcatgaattaaaagactgtcacattcttcagtgtaataaagctgatatgacaatgaaaatgaactttcttttattttccagatggtaaaacttgttgcagtgtagcagcaaattattactggctttttccagagtgtgtaccctgcctttgccctatatactcactctgaatctattatttaaaaaggcattcaactttgtcttgtgtctcaattcttaaataatttaaggacacctctgacttgtacaattctgcctttgtagttttccatgtcttcacctaggaaaccatacatttctaggtattggacagagtttaaaatgaagaaaatattttacctgatattgttctgcatgtgagcttgtaagtgggctcgattagaatccatcaatttaagaaggccataaccagccttagaggagacgcgaaggaggctgataatttgcttagtgtttagcagttaggtaaattaggccagagactgtatagcctacataaatcctgggtcatttgcatgtcctcaccagcacttagtaaggtcatagtatgtttgattatcaaaaacgtacagccactggtgagccatcatccatgtatcaggattacttgtcctcttggttatccaagactgagagtaactctggatgcagtcattatgttgcctgctcttcct

SEQ ID NO: 118123 - DNA, 1084 bp, Homo sapiens
agatctactgatctatggcttttggtttgttaggagttgccttccaagttataatatactacggtttttaaaacctgaagaatgtttgctcttcttacatctgcctgttgaataccacaggcaaaatattagctgcatgctttcaaagctaagtgacactgtgaaaacaaacaatatgatactctttgttcctaaaatacaatatttctcaataaactcttcatggaggaatgttatgaaacccaaaatagtttattcattggatgctgaactgtatgtactttccaagaactatagtgtcaatgcacttgacagtgtattttggtttctttctttgtgtgattcttagctttctagctcttatcacttaccactgtttccttccttttacttaaaatcatctacaaagagaacacaaagttgcatagatgaatgtagcagtgtagaaagtgggtcttctctggaatctcacttagacctttttaatgggcttgcctttcatgagctggattcagagaacttcttaaatttcatctgcctgaaatttaaactcattaaaaaggatccagagagctattatattgactggattttcttgtttatatctaaatgaggccagagaagtaaagatttttcttaccttcagaaggttgactttctttttatgctgtggtcaaaggagtcatagtgaatagaatatcaccttcataggtggtgatttttgtcatttgtttctgatgtatcccaattacccaaagagatcctggaacatagtaggtactcagcaaatccttgctgaatgaatgaatgaactgactcttttggggattagccctgtgcaattttagattgaagtcagtatgggattcagaaacatgtccttactttggatactgtaataaaatggacagattaaaatattgataatttctttgctttgacagaatgaccctgggtgttatttattttggctgggagcctggtgtgctgaacaaaatggtttgaatgtttactcttaagctcataaaggggatttatgaagggctatttccatttagagtagaaagttgattgggtaattaat

SEQ ID NO: 118124 - DNA, 1032 bp, Homo sapiens
gtctcggtggatgtgcaccaggtgtacaagtaccccttcgagcaggtggtcgccagctttctccgaaaggtaccgccccgcttccaccttccgtatcccgcgctgcctccgctgcttgcccctctctcctctccttcatccacgcggaagctggcaccgccagtgtctctttccagctgcgggctttgcttcagggatgtgtgggtcgagagggatttcctcgaagactccctttacagggagcgggaaaaggggccgtgcttggcatcacgttcacacctgccccagctgaaagaagaggctttccttttaggaagagcctccgggaatcccagctcgtgagctccgtggagttgcagatgaccgacgtgtggagctttccggttcatcactgaccccttaaaagcgaggggaggccattgggcagtcatcctggtttactcagcatgatggttctgctgccccatccgctgctccttattaaacagctgtgggacatcgtgcaggttgcttactctctttgtgccttagtttgctaatctgtaaaatggggaaaataatagtaccgactcatagagttgttgtgaggatccaaatgaggtaacttgtgtaaagtgcttagcacagttgtgacctaaatgaagaaactgaggcaaaatcaatataaaaagagagttcattcgagccaagtttgagggctgcatcctgggagtgaaggtgccctgagtatacattctgatgagcagaagtcgaaagtgggtttttaaaggagaataagaagcacttcctaagttgtttaccaagaatttatattaaaataacataaactattgattgtctgtacattgttctttgtatcacaaattccaggaacttgaagataatgggtaaggcagctggtcaggaacaaaatgcctttaaccagttgctcccaggaatgggttgggtgaggaggggaccactaaagtcctatactcttgtctctctgggcttgattgattttgcatatttcactgtaactcacacaatctg

SEQ ID NO: 118125 - DNA, 1344 bp, Homo sapiens
agcctcccaaagtgctgggattaaaggcatgagccaccatgcccggccactgctttttttgtttgtttgtttgtttgagatagagtctcactttgttgcccaggctggcatgcaatggtgcgatcttggcacactgcaacctctgccttccaggttcaagcgattttcctgtgtcagcctcccaagtagctgggatcacaggcgcccatcaccaggcccagctaatttttttgtgtttttagtagagatggtgttttgccatgttggtcaggctagtctcgaactcctgtcctcaagtgattcacccgcctcagccttccaaagtgctgggattacaggtgtgagccaccgcacccagcgtggcttttatttaataatctgaagaaaatatttttgtttagatataacaaccagcgtatttaaaacgtgagttctcagactgctccagggtttgagtgactgtaattaaatgcttatattgataatttattttgttgtagacctttccaaagtgaaactgatgagatttgatgatccactgttggggcctcgacgagttcctgtcctgggaaaggagtacaccgagaagacccccatttctgagcatgctgttttcaatgtggacctcatgagcaagaaaattcatctgactgagaatgggataagggtggatattggcgatacaataatctatctggttcattaaactcatgcacattggagatttatcctggtttcttaggaatactactactctgattgtgtctactgattggctatcagaaccttaggctggacctaaatagattgatttcatttctaaccatccaattctgcatgtattcataattctatcaagtcatctttgattcctggacctaataaattttttttccctttctttgggtgtccaagagaaatggtttttgccaaactctttttaaaaaacaaattgttgctatttcctagaagtttctggtttttaagatgaacataaaagtgtcagtatgcttcttttatgaggtgtactttatactttgatgaaggctaaggtgtacctaacagctttttatagtatattcatttatggagttagctgtatttttttttaaaaaagaaaagtagtaaattagcagcttttttttttaaatgaagagaacttcatgatgatttaaaagaactaatgagaatattttgacttgacttcaattactaagtattttgtataaagaacaaataggtcctgcattttataagactttttaaagctttaattattcaactaagaaccaataatggcttcttcaaggctaatatcaatagtttataagcagtatatttcac

SEQ ID NO: 118126 - DNA, 2708 bp, Homo sapiens
ctttctggttctcagcttctcttttgtgaaaaagggtacaaaagaactacttcagggatatagaactaacgtcgatgaagtgcttagtacaatgcctaatacatagtagagattcagtgaatgatggtggttgtggaagagaaaatgtagttattgttagtgtccatcattggtgttgatatatgtagttgtagtcatctttacctaggcatttggttataagcatgagcttgtacagcttttctttcatatttgagtactccttagtcatgattttaaaataccagaattagatctgtctttcattgggcattgaaaacgtagcagagattcctcctccctcagcagtattcaagttaaacaatcattttcttgttgttttcctagcctggtgtgtccgtttctctggtgaatccccagccatccaatggccacttctcaaccaaaattgaaatcaggcaaggagataactgtgattccataatcaggcgtttaatgaaaatgaatcgaggaattaaaggtaagttgttccccaaaactcccatttgtcagtagcttgtagatttggtgagttctaagcagaaaggaaaaagaaaagaaaccggcttgcttatggacagctgtgtattattatggaaaaagtactgggatcagaatcaagaaaactattctttttgggactctgtggctaggtagcttagtggctttgccatgtcacttaagctcaaaactgatttttcatttactaatgtgaggacaatagagggattagatagttttcatctttctttctagctctaaaattgtaatgagtgatttctgtctctcagagatattcagaatcaaggaacacatacccttaatattctaaactaacctgtccagcaggtctgttccttgagaaggaagagaaacagagtaaaagttattgcatgtcttccatgtattaaccatttaatccttttacagttctataatgtagagggtattcttattatttcccttttatagatggtgaactggaggctaaaaaggctaagtaacttgcaaagtttgtttagctagtaaactctagatctggaattcaaacaggtctgtttgactccaaagctcatattctttcttctaaacaatgtgcctccaggtaaaatatgtcagtaatcttaacttattatcaagaataagtctgcatcttttgtgattagattcaatgtaataatttatggcttttcttttcgtcatccagccaggtcctacggtgagcagagtgtgaagggagatagtgtgtctctcttatttttcttctgagctatgaaaacaaattaatgttgtgattctctattttgtattatctgtcttttttctttttgatagcaatcaaaagttgattggccactttccatcactacaaaaattttctaaaaagatttataaatccctaacaataacctaatttatggaactatattagggtagtaacatgaattaaaataggagacttgaaatagctcttgggaattcattctgtcatttattttgtgttctctcgaagttgtttcccttctgtggatacttattgagacactaatatatgtagtgtttgtagagacaactgtgtatgtagagactcctttgtatgtactggggctttggggagtccacagagtgctgttcattaggagctgcatctagtaaaggagtagggaactaagctattgcagtgtatgataatgtaaggagaaattgctgagtgtagtaagaaaggtacaggtaaaatgtatagcacagaggaacgtgagattatttccacttgcagggatcagggactaatttatggagaaaatactgtttggatggggccttgaacattatacccataaaggtaaggggaaagggtatccaggagggaaataccagttgcttttgtttctctgtgtacagagcatcagcagcaacagtatactagggttagggatgttgttgtttataggtgtattttttaattgtggtaaaatatacctaacataacatttactattttagtcatttttatgtgtacagttcaggaggcttgaatacattcacattgctgtgaaaccatcaccaccatccatctctacaacttcgtcatcatcccaaattgaaaccctatacccattaaataataactcccattctccttccctccagtccctggtaatcactgctctactgtctttttttcttttaagttttatttttgacagataaatgtacatatttatgagtacagtgtgaggtttggtacatatttacaatgtgtaattatcaaattaggataattaacatatccatcacctcaaacatttatcatttctttgtggtgagaacattcaaacagctcctcttacagctattttgaaatgtaccatatattattatgaactgtagtcatctactgtgtaatggaacagtataacttattcctcccatttaattataactttgtacctgttgaccaacctccttccagtcccctctcttccatccttcccagcctctgataaccatgattctattctctacttcaatgaaatcaacttttttagattccacatgtgagtgagatcatgcgatatttgttattctgtgcctttcttatttcacttaatataatgtcttccagcctcatccatgttgtcacaaatgacaggacttcattctttttt

SEQ ID NO: 118127 - DNA, 1030 bp, Homo sapiens
ttggggattttttgtttggatattattaattcactattctctgaaacagctttaagaaggtggtatctcagaaaattaaaattttgttttttttgggtaacttaaagggatattttcacacatttggctgattccctgtaaagtgaattctttgggcttgcatgttaagtcagtctaaataaacaatcataaaaccgtatttattttataaatctgaaaaccttgtgccttcccatcttttcagtgctgccataatcttataatactttaaaagataattatttggagctagtaaatttcattaacaagcaaatgtaggtaaaggaaatcatgagtccaaggcctttcctttaactcctgaaatctgaagattttatcagttgagagaagaatgattactttggaggaagtatgttttccaacatattcttactgtgattttgtttttccataccattttggctattaggaaaatctggagaagatggggcctcgtattctggatttgcaattagaatttgatgaaaaggctgtgcttatggagaatatagtctatctgactaattcgcttgaggtaagagggccagggattgtaataaccagttaactgtagttaaaccataatccagctcttttattttataataaacctttttataaatttcatcttctgtgtttagtatctttgttaaatatattagtcgaaaatatttttggagagaagaaaaatgggtgagtataaaagttgcaggaaaaaaagtgatatgtcatcttatttcatcaattcttaatttacatataatcaattatacattaaaaaactgtatatctggctattctactgcaaattatttttaagagaccttatattcaaatgctttccaagcctctcatgttatggagtactctgaattgttgccttttttcccccctcccttttgatttgcagaattggattaattataatctttggtttagaattgctgcactgatatattggttcatgatatattatggttcatgatatatt

SEQ ID NO: 118128 - DNA, 1043 bp, Homo sapiens
aaatattcaacacaaatcacttctttttctcttctaaactaaaaagtatgtgttgttaatttatagagaataggagagttccttctgcattgttcattgagctttcacttccccgtgatgctagggctggacacttttctgctgttctctaaggattgatagaggccaccattctatgcctggtcacatctactgttctgccttattcttgagacttttttttctacattactctccctccttccttttcttaggccaataacggaaaactgcctgacaacaaagtcattgctagtgaactaggcagtatgccagaactgaagaaatacatgaagaaagtcatgccatttgttgccatgattaaggtaagctgtggaccttatgcagctgtgaccacatgagcaatggttagatgggacaatagaaggatggggaaaagccttggacatagtctcctgccagaaatctgctaaaatagcacttttcaatcaatgactgagagaaatgatctatcagattttgggtttacttgtggaattgctgagtatgtgaaaaatattattgtgggagaaaaattggtttagaatggctgcactgaactattcccttcatattctaccttcccttctttcaaactcttttggcttacattaggcttatagaggcttgcatttcctagaccctattcctggaaccaggattcaacatttgtataggtatagcttaacagggtaaacattggttatagtggttagaccagggtgtctcagcatagctctgttggtattttgggctagatagttcttgtggggcactttcttgtgcactgtaggatatgtaatggcatccctggcttctactcattagaagccagtagaactacctttcctgctagttatgacaatgaaaaatatctccagacattgccaaatgtccgctgggggcagaatcaccttccacttcttaccattgagaattattgggttagacccttagttttcttcatatacgtcgctgatgtattactggatttcttgacaaaa

SEQ ID NO: 118129 - DNA, 1129 bp, Homo sapiens
caggcttacagataaatagattggctggtttaataactcctttccagccatattagctaggctcttttgtatttttaaatgcatgaacaatacagaaatgtgctcatgatctatataccaaataaccgtacttgaatactggatgtattagcaggataaaaactgagtgtatgcataatttatataataatgattaaatttaggcaaattagcattacataattttctttgaaagtgagcatatgtgtgtgggtattaatatgcttgtacaaatggatgctaattaagaatgtagagtcagacttcacagcttgaattctagggaacattagatcaggggctgtgcaagtgtgttatgtgtagtcaagtttgaactctgagcacacaattacagatggtatccttggtatgaaactataatcaagaaccgtaaaatagttatattgtctaatctcactgaaggtttttttgtttttctttttttaaaagcctgactcaattatgaatgcttcatggcctgtggcaggtcctgttaatgaagttttaatacactcctcacagtatcttatggaagtaacacatgaccttagactacgactcaagaactatatgatgccagctaaagggaaggtaaagtttttttgtttttttttttaaaggattattccttaaaagttattgatcagataacatttaacaataatgaaagttaaaaagattttcattaatggtgaagaccgtggtggtgtatgttgggggagggttcttctcatttttggtttatataaaagctattgaatgtttttcctttcttttaccgtctagaagactgacaaacaacccctgcagaagccctcacattgcaccatctatgtggcaaagaactatccaccttggcaacataccaccctgtctgttctacgtaaacactttgaggtgatgctctcagtagacttttcccccctgatggtgttgtatgctccctatgttgtttttgtttttaggatgttggcaatgtctgggagaagaaagataggcagctttgtttcattccctctaggcagacagcatccttttgttattcttggtggctcttaaatggatgctgagggaaaagctgctgttttcc

SEQ ID NO: 118130 - DNA, 1373 bp, Homo sapiens
gtttcaaaactgagaaaaattcatatgcatttgtacacataaggcaccagtgtgtattctcatgtattaaaatgtattttgctacctctaaatgaggctgaaatgttgataagaaaaccacaatgaaaggtgtgtctttatccccactttatcattttctatctctgcctcattaaagatcactttatctcattaactcaacatgcctgagaagaaacacatattggtgcttagtggatgcaaatcaatatggatggttcgaatattttaacatcacggttagggatgctactttttggtgattttaatttttgttgttgatccaggacagtcctttaaagcatttgttaatttatatatgggctttgcaaggtatccaactggacacataggacacagttgatactcagtaaccatatttttaatgcattgaatttttttttcttcttccaggaatgcgtttggctctggctgatgctggtgacactgtagaagatgccaactttgtggaagccatggcagatgcaggtattctccgtctgtacacctgggtagagtgggtgaaagaaatggttgccaactgggacagcctaagaagtggtcctgccagcactttcaatgatagagtttttgccaggtaatctgtagatcccaatcattttgtgttttagagttacttagtcctggtgcatttttgttttctttttcttttcttttcttttttttttttaataaaataaactaatgataataatagctagtgttcattgaaggcttacttgtgccgggtactatgctaagtattttgtgtccattatctgactttaacctcaaagcaaccttatttaatacagatattattagctctattttataaataaagaaactgaagcttagaacaattaagtatttccttaaatgccttaaagctagtagttgcaaacttgggatatgaacttgcttctgtctgtcttgaaagtctgttctcataaccattttaccatgttgtcttgttttcgagtagggcaaaatggttaaaggaaaagtagattaaaagaaaaggataaatatctttggagtcatcctacgcactggtattataaagatgaatgagacctgatccttattgtctagcaagagagacaaacacccagtttctaagcacaataatagagacaaggagaattcagagatgtcatgtgacttctgggtttcttttttttttttcctgagacagagtctcgcactgtcactcaggctggagtgcaatggcacaatctcagctcactgcagcctctgccaggttcaagctattcttctgccccagcctccctactagctgggattacaggtgcctgccaccacgtctggcc

SEQ ID NO: 118131 - DNA, 1760 bp, Homo sapiens
cacccggctaatatttgtatttttagtagagatggggcttcaccctcctggccaggctggtcttgaactcctggcctcatgatccacccgccttggcctcccaaagtgctgggattacgggcgtgagccactgcgcccagccttcacatatatttttaagatctttttatatccatacgtgtagccccacctaagtagttacgtcattgtatacctgtatcctagtttatgtagccagtcctttgatttgttttcacttcccattacaaaaaggactatagtgtatatccttgcacttttatcttagcaagcctttatgagtctattagcttttacctcaaaattttaagccagaactatcatctttgtttttttattttctatctttaaacatttatctgtgaagtgacaaatggcctacagctgtgagagcaaatggacatctcctcctgaactctgagaaggtaaggcttattgcatcttaaaagtttaaaattctgtggaaggcttttcagatttaggttgttgcacttttttttaaatgtatgtaagaaataatgtgtccaggtgtggtgcctcatgcctgtaattccagagctttgggaggccaaggtgggaggatcacttgaggccaggagttcaagaccagcctggacgatatagtgagaccccatctctaccaaaaaattagtaaataaataagaaataatatgaattaatcagagttaaaaaccttctaattagcatatttaggacgaggcataaattaatttttttttttttttttttttttttgagacggagtctcgctgtctcccacactggagtgcagtgacgtcatatgggctcactgcaagctccgccccctgggttcacgccattctcctgcctcagcctctcgagtatctgggactacaggcacccgccatcacgcctggctaatttttttttgtatttttagtagagacgggatttcaccgtgttcgccaggatggtctcagtctcctgatctcatgatctgccctcagcctcccaaagtgctgggattacaggtgtgagccaccgcgcctggcctataaattaatttttatctttaaaattgagcaaggggagtagatagtattaattgaagagagagatagggaagagttacctatttgtaacatttgtatttagagtggccaaaggtgacacaaattgcaactgaagtaaagagagaaaaagagagacagagacagggacaggaatcataaagagcttagcattgtgacccagaagagttttcttttcctttttttttctttttctttttttttttttttgttgtgatggaatctcactctttcgcccaggctggagtgcagtgacacgatcttggctcactgcaacctccacctcccagattcaagcgattctcttgcctcagcctcctgagtagctgggattacaggcgcatgccaccatgcccggctaatttttgtttttttccgtagagatggggtttcgccatgttggccaggctggtctcgaactcctgacctcaagtgatcgcctgcctcagcttcccaaagtgctgcgattacaggcatgagccactgcactcggccatttttttttttttttttttcacaaatccacttttattgacttttcgttagtttaaatccttgaggggtacagcatcactccgattctgtgtccaatagccttagcaggaagattgtttaggaatttggcatgaaccatgctactgttcccgt

SEQ ID NO: 118132 - DNA, 2285 bp, Homo sapiens
gttattggtggtatagcatttttttaaagtaatttttatccttgaggaatgaagattgatttgacatagtatctaatgtatgtttatttaccttcctttagggagatgcacttatttacatggaaccagagaaacaagtgatgtccaggtcgtcagatgaatgtgttgtggctctgtgtgaccagtggttagtctcttatagcaagaaaattcccctagtcaatttgctcacctttgacttaaaaaaaaacatatcaatttgtccactcccaggtacttggattatggagaagagaattggaagaaacagacatctcagtgcttgaagaacctggaaacgtaagatgggagaaagtgatgaaggaggaaaaaggagatgaaaaatgtggaaacagtaaagttgaaatgcaacaaaaaaagtgaaccagtaaagatacactttgtcttttgctcttttctagattctgtgaggagaccaggaggaattttgaagccaccttaggttggctacaagaacatgcttgctcaagaacttatggtctaggtaaacaaacttgaaatttttctgtttggataactttgccagttacacagaaaatatacatttttacctttcccccctgccctcaattctagtgttttctgaattgaaagcagtaagtttcctctggatggtcatgaaaactaggatatagtccactatcatctactgtgtggtagaaatatgccctctctatatagattttgtggtgtgacttttttatggagagactccaagcttcaaccatttgtcttttttttcttttttagagacagagtcttgctctgtcgcctaggctggagtgcagtggtgcgatctcagctcactgcaacctctgcctcccgggttcaagcgattctcctgcctcaacctcccgagtagctgggattgcaggcacccaccaccatgcctggctaattttttttgtacttttagtagagacggggtttcaccatgttggccagtttggtcttgaactcccgacctcaggtgatccacctgccttggcctcccaaagtgctgggattataggcgtgagccaccatgcctggcccattttgtcttttatctacaattttatttttattaattattcaagaataatttaagagcttcctaaataagtagctttgtaaatgttatagcccccttcttaaaaatgtggattctatagatgaaatgtctctcaggttcctcatgcgttactttttatttttcaggcactcacctgccttgggatgagcagtggctgattgaatcactttctgactccactatttacatggcattttacacagttgcacacctattgcaggggggtaacttgcatggacaggcagagtctccgctgggcattaggttggtaaacagataagggaaaggagcataatttgtcagtaagagttgtgatatttgatttatgtatttaaatgttttaataagatttatttcacagaattttgtcatgatatttttgcttttttactattgaactgggaaaaattaataaatagccccttactgtcatcatctattcttcattcttatggaagctgttgtccttatttgttcctgtaactacattaagaaagagattcctaatccatgtttcgattcaggtactgattcttccaaagaaattacatatatatatatataaaatagtttgttttatttttaatacagaccgcaacagatgaccaaggaagtttgggattatgttttcttcaaggaggctccatttcctaagactcagattgcaaaggaaaaattagatcagttaaagcaggagtttgaattctggtatcctgttgatcttcgcgtctctggcaaggatcttgttccaaatcatctttcatattacctttataatcatgtggctatgtggccggaacaaaggtgaatgataaaataggtgtggactagatttattgattgtcaataggggtgtcttgtggcttcaaatatctaataaattattgtggaggggatggtatagatttgccagttacattctttttcttatcttaaatatgtactaaagcagaaaggccacctcctatctcttacatccagaaatccacatacctaccccaggcaccaaagcatgtcatatctcaggtgcattgctggtctgctagtaattcatttgacctgttaaatgcaggaataattctagaccattagaattggaaagaaccttctctttagagcagagcgccccaaggttccagcattagttgtg

SEQ ID NO: 118133 - DNA, 1019 bp, Homo sapiens
tttttgcttatgggtaggacttgtcactaggcttcactgggggagatctagaaagggccatttgggccttggcgactcccggttgttaagtttttttagtattggcttttgggtttgttagatttccctacagaagattctgccaatctctagctcaaaaggtctaggtggccaggcacagtggctcatacctgtaatcccagtactttgggaggctgagaccggtggatcacttgaggtcaagtttgagaccagcctggccaacatagtgaaatcctgtctctactgaaaacacaaaaattagccgggcatggtagtgtctgcctctaattccagctattcgggaggctgaggcatgagaatcgcttgaacctgggaggcagaggttgcagtgagtcgagacggcgccaccacactccagtctgggcgacagagcgctgtctcacaacaaacaaaaaagtctaagcaactgagcattttggaagttggatgggagaagatagctaggaatgtgtaccaacatctagtatgctgactttcacttaattcccctatttttactatgatacttgtaactttgtctctagttcagagactttcttttaccttttccagagaattagcctttttttttttttttttttttttggttctggcataggtaggggcagtatatggggttctaacctctattttattttattttatcttatattatcttatgttatttttttaccacttcccagatacccacttctttaaatgactttagttggtgctcttcttttcagtctcaccttatctctctctctctctcttctctttctttttttttttttttcggagttttgctcttgttgcccaggctgctggagtgcaatggcacgatctcagctcaccgcagcctctgcctcctggctcaagcgattctcctgcctcagcctcccaagtagctgggcgttacaggtgtgcgccaccatgcccagctaattttgtatttttagtagagacggggtttc

SEQ ID NO: 118134 - DNA, 1050 bp, Homo sapiens
cttctatgagaatctaatgccacccatgatctgacaggaggtgaagctcagggggtgatgctcgcccgttcctcacctcctgctgtgcagcctggttcctaatgccatggactggtaccggtccacatccttggggttgggaacccctggtttacatcattttgctagtttcagtatgaattacttaggtaattatatgccagtggaggatagagtgttgggaaaggtgtgtgtggtgggggaagggcattgggggtgttggtacacagagtatgggtggttcctgtggagagtagaaggacaaatttacatctggaagttagtcactctgtgattacttaatgtgtggcagtgtcgtaatgacatatacaatctgaaatgacttaattggacattagaggcaaaaggacttgtgccctacagagctgtgtgtccagtcagtgtgaacacgttcctgattgctgtttgctgcaggtgccagtcattgaaatcccaggttttggaaatctttctgctgtaaccatttgtgatgagttgaaaattcagagccagaatgaccgggaaaaacttgcagaagcaaaggagaagatatatctaaaaggattttatgagggtgtaagtaataattttttttagtttttatttgctttactccatgctctgtgattttcttaattagaaaaaatgtagaaaaatttaacatagtttcagctatacattgatttgagagcttaatatgagaatgtattctatttccaaatttctaatttttgtttttatcatgtcctttgcctaaaagcattttcagaaattgtctttttcgtgccctctaggaatctctatggagtgaatttcttgacaagatatttcaaattagttcatattattatgcagtaaacttcaaagatttattgaatggagaatacctggtcccttcttttgctcttttagttaaggagttcatattttagataagcagttttattcagtccattaatttatttattaatgtctactaaatgccaggtgagttcaacaaacatgttctga

SEQ ID NO: 118135 - DNA, 1050 bp, Homo sapiens
gtagatttttcaaagcatttttcatctgttatcttgtgtgttcctcaggacagtcctatctgagacgcaacatccttattttaccaataaggaaagaaaggcttagagagattatgactaccttgggtctaaccattagtaagggagcaaactaagtttagaaagcacattatctctgacctctggtctagtgtcttcctttgatgactactatgtgggacatgccctgggatggaattagggttgattgtgtcttctcaccttcattttggcaaacactattttgggcgattactccaaatctctcctaacgtactagacttctgtgtgggtatagttagcacaccactggcaatctcttctctgcaaaaaaaaattaataatgcaagaacccattttagggacttgaatcagatctctcacatagattagtaggtttaaggcaagtcttttttttccttcaaatttttgtatcgtttatttgcttagggtgttggacctcaggaatatactttactcaaattgaaggtgcttgagccatacccatctaaattaaggtaggtttgccagagtaattgctttatcatttctgaaccatcagatagttgttacagagttgacatgtttttacatcaatatttgtttttttttctcagtggcctgaaaggtaaaaatattttcttggtggctgctactctcagacctgagaccatgtttgggcagacaaattgttgggttcgtcctgatatgaagtacattggatttgagacggtgaatggtgatatattcatctgtacccaaaaagcagccaggaatatgtcataccagggctttaccaaagacaatggcgtggtgcctgttgttaaggaattaatgggggaggtaagttggatagcagattttttattttaatgcgtaaatttcaaggaaaatttcaacaatgaatattgagaaaagagcattacaaccttaaaaaatgaggtgtacatgcagtaaactgtgtaagtcttgtgtgttttggtgcattttcatatgtatatacacttacgt

SEQ ID NO: 118136 - DNA, 1756 bp, Homo sapiens
ctcaactgaaggctcagatgattattagcattttatagcaatgatgtattttaaaattaaggtatatacattgtctttttaaatataactttattgcacacttaacataattcaatatagtataaacataacttatatatgccttgggaaatcaaaaaatttgtgtgacttgttttgttgtggtggtttagaaccaaacccacaatatctcccagatatgtctgtatatttgtgtgattatatgagatttggaccaattcctaattttagaataatatatttcccctgtatgccactaaagaattagtactgttattgttagactagaacctaacattgcctatgggtctcataacaatgaatacttcactatttgttgaattagaatgtatattgacatattaacaattagtagaaaggagctttattcaaagaatatgaagaagcccaagtttaacttgaatatttaggaatacataaaggtaggattaaatgtttcttcttaatttattatagcttctatatgtttgttaatatgtatatgtatatgcttaaaaatatactttaagtaaattaaagtaattgtgatatacttttaatagtggaacttggaaaattatttttaatagttgatctgattctaagttagaagagtaaataattgattcataggaattcttatttaaacaaaatttgtgtatttctcagtaattgccttttaaaattttccttttataggtagactggcgtcgttccttcatcaccactgatgttaatccttactatgattcatttgtcagatggcaatttttaacattaagagaaagaaacaaaattaaatttgggaagcggtaagtttgttatacttgagcataataaagcaaaaatcagttgggcacagaggctcacgcctgtaatcccagtgctttgggaaactgaggtgaggggattgcttgaggccaggagtttgagaccagcctgggcaacatagcgagaccacatctctttatataaaaaaaaaaattagccaggcatggtggcatgcacctgtagtcctagctacttgagaggatggggcaggaggattgcttacatgaataaataaataccttgtagcctaccttttcccattacctttcaggttttaaaatatgttgtttctattcttttgtatcctttgttttccttttttccttaccagtgtcttaatttctctgagctgcttagtgtttatgacagatataaccagggagaatgggagggtgggcttttattatcttactaaagattatgttcagtattccctgccaagcagaaaaagtaatcatttgatttgtgttttattttatactttgttctacaaattaagattcttccttgattatgtagattaatcaaggaagataacttaagaaatgaaaataagttatcttccttgattaatctacataatcaacttcctgatagtttcatttgttaagtcaatttatgttttataatcttttgttcaataccacaaagccaagatcagtgtgtatttttcagtggtattacctttgacgaagatagaaagctttcattaaataagtaggttgacagtggaactaccataagagtacacataatagacacagatatctactcagaaattctagttgcaagacatgtaagaaattaggtgcaacacaggcaaatatggtaggataaaacgtgaatattataataatgtttgtcactttttgtttattttttaggt

SEQ ID NO: 118137 - DNA, 1035 bp, Homo sapiens
tagtgaattttgaggtacatgatttatacctttttttaatttaattttatttttttgagacatgggactcattcttgctttgttgcccaggctagagtgcagtgatgtgatctcggctcactgcaccctctgcctcttggttttaagtgatcctgtcacctcaacctcccaagtagctgggattacaggcgtgtgctaccacacccagctaatttttatatttagtagagacatcatgttggccaggctggtctcgaactcctgacaagtgatctgcctgcctcagcctcccaaggtgctgggattataggcgtgagccactgctcccagcctccgtttcagttttctgtagtggagccacataggtatcaatatattgcaaaaaatttcagagtcaattttagttggcaataaaaacagtaaaaaactgaaattgtgtctaccttgattttgaacttcattatctctaatattcgttgtaggcatgtgctgataagttgaaaagagaaatagagctgtatggttgcccccctgattttccagatgaagaagaggaagaggaagaaaccagtgttaaaacagaagatataataattaaggataaagctaaaggaaaaaaggtttgatagtggttgatatttatgttggttgaagttttatatttttctgatttatatgtgcattcccagtactagcacagtgcccaacacataaaatgtactagatcatttttttaaagtatcaaagcaaaaaattatctttctggccaggcgcggtggctcaagcctgtaatcccagcactttgggaggccgaggcaggcagatcatgaggtcaggagatcgagaccatcctggctaacatggtgaaaccccgtctctactaaaaatacaaaaattagccgggcgtaagccggtcgtaggccgggcgcggtggctcacgcctgtaatcccagcacttggggaggccgaggcgggcggatcatgaggtcaggagatcgagaccatcctggctaacatggtgaaaccccgtctcta

SEQ ID NO: 118138 - DNA, 1046 bp, Homo sapiens
taaccactagagtagctgggattatcagcgcacgccatcacgcccggctagtttttagtagagacagggtttcaccatgttgcccaggctggtctcgaactcctggcctcaagcagtccaccagccttggcctcccaaagtgttgggattacaggtgtgagccaccacgcctgacctagtatattatctttactcaagtattttagctcaaattaaacctctagtatttgttacaaggctatttaattcttaatagcaacctatcaatgtcttatttcttgtaaatctaaagtaattttcaattttagagagttttaaatttgtagatttataaatttacttttaaatattttttaaataaccttaagttatttatatcaagcatttccttcaccccacttccttattgtaaaaggaacttaacatttattcttctgtactttcttttttatactgttgttttgcagcaagggcaagtattttgtaaccttcccatatccatatatgaatggacgccttcatttgggacacacgttttctttatccaaatgtgaggtaatgtttccctatgtttgctataatggggaggaaggtttttaacgaatattgttttgaagaaaatggcagctatagaatttattatttcctgttaagagaacttaaaattccttaaagcataattttttatatttaagtaatttatttttatttttatttatttatttttgagatggagtcttgctttgtcaccaggctggagtgcagtggtgtgatctcagctcactgcaacctctgcctcctgggttcaagtgattcttctgcctcagcctcccgagtagctgggactacaggcacgcaccaccacgcccagctaatttttgtatttttagtagacacgggatttcaccatattggccaggatggtctcaaactcttgaccttgtgatccaccagcctcggcctctgaaagtgctgggattataggcatgagccaccgtgcctggcccatttaagtaatttaatttttatatttaatttttatgtgc

SEQ ID NO: 118139 - DNA, 1042 bp, Homo sapiens
cagtaattgttcaaccatttctttgaggtttgaggtacacaggtcatgataatcctaattttttttttctggcggagtcttgctgtgtcacccaagctggagtgcaatggcatgatctcggctcactgcagcctccgcctccctggttcaagcgattctcctgcctcagcctcctgagttgctgagattacaggtacccgccaccacgcccagctaatttttgtattttagtagagatgggtttcgccctgttggccaggctgatctcgaactcctgacctcaagcaatccacccgcctcggcctcccaaagtgctgggattacacgcatgagccaccgcgcctggctgataaccctaatttttaatgttcatttaaatttcaagataaccatggaaaaatcagtctttatcagtgagcagctcagttctgtgaacccaattcttttttaaagcaagcgtgctgaaatacagagtggattattctctttgtgtccaataggaaagaaaaggaacagccaaagtggactttttgaagaagattgagaaagaaatccaacagaaatgggatactgagagagtgtttgaggtcaatgcatctaatttagagaaacagaccaggtgagtaatagtttgtgaagttctgcacattgtatttctatatatatatatatatatatatatttttttttttttttttttgagacggagtcttgctctgtcgcccaggctggagtgcagtggcgcaatctcggctcactgcaagctccgcctcccaggttcatgccattctcctgcctcagcctcccgagcagctgggactacaggcacccaccaccatgcccagctaattttttgtatttttagtagagatgatgtttcactgtgttagccagggtggtctcgatcttctgacctcgtgatccacccgcctcggcctcccaaagtcctgggattacaggcgtgagccaccacgcccggccctgtgcattgtatttctaaaaccgttggctttatagtacagaaacagcttggtggaaccca

SEQ ID NO: 118140 - DNA, 1071 bp, Homo sapiens
atacaatgtctaaatgctgggctgttgaatgccactgacagtaaaaaatatctgtgcatagtggcaagccataagtagcacctcagtcaccgtatagtaattaactgcgtatcctggcatcccgacaggcaaccagctctaccgggtgaaaaggttgatggccaagggactccaacctaaccagggcgcactcgcggcattctgcgatcccgcactgcatcatggactttgtagttcaacatgccagtgacgtcactgccggttcccctctgagtgggcctatcgggtagacttccgataacccgtttttctctgggaattgtagtcagttagcgcctgctgggtgtctgctcgggtggtctgggaactacaattcccggcgggctgtgagatgccttggctgtagttagtaaggagccggatgattgcctcagcaggtgtgaagcgtgtgctttagtttcgtgggaggcctggcatccccgagagggaggggaaaggtaaccactcctttgtggaggtcgccagggtcattgtcgtggatttgcacagtcggctgggcggtgcaatggcggtgagtttgagcgagaagaatccgcaggggccctggagccggactggccagtctctaggggctctccatgtgctgtcctgaagggaaagtccttttctaaaagagagccacgcttaaggcgtgcctttcgtagagactttgctttttcttgctagtttatgaaccacgaactgatgtctgttaactttacggagtacttggatatcatatttgttatttctctggagtttctaaaatcgaggtggagagccgggcacggtggcccacggctgtaatcccagcactttgggaggccgaggcgggtggatcatttgaggtcaggagttcgagaccaccctggccaacatggtgagaccccgtttctaccaaaaatacataaattagccgggcgtagtggtgcgcgcctgttaacccagctactcgggaggctgaggcaggagaattgcttgaacccgggagagggaggctgctgtgagccaggatcgcgccactgcactcca

SEQ ID NO: 118141 - DNA, 1705 bp, Homo sapiens
gctaaattcaggaaataagtgcatcactaaagaaatttctgcaagtttaaaaaaagatcaggcaagcatttttcagtaacctgcatttctatcaaaacatgttgtatttaatggggaatgttttatttatattatataaaatgtataaatatgtattattcactgctgcttgtttggcttagtgtaaaactttctcttggtgtgtgttttaaaaagcatggtgggatttgtaaactctggacaatttgtctgtcttactttaatagacattgttgtgtgaatcggcatttaatttctagttccgtatctatctctaattcactctgtgacttaggataagttgtctaacctttttctattaaacagaactaaattttatttgccttttacctacgtcaccaagtctgttatgagtattaatgatgtagactttaagtggtttgtgtacctctgaatcattctataaatgtaaacaacattttatggtttttggaatatgaaaatacatgaaactttctgcaaaagtattttgcttattaatgttaaacaccactgccacttaaaaaataataatcagtctattacaagacagactagagtctcattgcaggtcctataggtaggaacaggaattgctagtcaaagtcatagacttgatgtgcagtttttgtgatttctggccatatcagtgtcttttaaagtgccctaggagattgaatatgttgtcagcttggagagtgatagaaaaggcagcaataaggttaatagactaagtttattttattggttcatatttatgggttcagtgatcatgatgcatatactttggttgaactctagagtttacatgttgctgtatgttggcagtccttatcaaattgaactctggatagtaatctctgcagttgcccaaatgggaggaaaaataattatctagcaatttttggagctgaccacctggtaaataaactaccagcgttaaataagtattttggaggtatattcttaagtttgggaagtactggtaattttcgaagtgtacttagttgcttcagagaattagtgtgtctctaaagtgctgtgggacttaaggataccattcactatttcatagaaaagaactttggccagaagacttcttggcaagttttagtctactaacttaagaacatatttgttcttatgtcctttggtctgccttttaaagatgtctgacttcatccttcctggcccaataactataggctaaagccagaagttgcctttttagccctgtgtttcttgccactgtcttctcttatcctcttacagtgttgctacttacttccttattaatctctttttatacaatgtattattttgtactgtaattatttgttttcgtatccacctcttggccatgggcgtgcagggcaaggtctgttttgtttaaagtaattccattaccaagcaatatgcttggcacttagtaaacactcagtatatgtttaaatgaatgaacattctcatatgtatatacaggtaattgacaattagaaaagtaagaattttttagtagtctaattttgtgcatgtatttagctagtggctactatactaggagctatggtccaaatatccaaatggtatttgcaactgatgaatgtatgtatatattttcctcccaaataaatctagggttatttcttccacatgatactcattc

SEQ ID NO: 118142 - DNA, 1025 bp, Homo sapiens
aaaggtataccatgaaagtctcttacctgttttatatccaccgcgttcccacctagagtacacaattttgtcagtttttatttttttcagtttctttatgcagatagatagaaacacatataaatacatactgttatatctttgagatcaggtattatcagtattctttctttttatagccgctgtgtactctgttgtatagatgtcccatagtttatttaactagtctcttattcatggaaatttgagttgtttccgatcgtttgctattatatcctccaacaaataatcttacatatatatcattttgcaagtaggtcagaaggatttaaaaacctgaaagtgggattctcttccataaggtaggactcatttttagtcctactagcagtgtacaagatgtcctgttttcctgagctttgctgacaatgtgttgtcaaatttttgttttttgtttgcgcaatatgtaaatgttatttcttctccttagaaacttcaggttttgtggacaaactatttgaaagtctctatactaagaactaccttccacttttggaaccagtaaagcctgagccaaaaccactagtccaagaaaaagaagaaattaaagaagaggtaatgcaaattttttctcctgcttttgggggcttcttagatcctgtcaccagtatccttagttggaagttgagccttttaaaagtaattgtgtattgattcaagtttccggattttaggcatggtacagattcttcatcaggatttcatagttgcttggactgaagagttgaaaagtttcagatagcttgtttagagatccaagaaatatttcagaaatattgaggaagtcagagaaatcttatctagtgacttttagaaaaagaaaacttggttaaatatagagagattgactgaaagtgaactgttaacaaatcctcaagagaaatcattaggtaacacattttcatgtatatggagaaaccagttgcactttttgattatatagagttttaaaaaatagttaatgt

SEQ ID NO: 118143 - DNA, 1069 bp, Homo sapiens
atgttgcccaggttggtctcgaactcccacctctgcctcccaaagctctggggttataggtggtctagatatacttactgaaaatttgccccatctgctctctttaaatatccatatgatttttttctcagtaatttgagtagtgagtcacatacttcatgtcttttcacccctaagtaaagtacttcagtgtgtatttcctacatataaggaatattctcttaggtaactatgatactgtgatcaagttcagtaaatttaacatccatatagtactttaatgtattatctgtgttcagttttatcaattgatcaagcaatgtcctttttttatttccttttaaaaaagttttttgttgttgttaaagagacagggtttcactatgttgcccaggctggtcttgaactcctgagcttaagcgatcctcctgacttggcctcccgaagtgctgggagtacaggcatgagccactgcaccgagtcccaagtgtttcttttttatagcatgttcttttcctctccattttcaggattgattctaaggattaggtatcatttagttatcatttccgattcatttttaaatgctaggctgattgacctgatccaacattaaaagaaaaaatgtggctatatttatgaagatcaactgagactgctgtctgttttttctttttatatcatgccctgtaattatctcatcaagttctttcaaaattggagaggcttgttgaatgtgtcttaaagtactggaaataggaagaagcctttctgttttttacctttctgtttttttttttttttttgagacggagtccgctccatcgcccaggttggagtgcagtggtgccatctcagctcactgcaacttccacctcctgggttcaagcgattctcctgcctcagcttcctaagtagctgggattacaggcatgtgccaccatgcctggctgatttttgtatttttaatagagatggggtttcaccatattggccaggctggtcttgaactcctgacctcgtgatccacccaccttggccttccaaagtgctgggattacaggggtga

SEQ ID NO: 118144 - DNA, 1048 bp, Homo sapiens
tgtagttcatttagtagtgcataaacataattgtttatagtatttctgttagataatagagtaggaaaggagtctgaggtggcacacatctttggctaattgtctttttctggtctgtgcttagttgctctgaacagggtatagagaagcaaatctagggattacccattttaactttcttccttggtcttcggctacattgggttccattagtggttttctaattagactgttgatcaccagggtaagagaatttggatcattggcaccaactcatcctgcttctggaaaaacaacttggtagacatgtgccatgatttatgaagcacactgccttcattgcctgttttctttacctcatctttttccttaaattttattttgtgaagaaattcaatcatttgtcctgtagagttttttactgtctggattttgctgtctgcatcccagtggaataatacatcctctgtatttcctgtgaattaggatagagaatgttttttaaatgtagtctagtgagtgtgtagtgattttgctgccatatggttgccatattgtggctgccgttttatgttgcctgaattttattaaattattatctcctaagtccattcactcacttcctgatttgtgtatttgtcagtgagcttctccattagataggtatttgtttaactcttgcaaataactttatttcacctttctctggtaaagactatatattcggtttgagataaacttgttcaaagacaataataaaaattactggttctccaggaggcagaggttgctgtgagctgagatagcgccactgcactccaacgtgggcgacagagtgagactcggtctccaaaaaacaaaagaataaaataaaaaaataaaaattactgttctctttgtatttctggtcaattttgacggttaggctttaagagaaagccttaacatttccattagttccaataccatttttccatagtttacatgaattacttagttttatagcattcattgatttaaccattttttcctaaaacgtttcctatgg

SEQ ID NO: 118145 - DNA, 1068 bp, Homo sapiens
ttttataaacagtcattattatgtgttttccccaagagctcaggggtgggagcagtccccttagagaatattaatgaaatgttccatttggttaggggtgcttagtattaaaatcatccaagtcatttttttatgacaagtagtacaacttgtatattgaatcatcagcctaacatcaaaaattggtctttgtttaggaacacttttttttgagccttttttcttttctatttcaaattttctgttttcccctgcccacccctccccatactttggattcacctctttttttcatttctccccacccagtataattgcaggagggatgttttttctctgtatatatttgattagaggaattatgtggtagatttgcaactttctaaaaaagcatagatatgcatttggatgactcaagagtagtatttatactatagatttgtttgcagacttggtttctatagcctgcatatggcttttatatctgtatattataggacacgtgagaaaaaaagagaagacgggaaatggagagactatgaccggtactatgagcggaatgaattgtaccgtgagaagtatgactggagaagaggcaggagtaagagtcggagtaagagtcgaggcctgagtcgcagtagaagccgaagtagggggcgcagcaaagaccgggatccaaataggaatgttggtgagtagatgagtgtccccctaaaaactctgtagttatttatctgtctctatcacaggggtgcaagaaattctcttaaagttgtacctttaatatgtctgagcagtgtaaaaactggaattgtctcaagaagctcaatatccattttgttagaaaacagggctctattctggggatggagtcaagggagtttgattaaaaaggagctattcaagtgtatcattgtacatgtctagacttaactcattttgtataatggatacaaatatcctttaatcaataaagctatcacgtgaggaagagggttgcctgcttttcttctttgtttggttttctaaaagtaattgatttgctgtaagggtgcttgaagtttataa

SEQ ID NO: 118146 - DNA, 1071 bp, Homo sapiens
ttcgccatgttgcccaggctggtcttgaactcctgggctcaagcagtttgcttgcctcagttcccaaagttcagggattacaggcgtgagccaccgtgcccagcccatatgtgaatatttaatataatcacataaacagtataattgtgaagctcaagctgagatttcatttcccagataaagcaacatcgttttatatatggaaattctaaaataaagaacgttatctcagcgtgggaacatatctatttaaaagttaaattcaagaataccatttctcccgacattttgctatgaaaagtttgtaacaaataggaaagttgaaggacttgtacttgtatacttaccatctaggttctacaattagcattttactgtatttatgttagcacatatctttccgtttctccatttttacttttgatgcttttcacagtatgttgcagacatcgtacacttaagcatgcttatcattaacttgaattctgtagaactttaccatcaccctagaaagtttcctgaagcctcttctcagccgttctccaccttcacccatagaggcaaccagtcctgccttttttcaccttagattagttttgcctcttctagaacaagtaatgttcttttaattgattatacaactcccagtgcttaagcttgcatatattaaattctttaattctattcagaaccaaattaggtattttaaatgtgagtatccaagttagtactagtatggtatttttttcttttttttaagatgaagtctttctctgttgcccaggttggagtgcagtggcgtgatttcggctcactgcagcctccacctcccatgttcaagtgattcttctgcctcagcttcccaaatagctgggattacaggagtgtgccaccacacccagcttatttttgtacttttagtagagatggggtttcaccacgttggccaagctgatctcgaacttttgacctcaggtgatctgcctcggcctcccaaagtgctgagattacaggcatgagccaccgtgcccggcctatgatggtccttttttttttttttttttttttttc

SEQ ID NO: 118147 - DNA, 1036 bp, Homo sapiens
agtttattttgcatcctaaacatttctgtatctctttgatgtcttggagaggcaattcagcaaactcgttaagcccagtttcaaatcctggttttatcatttactatctttgtgaccttgagtaagttgcttagtctctctgtagctcaatttcctcttctttaaaatgagaataatattacctcattaaggttgttttgagtaataaattaatacatctaaagcatctaaaaaagtgcctagccactagtaagctataaggattcattattatattattgtagttattattgtctcctgaaatttcaaactctgaaattgaacctattaacttcttaaatctgtaccttctaccatccctgtttttgtcaatggagtaacacccacctaatacctagaattgaaaccttcacaggactgactcattgctttgcttttttacatctggttaatcaaaaattctttttctttgaagtagccctttctatttcttctgtggcctctgccctcatccacgctagatcacttcacatttggattattactgcagcctacttgacaccattatgttttatgtttaacttccctaagtcataccacataatgctgctaagctaattttcctgagaaatccaaccatgaaagttccttatgagaacttttcggtggctaccatttctttctgagccatcagtaaacccctctctaggacttctaactcctttttttttttccttttctttttttttttttttttttttttgagacaaagtcttgctctgtcacccaggctggagtacagtggtgcaatctcaactccctgcaacctttgcctcccgggttcaagcaattcttgtgcctcagcctcccaagtagctgggattacaggcatgtatcactatacccagctaatctttttgtattttgggtagagatggggttttgttatgttggctagctgtcaaactcctggccttaagtgatctggctgctttggccttgcaaagcgctgggattacaggtgtgagccaccacg

SEQ ID NO: 118148 - DNA, 1027 bp, Homo sapiens
ataaatctcatagatatagctaattaggtccaatattttaaatattttttaagtacagttgtaaactctattatgctgaaagtgttagggaaaatatattcaaaggtttcatctatggtgtcagctatttttttattaggaggacagtctgtctcagggatgacccagaaaaaatgagttgagaatggtggcaaattacattatctgtattaatttcttttttacttatacaggaagcaatgaagttacaacaagatatgaggaaaaaaagacaggaagtgttagaaaagcaaatagaatgccaaaaggtaagacaagagctcattatttgcatgctagaattgatgtatagaattgattttaaaagtattattcataatttttaaagacttctttatattaaagtttattaagcatggttttacctttttctatttatttcgtagatgttaatatccaagttagaaaaaaacaaaaacatgaaaccagaagaaagagcaaatataatgaagactttgaaagagcttggagagaagatctcacaattaaaagatgaattaaaaacatcttctgcagtctccacaccatctaaagtgaagacaaaaacggaggtatctatttgcattttttatttaacatagggttattgaacatctgccatgtgcttgacaccttgaaagtacaatgggacccttaggtagctaatatcctaacagggatataggcaaacaattatagtacttaaaaaaaaaatcctaattatagtaccttttttttttttttttttttttttaagagacaaggtctcactatattgcccaggttggcctcaaatgcagtcctcccaccttggcctcccagagtgctgggattacaggtgtgaaccactgcacccggctgccacaatttttttgttttagtgtttctgtagatgctctgtaccctttttgggaagaggttgataataccctgtttgaacaaagatgtgttttttaactgaatattttggttctctgctgaagatgac

SEQ ID NO: 118149 - DNA, 4387 bp, Homo sapiens
tttgtctaagattttagatttttatataagatttggaatatcagtgtcatggggaagctagtatattcacctctcacaaacaattggatggatataaaaacaaagatttaggtgtttggtcatttattttcctaattttttatagaataaaattaattttaatttatcagaaatgtatctcatagtcttttttaaattttctgtactaaatgtccacattattttcctgatgatattagagtagaaatctcctattaaaagtagcaaaattagcaggggagaagaattcatattcatttacaaaaatattttgggcttttttttttttttgccctgaaagatactcttgcatgcatcccttatgaaatctagcctgggctttgtatactagcctgtttgtcctttggcctaaaaagtattttacttaccattcttgtgccactaagcagattttaacctctctttcttcaggaaacagaaacctcagatttgtttttgcctgatgatgacgatgaagatgaagatgaatatgagtctcgctcatggcgaagatgaaatctgatgctagctgtataatttttaggaatattgtttagaagaacaacttttaaaaattatttaaaagaagtcaatgagccaaaaaaaatttttttatttttcttttcaacacagtaggttcaagaacagcaagtttgctatttaaacacatctcataactgtacatgatattaaagcaccaaaggcctagtgacttttacacagttgtgaagatccacagcaatgacatggataatctctagagccttattttccacaccaccttttttttgttgctgttggtgttggattatgatgtaaatgacagggtgttcagaaattttattttggattataatctactgataaaatttaattaaatgtcaaaatcacctgtaatcttttaactctcagttgttatggatgggtcatcagacagtaggaaatatttgtaattaaaatacccttttgctttcaagagtggtcttggaagaaaaatatgtttattttaattttaatttttttttttttttactttggaggagcccaatttgtattcagtctaaatttgtttttcatggtttttatgtgtggtagtactagttcagtgaaaatcacaacaaactgtgtgttcttaaatgctacagcaatggtagctagctctatagtatttccattctcttgtcatatgaactcctggacttttcctgctactgattcttagtttgctttgatatttagtgagcgctggttcggctggtctttttaaaaatttttataactcagaatgtaaaaggctttcacctattgcccctttctcgtcccccttttcttcctcttgcctttctattaataggcctgacttagtcatcattgatataagtggttcatttgggcaaccgcaggcagtctccaataaaaggttcaaaccagcacctggataaataagtgatgttttgatgagaatgatggaaggattttggggagaagagaatcaccagctttattttttccctcttttgaagcttcagttcagtatagttacacagaagggtttaaaaatgtctgaaattcttttcctaaatttaaaccatgatggtgaggtgactggggggtggggggtggaggtgggagggggttgagggctgagtatgctagtaataaatgggagtcatatatgactttgttcagatgaccttattttttcataattttgtagcttgttgctatccatgaacatacgcatccctcagtagacagtttcctttactgtgtgcatttttactgtacactgtatagagtagagtatctgttaagtaaaatatatatgtaaatttatgtcttcgtgttctgaatgttagatggaaaagcagaggagcaacactacactgtactgacccctgggaaaataaaatgattaatgtacctaggctgtcactttttcaaggatatacacatctgtgtttttatatatgtgtggtatgaaaatttgaaacctcctgttgtctccaaaagggtcttggtgaccactatatcaaggattttgtttgctgaggtaaagacaatttctcaatatagaaactattcactaagaacttaaaaccatcaggattctagatttacttagctataagaagttaaatcccacgttctgataatctttattcttctacatgttttcctggaatgatgtgtcaaaccagggtcatttttaagttcatataattttctttcataataatgaggacttcctttttctaggttattgttatatttctagtaacactgaaggtaaaataagcttataaaagaaggaaaacatcagaatggtgtatctagaatacacaatcttgctccttactcctccatcatctctaatgaaatttttcttgatgtctgtggctcagtcagtatatattttgaaagattcattgtggtgaatattttgagtcctgacagtttaaacgtgatagagggaacaaaggatttatatattttttgtacaaagttttttcttaaactgtataattttgtaaataatttgtttgggttttttttttgtgtactaaaactaccagcgtatagatttcaataagaattgttgtatttttgtatttggaaactgaaaattacagtaaataaatggaactctaagaaaaatttcagtagacagttcaacagaatgagattccttttcatatgatttttttgacctcaaaatggacatcttatttcactctcagtaaaaagttgaaaatttgactttttagtattgggggcagaagatagaagtgtgttaaagtgaaaaacagttttttcagtaaggtttgaggccctttctataagttttcagtacaccttaaacaggactaaaaatactttaaaagtgtgctttcaaagaattttaaaacatgtttgactcaaagatgaatttgaagtgagttaattataatactggaaaacttcaggttagcataaaatagtttatatatatcccctgccccctttgggatttacttccaccatcaaatcttcaactgttagaatttcacttaaaagtgaataactgccatacatgttttcttggcatcttcatttacagaaataacatacagcatctaaagcaagttctgtccctcttaatgtgtatgacatctttttaagtagctgatcagcaataatagccaccagttgactaggtcagcctgatatactagtggatcactgtccaagataaaaaggtaaccccaagtattgcaaaatttccctcaatttctttatgtaacattgaagaaatgttgttaccagctaagatgataaattggaaaacagtcttgttaaggtgaaaggggtccttggtgatggatcattatttcaaaaaagaaaaaaatcatgtgaaaaggaatagtggttcctcttgatgtatagtatgcctgtattatagtttttacaaaattgtgaacttgtgtaatagtataataggagatattgttgaatttctaactgtttatacatttaaattcatatatgtaatgtttgttttatcaattacaatctgaatttctaagaagcatgttgacttttgcaataaagatgcaatatggaatggttcacaattggaaaaaaaaaagaaaaaagatgaaagtattacaaatttaaaagaatttggaaaatttatgaaccattccaaaaattataacaatcaccaaaagagctgtaattctggcttgttctggaaagaaagaaaatgtgtgtgtatgcttgcttgtgagagtgagtgagtagtggctatgtatgtgtgttttatgttgtgttcataaacatgagagaacatcactcaatatgaagttgggttcgaagtcactggctattaaatattaagtaggataactttctcaacagagtagcctggagaatgaaagagaaggtattaaaatgctacttgtaagtaacctttgatagccacattattttgttcctggatggttcttggtatcccagataaaaaagcacaaaacagtttcttgaaagcaattattttaatgttgtcttgaggatattcattatgcctgccatcagtaggagggacattttccttaagtagaatagggagaagggaaaaaacacctagaagagatgatttaaacataaatcagttctgaatgtgacaaagatttgtaaggacaaacgggaagatagtgatgttatgcactaaggactgggtggtgatgagaaagagaagggaagtgtatcacctggttttcccattttaaaaaatgctattataaaattccccctccaatgattatgcattgtttaagaaggaacattctttgaatttcagcttata

SEQ ID NO: 118150 - DNA, 1292 bp, Homo sapiens
tcttggacagtgatccactagtatatcaggctgacctagtcaactggtggctattattgctgatcagctacttaaaaagatgtcatacacattaagagggacagaacttgctttagatgctgtatgttatttctgtaaatgaagatgccaagaaaacatgtatggcagttattcacttttaagtgaaattctaacagttgaagatttgatggtggaagtaaatcccaaagggggcaggggatatatataaactattttatgctaacctgaagttttccagtattataattaactcacttcaaattcatctttgagtcaaacatgttttaaaattctttgaaagcacacttttaaagtatttttagtcctgtttaaggtgtactgaaaacttatagaaagggcctcaaaccttactgaaaaaactgtttttcactttaacacacttctatcttctgcccccaatactaaaaagtcaaattttcaactttttactgagagtgaaataagatgtccattttgaggtcaaaaaaatcatatgaaaaggaatctcattctgttgaactgtctactgaaatttttcttagagttccatttatttactgtaattttcagtttccaaatacaaaaatacaacaattcttattgaaatctatacgctggtagttttagtacacaaaaaaaaaacccaaacaaattatttacaaaattatacagtttaagaaaaaactttgtacaaaaaatatataaatcctttgttccctctatcacgtttaaactgtcaggactcaaaatattcaccacaatgaatctttcaaaatatatactgactgagccacagacatcaagaaaaatttcattagagatgatggaggagtaaggagcaagattgtgtattctagatacaccattctgatgttttccttcttttataagcttattttaccttcagtgttactagaaatataacaataacctagaaaaaggaagtcctcattattatgaaagaaaattatatgaacttaaaaatgaccctggtttgacacatcattccaggaaaacatgtagaagaataaagattatcagaacgtgggatttaacttcttatagctaagtaaatctagaatcctgatggttttaagttcttagtgaatagtttctatattgagaaattgtctttacctcagcaaacaaaatccttgatatagtggtcaccaagacccttttggagacaacaggaggtttcaaattttcataccacacatatataaaaacacagatgtgtatatccttga

SEQ ID NO: 118151 - DNA, 1379 bp, Homo sapiens
gctttgttcacttcattttagcctaagaggtcatggcgaaaaagaatgagttctgagattgcattttctgtcgcaaaaggttgatagcagattatgaattcatgataaaattaaaaactgaaatcaggcaaagagagaaatggttttgttcatgcatttttttccctgctagcttcacaatggaatttttatatctcataataataaaattctaggcattgcaatgagtcctttgcatcggtgatttcatttatctctcatgatagacatacaaagtggtattagcatgcttacatgaaaccagaggtacgctgtaagccaggattgaactcagggagcctgattccaaagtctgtgctctacttgtcaccatacaatatgcctgccccgactgaaattcgtgctgtgaataaatgttctttgtgtactaacgaagtaatcttcaaactgcagaaactttgccacaatgctctattgctggcagggccttgagaatgatctaacatgaccctttctatcttttttattttatttatttatttatttatttatttatttattttctgagatggagtcttgccctgtcacccaggcttgagtgcactgttgcagtctcggctcactgcaacctccgcctcccgtgctcatacgattctcctgcctgaacctcccgagtagctgggattacagatgcctgccaccatgcccagccaatttttgaatttttagtagagataggttttcacaatgttggccaggctggtctcgaactcctgacctcgtgatccaccctcctcggcctcccaaagtgctgggattacaggcgtgagccaccgtgcccggcccgaccctttctatcttaaagcttattttataggtgataatgtggtcaggtagttgacaggggacctcttctctaatccccctcttgttctaaaattgctacagaggtcaaattgatacctctttcttggctcttgccatcacttctcataactctcctctcctttctcagggctgacctctgcacctccttatattacatgaccctgtccatctcagtcctcaggtgattggactgtaggtgaacacctaaccttggggaaagcaatcactagtgggtagaatcagccaggctgtcttctgggaatctggacaaagaaagagagagttgagaaataatgctgtctcctttcttaatcagagtgatgctgtttagaaattcctgaagtcatcagcttcataattacatcctacagatctgctctgttgattctcagcctagagcagtttgtatatgttgccccatctttgcttcttttatccccttctctcttttcagaactctttacttgggagtcactaaaacttttgctact

SEQ ID NO: 118152 - DNA, 1716 bp, Homo sapiens
gtaaaccctttacttaggtttgtctcatttaatcctcacaaccaccctttggagtagttgctattaacattttgcaggccacagaccagaggggtcttcagttgttactcgcccatcttacaggtgagataacagcctcgtggaggttgagtcagtagaataagattgcataggcggatttgtggctccaggaagtggcttgaactcaggcagtcaggtttcagagcctgcaatcccaattggcgttctattcgtctactactcatgccatttccttgaacagtgcagtgacctttttttcccctggaacctcagtgtctatgagtttgtaattaaaatttggtaaaatgagagtgacctggagaaatcttttggtcagtggtttttgaggaaaagaggtattatgctttatgtgtatttggtactttggtttttttctgtatgggagaaatggcatttcagatgttcagctcccattctgaattgtgctgttgtcaacgtttgaaaatgaaaaagagcagggtagattatgaagactctgttgatactgtcttgaacttaagatgaaattgtgtaaggaaatgggtattgttattcaaggttttagaagaggaaaatgcctttcagattctgtatggtcgcacacacaaatctccactttggcagaaatgaaattttgttttatttcagagatgaatctgaaatcctttaaactccatatgtatacagtattaatgagtgatcaaggtgaattgtcagcatctttaaatattagcgatgccaagtttattcctgatttcgatcttaaagggaggttacttagctagtttcagatggatttattagggaacattcttttgcattttagaaagtatctttctaaagctttaaaaaaatccaaatggctttattaatagtctagacactgttgcacaactgatttgaatagagctttaatttgcaaatgaatttgccctgttgcaaatattttataccgtagcctcttggattggaagttgcttgcagagcatactgtacagatctttattttagcatttctcatgaaattaggtgtgtatgtggcctctttgatggcagaagttggggcttaatttttgcattatatttgtaacctgaatgtacttcatggtgtgtctgtcataaccgcctggcaaatgagatgttctgtagttatgttgtaaataaatgaagataggagatttaaagatacttcacttattgggccgacatttattgtgtgctacatgacagttgctgacctaggtgctggtaatagtgccctgaaccagaccgaaaaaagaggtttgtcctgcaggagcttccagcttaagtaagagccatctaaattgtaaatgaaatcaaccacatcaaatgattaaatctgcctgtaagtgtgaagtgacttacacaaggtcactgggtagttggcagggtctggactaaacctcaggtctcctcaatcatagtttatacaatttgcccccatatatcggtagcatctttttatttcttgcccctccagttaaagtattgtctttagcattggggagattgcatatctggatagagaacttctattgtagaaaaataccttatgtttgtatttccatgatgttcttgtgaaatatttttgttccttctattcatgcaagtaggcttttgtttttcagaaaggttgtaagtggtaggaatgca

SEQ ID NO: 118153 - DNA, 1119 bp, Homo sapiens
tggcacaatctcggctcactgcaacctccacttcccaggctcaagcaattcttctgcttccgcctcccaagtagctgagattacaggcgtgcaccaccatgcccggctaatttttttgtatttttagtagagatggggtttcaccatgttgtccaggttgatgttgaactcctgacttcaaatgatctgcctgccttggccaccaaagtgctgggattacaggcgcgagccaccgtgggccacctgaatcctggctttagtactgaaccagttgtgtggccttggacaagtgacttctttgctttagttctttatctataaactgagattaatagtatccatctcattgggttgttttgatgattaaaagacttaatttttgaaaagagcttagagcaagcactgcctggctcatagtaagcacttttaggagttaataattctctttacaaaagcacttgggggaagagatagataatactatctcatgtgatattacttatttgcttaaatgctgtggagaaaatacattagggtgttgagagtgaggggtggtggggcagtgtgccctacagggaaaggctttccctttaggtagagactactaatgatctgccaagtgacccccctgccccctttaaaaactttggaagtaatttcaaatttacaaaatgtcgcaaaaataaagctagggtgttattcaatgttaatattttacctcttctgctttactatttgcgtgcacacgtgcatcctctttgttattctgaactgtgagggtaaggtatacctatggctttttacccttcaatacttcagtattttctaagaatagagatattattttacttaactacagcctaattatcaacttcataaatttgtaatgatataatactttaatctgttgtgcatattccagtgttgtcagttgatctggcaatgccctgtatggcatttcctcctgttagtacagaatccaatctagagttaaaattgtgttgttattggccgagcgtggtggctcacgcatgtaatcccagtactttgggaggctgaggtgtgcagatcgcctgaggtcaggagttcaagaccagccttgccaacatggcaaaaccc

SEQ ID NO: 118154 - DNA, 1141 bp, Homo sapiens
gctttaaagataaaatatggttccattcttgtttttaataataactgacagattttatgataccattgatttttgcttccgctgcaggtttattattataatgctcggacacgtgaatctgcatggaccaagccagatggagttaaggttattcagcaatcagaactgacacctatgcttgcagcccaggcacaggttcaggctcaggcccaggcgcaggctcaggcccaggcgcaggctcaggcccaggcacaagctcaggcccaggctcaggctcaggcccaggcccaggcccaggcccaggcccaggcccaagcccaagcccaggcccaggctcaggctcaggcacaagctcaggcccaggcccaggctcaggtccaggcccaggtccaggcacaagtgcaagcacaagcagttggagcttccacccctacgaccagtagcccagcacctgcagtatccacttcaacatcatcatccaccccttcctctaccacttctaccacaacaactgctacttcagttgcgcagacagtatcaagtgagtaccactcagcatgtgtttttatataggggctagagacatgaacaagtaggggactacatttcatattgatcccagtgtttctggtattatcctttaataccagaattatttaaaatacatttttgacactaaaacttttgggttagaggaaaacaggaatttatattaacaggagaaattatttgcccagttgcagtttatgaagctaaattgagaaagtgcaaagttagctgttccacttggccaacagtaatgccgggcattgtgggtttgcaaaataagtgtaagtcttggtccctaccttacagtttccagtattcctaatcgaggaggcaagaataacacgtgttaaacaattagatattggtgtgcaaaactatacagtgagaaagatgtaagaatttgagaagtggataaatgagtgggtggactacatgggtatttatcatgaaggaaacggagtagggtttaagcaggttcacaggtaaggaaaggattttcaggtaggagaagcaacatgaataaaggtcaggaaaatgataaatgtagtttatgggtttttaggaaacttctgaggtgagagggtgttttttt

SEQ ID NO: 118155 - DNA, 3493 bp, Homo sapiens
ggtgatgagctagataatttaaccatactatatatagtccatgtctgttttcagagtagtgtgtcagtaagctcatagctgtcttgtgtcctgtttgtcagttttgctttactcttcagtgattgggaggactttattcccagaaatataatatagcaaaatcatattctttttactgcttttaaacatcaattttgatgttgtctacgtattccagtgtgtgtttttattttacttgatttagtatcataaagtgttgtcttactgcaatcttaatatttctccatctattatatatagtcacttgtcttttttagttaagatctgaggctgggttagtatattttgaggcctagtgcttcactagctactttagcaaatgaagttagtgggaatttacccactgaagtcttagataccattctcccagtttcccattattttattgcttttgttcttttcctgtcgtgactcatggctgctaatcaaattcagaaaatgctgtgctggaaagtaagaggaatgggttgtaaatattttttgtcatctccattggtgttcttttccacttgaaatttgatgcccttatttattttcctgactatagtactttggatcacaattttagcaattatctgaatactataataatatttaaattttaattttctgagctacagtatagatctgtggggtaaatgggactaaaaattaagaatatattttaatcccagttgagcataaactcattttgtgcaagtttgtgaaaaatgatgaagaaatcctacttctcagggaagttgggaacaatgaccagatacattttcagccagtatagtagattacaaatgctaaatggtatatgtatgggactgggcaaatgttgcatgtactttgtatttttcacactgttataaaattatattaatatgatactgtaccctaaggctaggtctatgctagaccaacaattcattcctgggcccctgaagatacttgtttggccctgctgtctatttagccaaggtgagtccctcattaacaagtacgaaattgctcacatcttcccagcctaagtgagtttttcattattagaagctagaaaaagatactgacagattttgttgtcagttggattattgggtgatttgtattaaatagtgtgcttttgtttagaacaaagttggcataaagattgggaaagcactgttttcattttatttcatttgacaaattcattcttagtccgatacaggtagacatttttttctttacatcaaaaaaagatgaagtatttgttaccaatgaattaccaaaatgaattttattttggaactagatgggttatgaataaataacaaaattgttttgtaacatgtgagaattgaaactgaaaagtatgaaataaggattttagtttttagtttgattttaaatgcaattactaggaatgggatgttttattttcgatatttaaaaataatgtgttagcagaacccaaatgatcctgaatttcacattttcctggtctctcacaatggaaacctcagtttaaaaaaattttatttttttaaaataatgagagaaacctgagttgtttttgattccattcattcatatccagttagtcattagttatttgcttatctttttctgttcttttcttcctatgcatctgtgaggttaattcatcaaatgaaacctgtttattactcttccatacaggaacctttagtttgctatatacccatttaccttcatgaaatcacataaataatgtgaatgcattcttataaaaagttcaaagtctaacaaaacgtatatattaatagtaaaatgtgaaagaggcattcacagagggtaactaccattaatgtattttgtcttgtattctactagataattttctctatatttacctaagttctgcccttttcctatccatttaagggcatactccttagccttttgttcaaggctttctaatttctgcttctggcctacctttccagccacacaactcactagttttgttggtatgcctactgtttcactcattaattgcttgccttcaattttctaaacaattccttttggttctttactctttgccttattcatacttttctcactggtttatttttttcttctaccccttcctgctgtttttcttgttgaaatcttaatttttcaaggcgcagcatcccaatataaacttttctataccctctcacagttagaaatgttctttgggtcttgatttttactcctatatgtttatcccattttactttgtattcatttttgtatttcatttaagtattttcaagcttcttgaagataagaccttttgacaaatttcttgcagtgcatagaatggtcccttaaatacttaaattactgaatgtgtaaatgatgaatgaatatagtaaaatgatttatgaaggagtgatacatgtttttgttttatcttttatcagcacccacaacacaagatcagaccccaagttctgctgtttcagttgccacgcctacagttagtgtttcaactcctgctcctacagccacacctgtgcaaaccgttccccagccgcaccctcagacgttacctcctgctgttcctcattcagtacctcagccaacaacagcaatacctgcttttccaccagtaatggtacctccgtttcgtgttccccttcctggcatgccaattccacttccaggtaaaccaacagattataatggtctttccagctatgttttcatattgtcagttagtttgttctcatgtgtctgttgcgtttgaaatttgccttgaatctcacctgtttgaaacgtttttgaaagattcatggctaactgcaatattttctcttaagttttggtaaatgtcctttttttgttgttgtttacatgtcctaaaattagagccacatttaaagctacacttattttggataatgccctcaatgagttaaaaatgattatcttttcatgtaaataatgttctaaatgcaatatttttgaagggttgagtttatgaagttgagaaatcacgtcacaatagctaacacaagttggatgatttatatacagtgcactgttgtaagcatgttacatgcattaactcctttaatttttacaacccatgttacgagataggtacacagacaggttaaattacttgcccaaggtcacatagctaataagtgatgatgttgagatttgagcctgtgccctccacatccagatagtaagcttttaataactatgttaatactgggaagaaaatgtgagtgatttaactataaaacaattcatataaaacaggaactagaaggttcccttgtaacaattatgaagtaaagcataatgtgcatcatttaaaagtttaaattgttatggtgaattaatgtgttatattgtcttaagagaagtcattaaaactagagaaagaattaagaaatattgtggagtggaattcttaccatag

SEQ ID NO: 118156 - DNA, 1054 bp, Homo sapiens
tgaatagaacttaggcctcttgtctctcaagttcacattccatccacttattgctactttcttatactcctttctgtgtaagaatacagttgtgatacagctatttcttagatttgcacacatcttaattatcactattgcactggttgtctttttctttgtgaccactctgaaaaggacaccttcagatataccttgtcaagaaagaaaccaaaaatttcaggttttttttttaatttggaaaaccttgtatacattgttgatgtagtgttagataattaaatgcccattatgtggtgtttaagaaattcaaatcatttaaaaagaaaacaaaagatgttttccctactattagggattatcccttttctagattaaatttaagacaagcagctggatacttttctctatgtgtaatttttctgggaaaactaaatcatagatggagaatagcctgatatttgtcacaacctctttttgtaattttggtctgctttagggttaaggacagtattaagaccagatcgtggattctgagtgatctcaaggagttggggttgctcattttgtagagggaagattgagaggtagcatgataatgttgttgaagtattttgaaaggctgtcatttgaacaacttttgcttttctttagaggttcttattaggactaatggatgaaaggtacacaatagcaaaatgtatttctatagaaagtagaagtttctcacaataaaatccctctggctctagcttcattttgatgtcatattttccccaaaatatgatgacatattttgatgtcatatggagcaagcatatccttgctccatcattaaaaagatttggacaggtggtggtgaccatttgagtcaccaaatgaagcagtacctgtgaagtttggcagtagaagtcattcaataaacagtagccattagtgacattttgggggtcagttggaagagaacttgaattggatagtctaagatttctttggagagagtgagtgtcatacaaagtgatatattaggctgggcacggtggcttacgcctgt

SEQ ID NO: 118157 - DNA, 2041 bp, Homo sapiens
cggatggtcaaacaagataaagggaaggagtggaagaattaggtaaaatacaagagtagggggtggagtttggataaatgggtctaggattataggagttctacttctaaaactataaaatcttatctggaattttaagaaacttaactgtctgtgacattggaatcatccaaaatgctgagtggaattttcttatttcttagataataatttgaggacagagttgtaggaaaattgaacaaaagctccctctaaaaaaaaaggttaaaaatttagatttttattttgcgagtattcacaatctgcatgtaatcactttgagagaaacttcagtgtatctttttagcatgagaagaaacacaggacctttctatatggtctgtatgttgatagtcaaatagaagagttctgcgagcccaactgatttttaataatggtggttaagcctatgtatgaatagatttgattttcttctgcataagttgtatagttaaaattatttattggaagatggttttggagaacagtctttgagagtaaagttcgtatattcataagaattgaatttcctgtgctgagtttagtaggttcagtgctcctgcagatggcagtatttatactgattaaacttaatccatgctgtaacttccttaaccaaatgaatttttccattgctttctttcaacattagggaaaataaaattatacatataactttattcaacatgctttcatgatccaatgtttttattttagtttaaaagttaatagaaagtttactttattctttatataaaatagtaattaagaaataaaggtacttttcaataattgacactatttttgtttgcttgtgtgaacatagttaaattgtatacaaacccaggagtttaattttacttttagtctcagaggtaggagaaatttttttcctgtcctttagtggggaaaatagtttattgttactatttttaatttttatagagtaccaactaagcttagttttttcagctgaaaaaaataaaaaagtaaaaattattgcccctatacttttcttcagactttggccttttcctctaaaagtttttaattttctcagttaatcagtcttagttttgcagcttttcttttcattccctttttaaaaatcaccattgtaatgcatcatgatgagtcttcattcttctaagaactgtacataattttcattctttaatacaagtactacttctttagttagcttaaatgatagaagtttctgcagccatcagcccaagtagtcattagtggtattaaaggggctgtatgtttcttaatgttttagcctgcttccacagtgttctaaggccatggggttccatagagcaggcactaaacatggatattttggcattagtgaaatgctaccttcctcttcatctttgcctttcttttatttaaagtattatttgcagtggaatatttggatccatctcataccttactttcttcctctcctcaccacccctagcttattccttttttacttctgcatggttgtactccatgcctcagctcctgcatgtagtttcaacttagcggcagcatagagaaagtgtcttgtcagtgtcatgctgcatctgccttttactggtatctaagcaacagcagcatgggtttgatgtcctgtgggaaaatgtcccacatgagaatttgttatgtatgtgtaatgaaggggctttcttttgttgaatttaaactcttaagactccttcaatatgttcagagctggtttgataaaaaggtaattgatggtatcatttagaattagtgtcattggatttggcagcacttcccacaaaatgtcaaacagaaagaaattttactccattcttggtctttttcattggaaatagcattctaaattgtagtggtaaattatttccctgaatcccagtggtagccgacatacaatggcagctttccaacgtatgcttgcttatccattttacaggtgtagcaatgatgcaaatagtcagctgcccgtatgtaaagacagtcg

SEQ ID NO: 118158 - DNA, 3855 bp, Homo sapiens
tatttttgatgtgtgtttttaagttaaatataaaaaaacatttccatgtgtaaagtgatgtgattatgcttgcatgctagtgagtatatgtgtgtgaatacatgtgtatagtatacatttacattttaaagttattgaagtaagataactacctgaaacttaaaattcagtataggatttgaggactttttttttttccagttttgattcacatatccttattttaatagtattttatttatatattaccagcttatttagctgtcttgtaaaaaatataaatcttggtttgtcttctaaaaagtagacgagctttgctttctcttaggaaaagagtaaacaaagggtataaggatatttgagttaatcatttagagtcgataaactcagtcatttgctataaaactgagaatattcatacccttttagttaccttaaaattaaaaataattttgcctaaggaaatatgtgtagtaaatatgtttgttgtcttcattagaatttgataaattatcttcataaaaatagatttctattcataagtagagaatataccatgtttttaaatatttattatgttaagactttgtcataggtgagatccaaatttctgactgtttttaagggttgaatttctgtgtctaattgagtttaggcattagaactaaaaatccagggaaatagaattaagtggtatttttatgtcacctttttatatgatttttgttttgttccaactggtccattcatttattaatatttaatagaaagatttagctcatattttagagttttattttgtattgcggtttgatacttggatctaattttttattattctttttttaggtgtattgccaggaatggcccctcctatcgtacccatgatacatccccaggttgctattgcagcttcacctgctaccttagctggagcaacagcagtttctgaatggactgaatataaaacagcagatgggaagacatattattataataatagaacattagaatcaacctgggaaaaaccccaagaactaaaggaaaaaggtatatagtggttttaatgacttggaaagtagtataaactgtaataagtagaatggtatttgaaattctgagttaatttctttttaacatatttgagggattttctaattacacagtcattggattgtttatttttactgaattgataaatatttattttaaaaactagttctacttacatgtttgtcatcatttttttccatctggagaaatggttatatgtacgtacatatgtatgtacatatttttactgttaggaattttctaattatattgcataattattgtaatcatcattgagattgataatacagatcaggaaggaatgtgttttttatatgtgttctgaagaaaaaaatttaggcccttagggtcttagatgtagaagattcataattttctatatcacaagctgctattattattgttgtttttaaaatttgagacagagcctcactgtgttgcccaggctggtcttgaactcctgggcttaagcaatccttctgcctcagcttcccaggtagctgaggattataggtatgtgtcattgtgcccagctcaccaaacccccttttctattcctaagtatcttagtatcttatcccttttagcaaaatgaatgattgctacaaatgatatatgaatgacctgaaagatttaatgtgccttcgaagtcagtaggtcatcttcaaatcagatagttacctgattggtatagcaaggtatttgaagttgtgcattacataagattcaaatcaaagatataaggaaagacattttatcttcatggttaatacttgggaatggaatatcttaatggcttattctctgaaagttcttagaaaattacgtcaaaacctttgagtgacattatcttaatttttttcatagaaaagttagaagagaagattaaagagccaattaaagaaccctctgaagagcctctgccaatggagacggaggaggaggatcctaaagaagagcctataaaggagataaaggaggtaaagggccatgacctgttaacctgggagccacattaattgtttcctacagcttacttgtatctgagtatctattggatagatttaaaaataattgttataaatttgatctctgaaattttaggattcttgcaagttcttaattcagttttttctttgaaagtgtcattaaattacttcttgtactaaactgagatccatagaaagacagggccttggaccagagcttggacctgatctctaaccttctgacttataaactgagtggtatttgttaaaattataagtgtaacttcttacttggggaatgttagatatattttatctgtcctttctgctgttgtgttcttgcatagcatgatccatgtatagcactaaaagagttttttattcagtgaaggatcagtggtagtcgtgtttcagtagcaggaaagctagcagaaataagaaacaaccttaaatgaagaggtatgtactgtagttctccatatctgctcctaagcacatggttagtgagtctataagataggacaagctgctgctgctgggttctgctattgtgaaattcagctctttctgggggatgaggatttagaactttcttcctactcagagtctcctcttattctagcagcagattttgtgttgattgcactttgagctgtttgccttcatgtttttgtggaacattcaggtattgttaatgtgatactaattagagtaatatcatttcttgtaggagcccaaagaagaggagatgactgaagaagaaaaggctgcccagaaggcaaagccagttgctactgctcctattcctggtactccatggtatgtatttggctcaagtagtaattttttttttttttttgagacggagtctcactctgtcaccagggctggagtgcagtggcacgatctgggctcactgcaacctccacctccctagttcaagcgattctcctgcctcagcttcccgaatagctgggactacaggcacacgccaccatgcccagctgatttttgtatttttagtagagacggggtttcaccatgttggccaggatggtcttgatctcttgacctcgtgatccgcccgcctcggcctcccaaagtgctgggattacaggtgtgagccaccgtgcccggcctcaagtagtaatttttaaaaatcatacttgattgttacatggtttattttgtagaaagaaaaagtactttaaaaagtgtatgtcaaatatgtttttatctactgaatattttggcctttgttgtatttgagttattcaaaactgaagttcaattactacaagtgtcttcctagtactactctccattaatgtgtattcttcataattatagacatgaccactgtgagatcctgaatctactttttgtttaaaatattttaaatttgtttttgcatgtttactcactatgcgattacatttatagaattgtgtaaaattatgtctttcaatctaagtatggcatacctcattttatagtgctccactatcttgtgcttcatagatactgtgtttttaaaaattgaaagttttgtggcaaccctgtatctaacatgcctcttggtttcattttttcaacagcatgtgctcattttgtgtttcggtgttacattttggtaattcttgggatatttcaaactttttcattatttttatatctgttacagtgatctgcgatcagtgatcttttatgttactgttgtaattgttttggggtgccacaaaccacacccatgtaagatggtgaacctaattgataaacgtgtgtgatctaa

SEQ ID NO: 118159 - DNA, 2336 bp, Homo sapiens
gcttccattttgattgatgccaaactttaaggaagctgtactgtaggtaaaatgctatcaaacagcattgcatgctacagagaaatcttttgcgaaagggggagtcaattgatatagaaaacttcatatttgtcttattttaagaaattgccacagctaccccagtcatcagcaaccaccagcctcatgagtgttcagccatcaagagattgaggcaagaccctccaccagcaaaaacattatgatgccctgaaagctcagatgatagcatttttttagcaataaagtatttttaaattatagtatgtacattggttcttttggacataatgttgcacactaaatagactacagcatgatgtaaatataacttttgtatatggtgggatacaaaaattttgagatttactttattgcaatatttgctgtattttgttggtctggagctgaacccacaatatccgaggtacgcctgtctacttctttttttctcttatcttgtttttcccttttcttccttttgccacatctgtgcttcatttcctgttcctgctccaacttatttaatctatatacaatccacacattgcaatgatttggcttgtttctgaagtcttgtaatctataggttcccttctgacttcttttccttgtttttgttattgaagaaataaatgtttttcctatagtgttcccaagtctggatttgtccccatggtactgtctaataggatcctccattcctgaatttcctacagacaggcaagcaggtctagaagtgtgatcagattcggatttaatctttttggcaagcctagttcataagtgatgattattattgtgtagatcagatgttttcaactaggagtaattttgcccctagtggacgtttggcaatgcctggagacaatttttggttgtcaaaacttggagggtgttagtggcatctagcagatagatgctagggatgctctaaacatcctattatgcactggactgctcccaacaagaattacttacctagcccaatatgtcagcagtgtaagattgaaaaactctggccaagattgattaaatcattaacccgattaaatcattaacccatttatgctgaaggttgcaaattttttttgtgaaaaatcagaccttggcaatgaccttgagcagtaggatataaatcccacaagcttagcgttccaataatggaacactaggcataactgtgttaagggttgaaagtagtggtaatgtatttcttttattcccttttcattaactgggatgcttatagagagatacttccccttatcaccattggtcacttagaggtacaaattgtataggaagggaagggcttagcagttttcagaatagtgagttggtttgagtattattcataggtttaaatatattttctatgtttttaatctattgcagtttttatccttattgatgtttaaaattgtctcatctttggtcaggagaagcctcttgcgctaactttttaggtttttttttgttaaaatcctctgtagcttccctgctttctgctgtgacaagatgttctaggcttatcttgtatatatttcctgtctcagacctagactgagccatttctgcagggggctcttggcacttttgtgggaagtggatagtttgcaactgaattagtcattatttttagacttctttggcagacccagctggaagatatacacattcaaagatacagcatgagttgataccattacttgccatttagatctacctgaagatttttattgaacctcatcatctatcttcagtatctcatttcttgctgaaaatactgtttctcaatgatagtgacctaattactcatttgcttttctcagacatgtcactgagtaacaataccaaaactatcactaacaatataattactgaagatagtttttgttgttgctctaggaatgtataatcaaattactgtgttttaaaggcacttggaatagttgttttctgtataatttctatataattattccactgactgttacacaggctcatttaaaaaaaataattatggaaaatatttacttggtttcaaagttataaaaacagtctgtattccaagaatatattcctgggttgtggtttctctgtttgagtattgtacatgaaaagctagtaaccaactccaaaccccctcaatttggagcttcgtggtcctcattaattttcggacttgggggtccgtccccacctcctctgttcttcagatgagatagttaattattgattttttattttatttttttgtgacagggtcttgctctgtcacccaggctggagta

SEQ ID NO: 118160 - DNA, 1004 bp, Homo sapiens
ctttttattttagatataattagatcttaaagtcttcatagaaggttgcatttcagtatgtagttttggtttgttaagaaatattaagaactatagtagctaggatgctatgtctgttctttagctttagaactgcttaatagcattattgttgccattaaactcattctttctgatagtttaaaatttagtactctcaaattgagtgtgccaaaccaaattcctaagcattttaatctctgatcacaaattgctttgcatttcttggttttctcagttaatatgttgatctgttatttttgcttgagtcattcagttatcttgtaaaaaccatgtttggttctctgtaaataactattggtaataagaacatgtcgttcttcagtaccctcatctccctacttgtaacaggctgaaagaagtcctagctgtaaaatatgttctgtaacataagagaatgatattttgcatcaattcttaggtgtgtcgtttggactggtgatgagcgggtcttcttttataatcccaccactcgtctttctatgtgggaccgacctgatgatctgattggcagggcagatgttgacaaaattattcaggagccccctcataaaaaaggaatggaggaattgaagaaactaagtaagttttaaattaggaatttatccactgattttaacattcttttcatattttgatagaaaatgtggaaggcatttagaaaccctttatttttcaaagaatataagaagcattcgaaaaaaatagactgctatcctagtttgaatgaaataatagagattaaaaatatggagagaatttggataagattgtgctttgtaaaatatgtgtgtctttaatttattgtcctactcaagattttcagttagtccaagatatggttggtagtgttgctgcttgcttagtgcttatcaatactactaaaatgctcctcggtgggccttttagcaccttttgtgactagtaatatatttcttgaaata

SEQ ID NO: 118161 - DNA, 2815 bp, Homo sapiens
gatatttgtacgtaatttttgttgtgtatttcttattggtaatttgcccttgtgttgatatgattgtgtttttatagaactgtggcccgcaagtggtatagaagcaagataaatgaattatttaatgcttctaatgaaataaatcctagtgtgtatcatttatagtcattgagacattttcatgcattatatatatgctgaattataagtaatttctgagtcagtgccgctttgcctatctagtgctgaaggtactaggctcaccttcagcaatacttgttttataggtatgataataatactttataactatggtattgaatgatgttgaaacaatatgtgattttcttttgtttttcgtgaatttgtttttaaatatttgattcattcatttgataaatacattaacgtgcattgttaaaaggtactgtaaatcctgaatcaagaaagctttattttatatatttgtaaatttaaggtttgggcaagaaacatttcaaaatgaattaaatttaatgtaaagggaggataaatagaggaagtgtagaattatgctttgtttaatgttttataaagggatgaatattaagaggtgaatatattatgtaaacagtaatttttaaaaagaaaagtttgtgaaatatatgcaaatgactttgtaacaatatttgaaatgtttttgccagggcacccaactccgacaatgctgtcgatccaaaagtggcaattctctatgagtgcaagtgagtgaactaaccataaattgcagcttctttttaatactattaaagcaagtgttctggtagtgattagcagaaggattcattcctaaatattttaattaaattttgtcttatagttaaagaggaacaagaattaatggaagaaattaatgaagatgagcctgttaaagcaaaaaaacggaagtaagtaatacatacgatttgattgaggtagattatatcttttaaaagtcgatttggtaataatttgtgattggaagggacaggtaatgtgaatgttgttaggaggcatgattgctctcttaggcctgataataaatagctttgtttttcattgtagaaaatgtgtcccttcttttgctagatttgtagaagatttgggtattcatatatgtattatgactccaaatgatagttttggaattaattctttttggaaatttattaggtctcaattttatgaaaagttagtttcctccctcatttagaccccaatggataccattccagagatctcataaaaacagacacagacttctccctctttatatggttatcttacgacttacctagtccttgagtctggtcattaactccttggtgaggagagaacccataagcttaggaagtgctctgcgagaaagagactgctaagaagtagaggcattagcttggccagtgctctagagttgggtaaaatgtaaatgttatggcggggggaaggatggggtagagggtatgcatgtatggggaatgggaccattatttagcagcaaaaaggaaagtttgaagacattaacaggaactggttaattgtagtccttatctgaaaaggacagattgaatgcagccaaattatggcaaagaaatcagtaggacaacccctataaagggtagttcttttaaaaaaaatttctttattggcaacaacataaaagatatgaaagaatcactcataatttatcagcgtaacatagctattctcatttttgcaattgactttttagttcttgaccaaatgtaatttttattagttgtgattaactgattttgtgctttttttttaaaaaaaaaaaacctagaataagacatttgttttgttaattattataaatgactgtattcattctgtttatgtaccataattttggatgttcctacgatgttaaacttttaggttgtttttaattgtttgttcttatagacaactctgtaaggtttttaactgcttttatcaggagaatgtcaaagaagtcctttatgtggattgcccgagcttctctatttaggtacaaagctaaaagcctgtttttcctggcttagtttttcttttatttcctttattgagatagatagtgatagtttgtattgtgacattttcatttagtatagttctataaaggttatttgtttttattagttacttcttggatgtcttttaactctaactatttaaatagttttaaaattattattataagagggtatattgtttggcaaattgcttttacctgtttgttttgtgcatatcttaggtcacagactatctcgctaagttcctgcaggtcacggactatgtcttctatttcttttgattcattgcctaagttgctaagtacctctcacttgcatttgtgggttagccttagttccatttaaatctctggggctacctacagtttcctgtatagcatgcttttgaatttccacatgttctgttttcctaattcccttaagtttgtatagggaataagagccaatttttaaaatatacttagcagatcatatttaagaaggaagatctgctaaaatacacccagatattattgaattacatacttttttggattatttacgtgaatgggcctttttcatagtgcatatatttgagaggtgccgtgattccatgtttacaatttcacttgagtaccacacagaaacagggttgcccttacacctgaggtgcatttttggaggaacaagaagtagtttagtcattgatgaacagttctaattccacctaactactcctgggcccatgttgctctctgggacctgtccttcaacttaaa

SEQ ID NO: 118162 - DNA, 1015 bp, Homo sapiens
ttgagattactaaaacattataccacttaataccaatttttattagattttacaaaatattttatgtgtttataatgtaaaacattttggaaaatactgttttttctatatttcaagaactaaaaaaattatattttgtgctgtttgattctgacacatagaggtttactgcagtgttaaacttttttttttttaagtaaggttgctccctttttatgttattaaccagtgtcagggagagacagcccattaaaggtgtatttttttcctaataatgtagccattgtaaatcattagaagcccattttaattttgttattatgaaagttatttatcccttagagttcatttgaaaccctcaatataatttgtttttgccaaaaatatgctgctcagtagtgagtcttgaaaattcctttgattttaagatttctaataagatctgagaattaatattttgtcagttgatgtcttatattttattttttataggagagacgataataaagacattgactcagagaaagaagctgccatggaagctgaaattaaagctgcccgagaaagggccattgtccctctggaggctcgaatgaagcagttcaaggacatgctgctagagagaggggtcagaaaacaatctttgggggagatatttctgttttgtataagtaatataaatatgtcttgctaaaaggtcaaatctaaggttagtgctcatgttatggggggggataaggggatttttaaaattactgtacattttttgcaacagcctttttcttggctaatcttatcatatttaactaaatgccattttactgtccttttaagtacaaataacacttaacatttattgggtcattaaattgtggtgagtaatataagacgagtattaacattacagaatggcggactgcttgggataggtaaggtatatatgattattcttcctttaatatcttgagaatggcttttgttaaaggagaactgatactttgtgatattattattt

SEQ ID NO: 118163 - DNA, 1630 bp, Homo sapiens
acacttccaacttacttaatttctgaattacctgaactatcctgacactgatctccataaaatggtgagtatgtggaaccacttgctatagtgctgttaagctgtaagatttcatttggtaacagtagtgcccatctttgatatttttaatgtaacaattgaaataattcttcacatggtgtgtaccattatgcatgtaggtctaatcatggacttgaatgaagggagaaaatttacaatgtgccagatatgtattttagtacttggaatagaaagacataacttccttaatgtatttgcatcttcattttaagctttgtatcttttttaaaaaacaaactctgtgtgagttttttattctcatttcagtttatggctctatcaaaatttataaattagccttgattccttacttttcccacttcccctttacagtcttatcagcaaatctataatctaccttcaaaaaattttcaaaatctcaccttttattaatcatttcccccattaacaccctaatccaagccaccataaacaacccttatcatctgtgtagcctattgttgatctccttcattccatctgttcttgttcctctttagtcaagttctttttccacacagcagccaggctaattttaaagtttaagtgatactaaattaagtcactgttcccttgcttaaaactgtttagtgctttccatttcattgagaataaaattgaagctcttttcatggtctctaatattctacatagacttacccctgtatacctcttgatggtcttttttaatgtctgttgattacagccacactggccctgatattacttgaacaagccagtcattctggtgtttgctattccttctgcctggactgtttttcctccaggtgttagtacagccagcttcatttcattaaggtacttgtcccagtgccttctaatcaatctaagtattgtctctttgccttttctaatttctttatggtgctcatggctctaattgtataaaattatgtttttattatttgtctcctcctcctgcaaaatataaattgtatgaggctagaaactttgtcttcattgctttatttgtagtgcctggaacattgcctaatctaaatatctctgaaggctttaaaacttttatgacgtattcctcctggtactgagtgttatagtgaaattagaagtaacatattgagaactatagttctttcccaatttttgaagcattctataagctgatggtggtatctccttaatagaattacgtttgaaaagagaaaatattattctagtgttctgttttcaataaaatctctagttaaaagttctcatgccatttatttatttatttattttatgcatctatttatttagagatggagtcttgctctgttgcccagactggagtgcagtggcgccatctcatcttactgcagcctctgcctctcagggttcaagtgatcctcccaccttagcctcccaagtagctgggattacaagcgtgcaccaccatgcccggctaatttttctatctttagtagagacagagtttcaccatgctggccaggctggtcttgaacaccggacctcaagtaatccgcctgccttggcctcacaaagt

SEQ ID NO: 118164 - DNA, 1078 bp, Homo sapiens
ggcctttcatggcttttaaatagaattcttctctcaacaatcagaatgtaagaactgagaagaagtagtagttaacatttggcatttaaaaataaacacgttttttgaatacttggttttattatttgcataggagtataaaatgaacaaccagaaaggtgctaggttgcacattacacatttgcactttgtaatttcatatttgcagtttgtgctttgatttagaaaacactaataacttcattggaaatgccttgtaatacaaaattatatttcagttgtccttttctagttatttgtagattcgtgtacattctgtatcattataaaagatgtattttatataattgtaaccataaattttaacttagaattttcttttgataaagtttacttaaggggtctgaaatgtttttgttttatttgttatgacaaattttaattgaataacattttccataaaaactagaccatttgcataaaggatgctactaggttctgacatagatagtcgttatgctattaacactttaaaataagttctctcttatcttatttcaaaataaacattttaaaagcttttcctctaagaactggaagaagacaaggatacccactttcaccactcttagtcaacatagtgctggaagtcttagccagagcaattaggcaagagaaagaaatagagggtatccagattggaaaggaagaagtcaacttgtttctttttgcagatgacaggatcttacatatggaaaaacctaaagatgctactaaaaatctcttagaactgataaattcagggtgggcgtggtggctcatgcctgtaatcccagcactttatgaggccaaggcaggcggatcacatgaggtcaggagttcgagaccagcctggccaacatggcgaaacctcatctctactaaaaatatctctactaaaaatacaaaaattagccaggggtggtggtgcatgcctttcatcccagctagttaggtggctgaggcacaagaattgcttgaatccaggaagtggaggttgcagtgaaccgagattgtgccatcgcactccaccctgggt

SEQ ID NO: 118165 - DNA, 1052 bp, Homo sapiens
cactgttaggtagatgttgagtcccagtgtctctttgtcatatactcttgttggaaaaatggtatcttctgctatgcctttatacaagcagaagtaactgccaaagttagcacacttgtaattttgttacagagcaacttttagtgaatttgcagccaagcatgctaaagattcaagattcaaagcaattgaaaagatgaaagaccgagaagccttgtttaatgagtttgtggccgctgctaggaagaaagagaaagaagattcgaagaccagaggtgagaaggtaagatggttttagttccagtggtgtgattgatgggagtgtgaatgggaaaggtctatgctggtgttatgtttctaaccttattcattggcataaataataggacgtacatggactgttcttttaagttaacttttataattatttatgtatgtatgtattctatcactttacttacataatgcttattttagtagcttcactaaactatatacttttgctttaaattgtgttaatattaagatgcctggtaaactcagaacaggttgttaggactgcctgctcagtggtgccttctaagatttcaagattctttataggttgtaatatttgaatttcaaaaagcttctttatcttttttgccctctaaaagatagcattttagtgactttctattctttcagtaaacatatcttacatataaattattgcttatcagaattaaaggtcagctattaaagattaatgaattccaaatgtcatttgatagcagtgtcaggagtggagaggagcttaccactggggaggaaaactagtagggagatgaccccagtggtgtgtgaaccatcaaaacatgcagccactctccttagtgtcctggtatgctttgtgaatgtagaaaaataacctctggagcctaatcattcttgacatttaaaattgcctcttattccagaaagttataatattacaagttctattaagaaatgttgtttgaaagtaatgctactcctgggaagaagtctctttcattcaaaatagtaacagt

SEQ ID NO: 118166 - DNA, 2958 bp, Homo sapiens
ttaaataaatcatttttaccttgttgatattaaagaattgtcagcttcataagcctgactcttagctaaaaagaaatgcagctcgatgtaaatttatattccctatgaatacatggcagttctgagatctaaagttatcaacaatctgaaaaagcctttttctatattttaataatttctttataaaatattatttatcttgaatttggcaaattttagatgaaagcctatatgcttgtcgatgtttacatttctagtaaaagaacacttctgatcttttactgtaattctactctaaatgcctatattttaaaagttattattctcatatttaaggtaggtgaactttttttctagttgtaaatatttaagatatgatgaatttctcatggtacattattttccctcccatcccactacctgttttaaaatacagattaaatcggatttctttgaactattatctaatcatcacttggacagtcagtctcgatggagcaaagtaaaagacaaagtagaaagtgatccacgttacaaagcagtagatagttcatcaatgagagaagaccttttcaaacagtacattgaaaaaatagccaaggtaactgttgtgtttacttgtattgctttcattgaataatacaattcttgtgtttaagggtatatgttgttgttggggatttttctattgggggtttggattttttcttgttagtattcttaacataagagtctagttgatttggagatgagaggtacacagtgtttaggtatattctgggcaaaaactagatttggaattttttatttggcaagctagttattctgtaaaaacatattttgatggagttggtaagaaggataatgtagtttttgcttttacagaatttagactcagaaaaagaaaaggagcttgaaaggcaagcccgcattgaggcaagccttcgagaacgagaaagggaggttcaaaaggcccgttcagaacaaacaaaagaaatagatcgagagagagagcagcacaaacgagaagaagctatccagaatttcaaagctcttctgtctgacatggtatacgttaatcttttactttttttctctaaagtactggatattggaaatttattatgttactgttatgaatattttaatgttctttaattctgagggagataatttgctaaattagaaagcatttaaaaattgaatacttggtattagtactgttagtataggaaaaaacccaagttattcaacaaattcagaagttaggcattttgcatatatggaaagtcataatcatttagtctcacaactttattatttattgttcttgatgaaagtcattgtaaactattacacacttacctgccatagtgataaacaaaacgtgctgaacacaatttaaccttttcgttgatgatttagggccatcattgtgatgatcagttatacttgcagatggtatgagattgtaggactggaggtgtaactgactgcaggagataccctgaaactttgttgaaaatctttctcccttacccctcagagttgttgaggtatgtagggttttttgtccctacagtgaatgaccctagactaccgtcctacttgctaatatattttggagttgggggtggcttctctttgtcatatctctcctatgctatttcttttctctttttcagtggagcttgctactcttgtcacttctgatttcttcccttgcatctgtttcttactctacccaggagtatccaatcttttggcttccctgggccacattggaaggagaattgtcttgggccacacataaagttcactaacatggctgggcacggtggctcatgcctgtaatcccagcactttgggaggccaaggcgggcagatcacttggggtcaggagttcaagactaggctggccaacatggcgaaaccccgtctctaataaaaatacaaaattagccgggtgtggtggtgcgtgcctgtagtcccagctacttgggaggctgaggcaggagcatcacttgtacctgggaggcggaggctgccgtgagccgagatcgcgccactgcactccagcctggcgacagagtgagactctgtctcaaaaagaaaaatgtacattaacactaatgatagccaatgagctaaaaaaaaaaaaaaaaaaggacaaaaacatctcataatgttttaagaaagtttatgaatttgtgttggggtacattcagagccatcctgagttgcatgtggcctgtgggccacgggttggaaaaccttgtcctacaccctggacaattacagtagtttcctaatttctctccctacctctaacattccctcaaatttatccgttctgttgcagtcacagaagtcttcataaaaagctaatcaaattttgtcactcccctggttacttgcaggggatgaaggttctctttactcccagcagtttcctacaggtcacatttagcctccttagcataatataaaagattgttcatttcttacctcccaccttcatatttccttaacacctttgctttcttcattgttccttgaactgtagccttgctgaacatgcttaatgaaccataccatccttccattgctcacggcagtccctctacctgatatgatttggaagtgttcctgttgcagtgacagactttctcgttcttcaggggtacgctcaagtatctcttctgtgaggctactcctgacctatctaggcagattcgatctcactgttccttagaccacccttgtgctcagcatatgactgcagcacttattacctgtatttgcagttatttgcttacatgtttatcctttttgtttttttattttttatttttttgagatggagtctcactctgtcacccagctggagtgcagtggcatgatcttggctcactgcaacctttgcctcctgggttcaagtgattctcctgcctcagt

SEQ ID NO: 118167 - DNA, 1245 bp, Homo sapiens
acaagtaactcctcattctctcccttgtcctgtctcctaccccctagactttggtgaccatctactctctatttctatgagttcaacttttttggattccacaaatgtgagactatgcagtatttgtgtttctgtgcttgacttatttcacttatgttgtcctctaggtttatccatgccataaatgaatagaattttcctctttttttaaggctgagtggtactccattgtgtatatttattacattttctttatccatgtatctgttgatagacacttaggttgattccatatcttggctattgtgaataatgctgcagtggacatggaagtgcaaatggacattcagataagtctctttggtgatatatatataattttttctcttcaggtacgttcttcagatgtgtcatggtctgatactcgtaggaccctccgaaaagatcaccgctgggaatctggatccttattggaaagagaggagaaagagaagctttttaatgaacacattgaagcacttaccaaaaaaaagagagagcactttaggcaacttctggatgaaacttctgcagtaagaatctcttatttttctcattttaatctggatgaatcttgttagtaatttcttaaagcaaagcattgatatgatttttagtgtcatggtctttagattcattactggaatgcatcttatgacaattctctgattttaaaaaattatggtattcttatttatttagaaatgcctattctttgcagttttcacattcataactgctcccatagtaattcaaaatgtccttagccatgtggtcagtgatccctcctaataatagatttagcaaatttcttcttttgatccattttcaatttggtactatggcctcttgttcggcagtttgtacgctttgttatccaggttttgttcctttttatttgctctctttttggtgatggtttcttcagaagttatgatgtttgcccatgtaaatacagggtttgcaggtgattgtcttaggccaccttgaaagtatggccatgaaaataactcttgtggcaagccaacaaaaagaaattgcattaacgctgcttccctgtccctaactagtccagttacgcttgggcattacaagagatcgcaggtcagtgtgtaatattatgtacctatgtgctgcagtttgactccctaagtaaaagtgagttgtatttatgttttttattcatgtcttttcaaagattacctt

SEQ ID NO: 118168 - DNA, 2832 bp, Homo sapiens
ggaaaccatttttgtttcatgctccagcttttcttctttaagagagaaatttgaaacatcttaataaagggtatgtgcacgggaggctagatagtgctgagggtgtggtttttagatattttgtcatttggattttttggtcaggatccttaatgttttgcatcagcttgggcttttaaattagatgtgaagtaagacttctttctacatttttatagttaatttagtgaaagatgtgaaagtgaaagcttgtgaaagatgctgggattggcagccccgcagactgaagtcctctgttcatccacagaacaggtacagcacgggcaagatttacccacccaccctcagccctgatctggagggaccaccactaggggtgggagggtaattcagcttctgaggccctttcactccttggagtctttgctgaggcgacttacaaaggtgaccactgccgtgaaatttttcttaaaaaaaaaaaaaaaaaaaaaaatggaaacacaattaggaactagatggacatttccagctcatttctgaaagacctgtgaacagcagtcagtaattcttggacttctttttcttatttcagatccaaaaaattaatccaagaatcagatcagcacctgaaagatgtagaaaaaattttacagaatgacaaacggtatctagtactggactgtgtgccagaggagaggcgtaaactgattgtggcatatgttgatgacctggatcgccggggtccacccccacctcccacagcatcggagcccacgagacgatcaacaaaataattctaaatactcttccataggggcatctattcaaaatgcttgcatgagccaattttcaggtttttacatatatgtgcattagtcaacctattgcgaaaccatctgacaaacagaaggagaagcatttgtgaacagtttctgaacagaacactttggaaatatttatgcttttctttgtgtggcatgactgacatacatactcaaatataggctgtctctagtaaatcttaaaatcttgaagctaaaattcatccttttatgaggtgtggaagtcagtgacttggtgacgttcttcctagcagtgttaatacatgcaagaagtaagagcatttgtggcttgaacttgccagatgcaaataccacagactccaagaaaacccgagttggggtttgttttgttttgattttttttttttaaagcgggtaaaagagaaaacactgaaaattgaattcttatcttccagaggctacaattattataatggacaatacttttacctttgtctctaaagatcagattagttttatttgttcacttacgtgctttgattatcccctctgaattatagaccgagtcttgttgtttagcctaagagaagatttatgtagtaatttcttctcaggtatggaaccacggtcataactaacatgttggccagaatagaaccactggttaaacatattttattcaccattaagtgatctttatcaatattctggattagacaacaaattacctttctgggtgtttcttgtaaactatactcctgtttgaatgttaaactttgttgctaaagtttaattttaagatgtttgaatgttcagtttatgtatttgaactacaataaaccaaccctttttatatatctgtattgtatatgattattgttacttaatttttaagagcttattttaacctgtttttaaaagcagcaaatagaatttcccacaaagtaagttgactctaaatcttaagtattacctagtttttaaaggtttgaatataataatgcagtatttgcagtataaaaaggaaggaatttgtagagaatcattttggtgctcaagtctcttagcagtgccttattgcctcatagcaagaagatgctggggttttttttgtttttgtcctttgtattaatgtatgatggtttgcgcctttttggcattctttcaacatgtcgtgtacatcacaccatgaatcagttcctaattgatatatctagctttacctcccgagttaaaaaaaaatctttttattttatgccttcataggttgctcgtttcagagtgccacataaataaaatgtttaacaaaatatatatgttaatagaataatttattttccattatctcataccgactatgattgtaacaaatcctagaaagaaggaataccaacagatctgtatttgtatgttgtgtgcatacagtcacagacacacacattcacatccatgttatatagttcatagcttaaatctattaagtgccatggaaattttgtgaactctttatgtaggaacctggcattgatcagactaaggtcttcagctgtaaagttgataaacaggatatgttttttctttttatgcgtacaaaggatcttactctgtctcctaggctggggtgcagtggtgccatcatagctcactgtaactttgaactcctggtttcagtgatccttctgagtagctgagactgcaggcatgcattaccatgtctggcttttttttttttctttttaaaatttttttggaaatggtttcactctgttgcccaggctggcctcaaactcctagcctcaagccattctcccacctcggccacccaaagtgctaggattacaggcgtcaaccgccacacctggccgccttctgtttccttttttttctttctttgaagttcattttataagttcattgagtgatttttaagtactgtgaggaatgaaattgaagtgcttgccaaaaggagcacaactattatgtagtatgtagaaatacgactgtctcacaagggtaaagtttccagaat

SEQ ID NO: 118169 - DNA, 1030 bp, Homo sapiens
tgtgaaatatttttataattcctaatggtaataattatatcagtttgtaaagtcagcaatattgataagcagcagtacaagtaaatacaataatcacagtttgttttgctttgaaacttaaatctatttaacaccttcccctgtctcttgatcttcatgttcccaggggatagggtcattgtcctgtacagaagggactgtgtccctctcatgccaaaactgctctacgtcaggaaggatgggaatctctgccttctcagttttccctttgccagaggagggagagctgggtttctctttttctggtatggatgctggggattctggagatggaaccttgtcaggaagaccctctgagttgccagctggtgtttcctgagactctgagacagttggaggttttttggttatcatccatttccatacacctttcaagccttccctgaactcttccgacatcacaagaaaaatgagaggatttgctgaagagatggaaaacatcaagacttgagacagggctatgaaaccttgtggtggggccgggcctgcagccttcagatgccatacccacagccaagctacccattcggggagccacaagagagcagagatgatggcaatgctcagcagcatcactgtgacttgctttgagcgtatctggtttctaagattttgagtcttagttcctcgttttttacattggtcataagctctccagaaataaaagctggcaaaaaataatggaaggccaaatgccaggagtgggtagagcttaccaaacatcgacataaactcttcagccacagctggtacatccacgaggcacatttccacaccttcatgatgcctgatggtgctaaagaaccattccggcaggggtaacaggctagccacagtccagatggccaccagcactgaccagatggtgtagttgtggatactcacttgcttggctgggtcacttgcatacatgaagcatactttggccaccacaacgattgtcaggctcttggctgccatgcatgtgtgg

SEQ ID NO: 118170 - DNA, 1080 bp, Homo sapiens
ttgagacccagaactattctagtagagacttgatgaatttctaaattagcagagaaattaaagttgggcttcaataaatgataactattatttattaatacctgtcagagagacagttgtgaagtgtctgcttgtgagcatttgccaagaatttctgtctccattatttgccttaatttccaaagcagaaagcctgacggccacatagaaggctttaccctggcggagaaagggaaggtcattctgtctcagcaggtctactagagaaagctgcccccaaagcccctgacattggatccatacaatacataatttctaggcaagtccttggtatgtctttttgttgctgttggaaactccaggacccaaggacattcatcactggagaagtgggtgcgcgcgcacacacacacacacacacacacacacacacacacaccagtgttagcagctggcatttctgcctcgaggattttacatttacaaggtaataataaaaatggtattagaaacctgcagacggtctgtcctatagagataaatgttgattgcaaactccaacatgaaagtagaattgactagaagagttaccaggtaatttaaggcccaacagttgatgtccctgcagataccttggcaagtcaattctgttttatttcagagaggaaataaaacttgcctgattggactttctttcccctgatagaaatgaggagttgtcacagtgaaccatgagagccaaggctggcaaggctggcaacacacgccagagccccggcttctaggatgctgtctttgaacttgaagtcagggtcaagttttaggactcccagtttgttggctattcaggattggtcagttcttcctttccagacagcctcttacctcttagtgaatggggctctgaggtatcttttctaaatgtgtgcatttaacagtagagctttcaatactgagaagcagtgaaacacagaacaaggccagtgatagagtgatgattttcagcaattggattctctaaaacaacactatgcaatagaacttgctctgacgatggaaatattctatatctgtgctatt

SEQ ID NO: 118171 - DNA, 1046 bp, Homo sapiens
tgctcagtaaatatttgttaaatgttgaatgaaatccaaggccaatgatgagagcttgagcccaatagtagcatttgagatattgtgaaataaagaaaaattacttaataaacagatctctgagggacaggattaggagatgattggcaccattgtgaacctttactgcatgagattgtttcttcatgtcctcttatgtccacttctatgtaatattgaataatattcatttcgatatgataaaaaggacctcatgtttatttggaaactaccaaacctggcagtgatgtttatttactcatccttggggtgaccaatcaaatttattatgtgaagtgacatattcttctgaatccaaagaggactttaatattctagaaagtctttacagcagtatggatagattgcgtggtcatttttcagacatttacttgataggtgtttattgggcacttattgtataccagctatggggttagataccaggaatatggagtgacaagaccctctggggaaatatattaataaagaataataaagataaatgtacaattgcaaccgtgacaagcactctgaaggagttagtagtactctgagagtgtgtaataagaggattattggacctagacagggaaggcttccctggtgaaagaataattgctaaatccgaaagtcataataagagttagctctgttgaagaggagatgggaagatgacccaggcagggagaactgcatgtacaagggctttatggtagtagcagtagagagagtgtgtgttcaaaaagtgaaaggtggccagtgtggcttaagttcccacaggatggacattagacagaagccacatcttgcagagtcttgcaaaaatatatgagccatttttgctttttatcttatgagtaacaggaagccatttaaatgcttaaatgtagggaagattggggaaagtgaccaagtttgcttttcaaaaatactattctggctgcagtgcaaagaatagattggaaagggtctagaatagatctaaagagacacgtgatttactc

SEQ ID NO: 118172 - DNA, 1039 bp, Homo sapiens
gagaattgcttgaatgcaggaggcagaggttgcggtgagcccagattgcaccattgcactccagccggggcaacaagagcaaaactccgtctcaaaaaaaaaaaaaaaaaaaagtgtaaaaaccattcttagttcatgagctatacaaaaatagatagtgagttagatttggcccatggggcttattttgctgactcctgctctaagcatcttgcagacatttcttcatatgccctaggagatttctgatatcccctcataataccctggccttacaccaagactacaatctgttctttgcagatgcttaataaattcattcttccctgtcattcagttgatctgtgtgagccagtggaaatacttgggccaataaatctagtgtgtttgagggtaaaatatgctatttttgtaagatatattatttaatggccacacaacctaaattcaattaaatggttacaacctgtaacgcatttaaaatatgactaggcagaatttgcttcctactaaagacatttattcgattgaggagcatccaacagttgatgttgatccccccatcctgccccactgttctactttgcaatttgtttgaaagaaattgtcaatatatttctgacttctgagcaaatccatgaatcgggatccagcaacaggaaaagaagctgttgctgcccattgcttggttttggcaccaggaatggataaatcccagacttcctggggcacgtgttttataaaagggaagtgctgacagtgcaaacagctgccatcaattggccttggagactacttccctggagaagctccaattatattcttaaaggacccaccaagctcttcaagtgttagtggcaaccatttgctgccaaccatttgaaatgatgaagtaatttttttttattagtggatcctaagtgataggctctagaactgatcttcaaccttaactaatatcatggcatcagagggctacagattaaatcagtggttcccagtcactctctgtggacaagtagcaactacgacaaagctt

SEQ ID NO: 118173 - DNA, 1154 bp, Homo sapiens
tctgcttggggagggtaagtgtcctgggactgagtcccaagcttcttatgtttttccatcagtgcctaggaaagtcctgggtacacagatactcaatgaatgtttgttggtttgacttgccagcaaagccgtggctcctagggaagtgacttcagcttctttatcttcttggtgtgactatcttaaaagggagtaagtgagcctttctttgtaactgactgtatttgagaatgcagcatgacagacaaaacattcatctcattcatggagaattgtaaaatccagcagaagagctctctttttaaccagtgcttacaatttgtcctttttcacccttccttggcaaatcacgcaatattccttcttaaaaatgggtaaagtgccagccgaacttagaagagggactgattctatctctattctgaccaggtatacggtagactgtaatttaatgtcagcacctttctgttgccataatgaggtatatttatttctgttcaaagatcatgcagccctgacaaagcaaataccctctgactcccactgttaattatccttcagttgctacagggttttcatccatgtcctcacttaggagagttggcggttgtgaagcggatggagtccacaatctcagtggcagttcttaatgctttgagctcaaagagtgagtaagtcgatgagtgaggcttttaagatgtaaatccaatatctgcagagaaatctgaagctgtaatattagaacaacattcaaatgaggacttcattgactagctcattaagaagtcctttgataatagcatgttggtaagacttttcttagaaggtacatattataaatgatgatgtgctaagaaatcaacataaaggaaaatagaaaaattttccccaaatccatcctttttctgtagaactttaatgatgatacctcattcctttgtaacttaattttaaaaagttaattatgcacctactatgatacgtccaaaatgtttttaggtgatgtggatatagcgaagaacaagacacacccagtgtcttccttcatggagtctatattcttggcactgttggtcctgtgtgaagtcctaacattattttgcttaatgttttggcaagagaggcaacattggctgggcgtgatggctcatacc

SEQ ID NO: 118174 - DNA, 1048 bp, Homo sapiens
aacatatattttattttaatgttattatatatgtatcattacttttacaactcttaaaccaaacattttaaaattagctacaactgcaaaatcaacttaaaaatttcaaagagccatttaacatgataaattaaaatattttagtaaaacaaaatcaccactgatactttaatattcttaggtctgagaaaaaccattatgtcgtattattcctgcgttcctggtagcgtttctactgctggacatcagaaatagagaatagtagagcccctgagataagagcagagacaggggaaaagcaaaacatttctgaagaggcagttggtctagtttggctataatcactagacgggtaaaggaacattgggtgcattaaaagtagagagcctgggatgaaggcgtgaaggctgagtaagaatctcttcacttggtagtaattctagttcatccccctctgacctgcaattctgaacatggtgtagcttggtcaataaggaaataaattgcctttctggctggagaggcaaagggtagacaatacattgtgccagctgaacttcctgtctctccgctctggagaagagccagtcacaatgtatgactcagcacgccgggcacctctcccacgccagccaggcctgcccagccacttgctgaatcacaagtggccatttccaatcccatcagtgacccaagctctccaacttagactagtttctctgtgatcggtctatgattgtcatggagcacaaaaagtattaacttctaacatttatttttctttcctggatgcttgatgaactttataagcaagagactgatttaattgttcctcattatcatctgagcatgccgtcttggcttgcccttttatatggagagcaaaatgttgttattcccctttgcctgattactggctgtattattctctgaggtggccatctcaagagattctgtagaaaataataatagcaaaatttctcccttgagaagcttcataaattaaatctccagagccagtatatgtaagccgacagattatgaaata

SEQ ID NO: 118175 - DNA, 1049 bp, Homo sapiens
gatagactggaatggaagtttcttgggaggtgaggccagcaaggcacttcatatcttgcactcttaaaattaacccagtttctctcttgcccacatccccctacccgccactctgttttttttttccccctgggaatttatttccaactgtaggcacccaagtggatgagggggttcgctcagccagcaagcgcatcgtggcgcccccaggcggccgttctaatatcacatctctgagttaagcaagccttcctcaaagagaggggcagaagcaagaagagattgttttgaagccaaaatggtacaccgatatttaagaaggaaagcgaatccaaacggttgtgatctaaagaatcaataagcctcaagccttatgtttctccaatgttacgctcgcttgcctagctttacgaatattgctttgttttctgtttatgcatagccttgatttgtttgactcccctccccccatttacatgcatgcaatcagacaggccactaaggtaaaagagtctgctctatcatagtgttgagagcgtgtgtagtgctgcatcttatgacaaggggacagacaagctgggacgtcagggaaatgaacaaaagggacgcaggttatttggggtgagtgggtggtgggagcctggagcaaggtggagggtgcagaggggctggggtagggcatgtaggagggaggtgggtgggtcaggtgagtggaaggggtgttgtatattgtgttgatgacgtacgttatttccatggaagatagccgctgtggcagctgtcacatcaccacagctccctagggtctgccgagaaggcaggcagtctttgggttctgttctttgtcacgtcccctacaagtaaattttgtttctttgaacgtttattaaaatgccaagacccaaccatttcttccacctgcttgattgtgccagtgtttgctcaggcctctttcttagtgttgctttcaaatccttctctttcctgggttgggaaggccaggcagggacagagcaaatgacacttctcttcctcttgccctccctgcc

SEQ ID NO: 118176 - DNA, 1011 bp, Homo sapiens
ctatcagggaaccccttcaaaagttaattccatgctcaggaaatagagattctgcagtcacagctaagcaagcaggagcaggcctgggcagaggggagcaaaggctgtgtctgagagtgactcatctggggtctctgtcattcagttgaccatgtggtgcctgagcctgagtccagcctgactgaggcctatgagaaatggagagagtgggctgatgggaagagttgctgtgactatgccctgcatgtggacatcacccactggaatgacagcgtcaagcaggaagtgcagaacctcatcaaggacaaaggtgagcccggacatgccgtcctccctcctctcttagcttcttcttgccagtccttccaacaccatccactcatttcagtcactgtcttttacttggagcctggaaccttgagtgtgagcactggatgtagggataacacaatgttccaggcactttatttacttcttacaggatccccatgagatagtgattgttttccccactttgcagatggagaaactgaggctcagaataagcagcccaagatcatagcattagtaagcagtaggtgtatccaaattctatgctcttcacctccatgcaatattgcccattctgaagaggaagaaactgaggttaggagaggctaactaatcttacataaggttgtatggctagtatgacctatgagattagggatttttaacctgtatcatttttgctgtagagatcaaacccttactatcatataacaatggcatccttagacaaggctaaggcatttctaggagcaaggatgtattggtactcaggctgggagcttagggtgtgaaaacatgttcatgtatatgtatatatgtttctgtgtgtttgccagcgtgtgtcctctcagtgagtacatgatttaggttccactgtcttcttagattcctccattctctgcttctttttgatcaacagatattgcaaacccctcccccccacatacaggcacacatatg

SEQ ID NO: 118177 - DNA, 1066 bp, Homo sapiens
agaatcttttgttaggagcaaagatgaccccacttaaaagatagctgagttcccatacctgttctttaaatgatttactattatcttcttcagtctcttctaacagtgcactattttatactctttagattcttctccaaatgttatttctcaccttaacttaaagaacaaaatgaaaggaataataaaaatatttatatgaaaaaagtattacacacactatattctagacactatcagacccctggggttatagtactaaaccaggacacgtggtcccaccgaatggcatatcagatcattctgtgactataaacattgttttctgtgtatatctatctttgtttatagattgctaagcttgtgagtcacttgcaaagtttaatttgataaatacaagtaacactgtttaaaatccttataccactatatttgtcttggaaattgcacttttaaatgaccaagtgtttgatcatttttttgtttgtttgtttcaccagacaaattggagacaatctgattgttcctggaggagtgaagaccattgaagccaatgggaagatggtgatccctggaggcatcgatgtccatactcacttccagatgccatataagggaatgaccacagtagatgacttcttccaagggacaaaggcggccttagcaggtggcaccaccatgatcagtaagtcttcatattttacacactcctgtttctcagaagtgtgtgtttaatgaatgtgttatctccagaactctcttactataacttgtatacttgtcccagttcagtttatagatgtgttgcctgatgggacctgagaaaagcagattgagctgaggaaatgggcagctccctgtaactaaagaggagattcatgaggctcttggtcatggcagcacctgccctcttgtctaccttagcagcaggcgctggctcctgcaatgagtggagaataggaaatagcatctctgggctagtaagaggtgaaagtagacttaaaaagttatggatagaagatgaaacattatttcaaaactgcccacttgggtctgagaaaggagg

SEQ ID NO: 118178 - DNA, 1022 bp, Homo sapiens
ttccttgtacgcctaaccataagttctatttttgagaatcaccattgagtgtcaacagagtactagagagtgcactagccactgaggcatatgttatcccactttaaatatttagtgcctactgaatcagaaaatataatataaaggatgtctcccttacttgagtagatatgtttccaggtggctataatattaatacattgcagaagcaagaggtgaaaccctagaataatttgaattaagggcaaacaagaaagaccggatccccaacaaatacacctactttaaatgttgagtgcattgagcacacatatgtctttggtaaatgtgtttctactagacatctagaacaatgaattgggaaaaccttggcagatcactcttctctgaaatcatacctgtgataacaactcatgttttccttcttttctagagtgaccgtctccttatcaagggaggcagaatcgtcaatgatgatcagtccttttatgctgatatttacatggaagatggcttaataaagtatgtatatggaattcttctctttattgttttgcacttcctccttcattaatggctcataaaggaggttggattacatgaatgtagtgaaaaaaatcttaatttaatcaacagaatgaagtgagatactgagggcaaatttgggcagaaagtattgatgagcattctacgggtcatggaaaagtggaagatgtggccatcatccttaaggatactggaaaatgtgcacaaattacagcaccctaaaaatataaggctttgtgcaataggtatcaaaggagttgaagtcgggataagtgatttagaagtacaaagaagaagaaatttatttagaagtaatgctttggggtagagagagtatttaatctgaaccttgacttaaggataggacttagatgggcagagcacagataggacatagatttcatgcaagatttgcaaataaattcattagggatgtataattacattctaaaatgtatactattggatgcctgtaa

SEQ ID NO: 118179 - DNA, 1026 bp, Homo sapiens
gcagctttatggctttgcaggtaagggatgaagtcttggaggttctaagcacagagaatgtattcccataatgttaacatggtctttgccgatagtaagcggtcttgaatacattccaggaggtgcctagtatgagtaaagccttagatctttattgaaggcgaagaaaccttttgttctaggattaactacccacttgtctctgatttttgagttctgataatttttaagtggtgtctcgtttgtatttagttcaagtgtttgtttcattcaaggtctgcctgacctcttgaagtccttgttctcagagcatctgcagttttatctatcaatacaacttgaagaagttcagggccaaagaatcaaaaatagcctctgctttgataaccacctctctatccaatgaaagcagagttgcgggtgtataggtttttagacagacagatggaagcctgtaaccaagaaaatcagtcatcaccattgtctgctttgtcaagaaggaaccagaaaaaaagagcgaactcttccctttctttccttacccatattcttttatagaaggtgtgtttgggttgttgtagaaaggtagttaagatatgtggtatgaatcaaaccaacctaaaaagaaatgaaaagtcaagttacttttcagggataaaggagagggaaggtaggcactaggtggaaggctttgacctgagaagatttagggagattctagcttctaaaggaactcacatttattgagaatctgggcttcatcctcacagcattcctttgaaaaagatattattttcctcgctttacagtcaggactccaaagcccttctctttcccaccattccatcaggctaactggcactgattcatcacttgaattcttggactgctttaacaatgaggaccctctttgcactcctgtatgatagacctaatctttgaggtctggactacaaggcagagcaaactggaagacatctgtggtctttgagacaattccttccttccacactctccatggggccc

SEQ ID NO: 118180 - DNA, 1027 bp, Homo sapiens
caatattacaagaagttctctgcaggtttttagtcaggggacataaagagaagtttaactttgtggtgacaaaataaagactaactatagatttaaattaaattctgtagtagatgtataaacatccactgagctttcctcttatctttctaaacaaaggcaaattgcaaatccagtgcattgtagttgtgaaatcatttgtaatagtggtttcttaaagctagctctacaagtgatttccaggactcctgcttggaaaaagaaagtagtgcctgcttttaactttaattttaattaaggctgagtgagtcaaagatatgtgggtgttaaaaatcattgttttccatagtggcattagcttaaaaccctcattacaatagagccattgttctattaactagcacctttttatgcattataaaggatcactgctatggtccaaatgttggtgttggaaatttatatgttggaacttaatttgtattttggagcctaaaattcaatgtgacagttttaagaagtaggccttttgggaagtgattaatcaataaggctctgccctcacgaatgcagttagtgcccttataaaagaagttcaagggagctgtcttgcccattcagccaggtgaggacctagaaggcaccatccaggaggaataggccactcaccagacacagaatctgctgatgccttaatctcagacttttcagcctccagaactgtgagaaataaatttctgttgtttgtacattacgcagtctaagatattttgttatagcagcaggaatggactaagacaatccccatgaaaggtataatctaatgaagtgtcaataacacaaaattattcatctcttttgccagcaataccttgatgtttttggaggtccgtgtaaattgtttgtagctgtgaggtactgaaaagaagacttggttacttgttaaaatatgcattaattgtgtatgcctttttggaaggcgttctgtatatgtactctattaataaattcagtccagaaggtcctt

SEQ ID NO: 118181 - DNA, 1041 bp, Homo sapiens
aatattcctttttgaaaagaatgtaaatattcctattggtcccttccctttgcactgatatgctcatttatttctcatgctttcacatggatatttgcaaataacctgtgtttctttttgttagagcaatacaggatatacatatatatgcagaataaattaaatgatttcaattttcattgtggctcttcaaagggtgtgtgtttaattgacttatatcctagtatcatggaatgctcagaaacccctagtcattcattatttgtgtatggactagttactttcaaaaaagagcttgggtcattggcatggaccaatagtcccaactatgccggtggctgaggtgggaggattgcttgaggtcaggagttcactatgaaatgcactatgattgctcctgtgagtagcaactgcactccagcctaggcaacataacgagatcctatctctaaaaaaaattaaaaataaaagttaatctgccttggttagttttcaccaattaacaaatacaaattacagaggtacttggaagaatggtgcctaacatcaaattaaacgttatttttaacatccgtgtatcactattgtgggtgttgctattatgtctgaacgcaaaagtatctgagacaggcatcaatcaatttagaaagtttattttgctgagattaaggatgagcccgtgacacagcctcaggaggtcctgatgaagtgcgcccaaagtagttggggtacggcttggttttattcattttagggagacaggagacatcattttatacattttagggagacatgagacatcaatcaatatgtataagatatacattggttcagtcccaaaaggggggacatcctaatcttctttgtcctcactgccagtatccttatttaagactgttgtcttttgtctggattgtttcaataacctcctagtagatttgccagcatttaatttctccaaagctttgttcaaaactcttggatttgtctaatgagttcattcttgatcttgttattctgattcttacaagcatcccaaaa

SEQ ID NO: 118182 - DNA, 1120 bp, Homo sapiens
aaaacttaagaacatcaatcaaggcacatgaatgaagaaaaacagtaaatgcatgaaaattgagtttacaaacctgaaagtgtgtgtgtgtgtaggggttttgtaacctgtcttgccttaaagttaaaaaagaatgttagttacatggaatcaagccatgaatggccatgattcagggagtaatgcaagaaaatggatttttaaaataaagcaaacaaaacaacacaaacagatcactttgcagactgaatggtttgctgtgctcaatttcagcatgcttgaaacttcatcacttagtaactattagaaaacagagtataagactgaagtaagaaatgactattaaatcctacgaggaaaattatgaatggctttttaaagatttttttccaatttgaaccgtttcttgcatgtgaatctaatgagggcatatgcatgagaaatattggaaaacacattagatacattgatttcagttacagtcaagggactctttcattattattttttctgtatttaatacataaaaatcaacccagaaagtgagaaaaatataaacctggagggaaaaaggtcactgagtacttaatgagagtattgattctgatttgcctgccttcactttggatttttcttctttgagctatgattatcagtactccaaccttggtattaagtaatctgtaaattctctcttggtgtgtagtcaaatgccactgagccagaaacctgtacaactattgcaaatcccttaaactgtttattttcctttaagtgaaaaggaagtgttgagatggattctctacaaggactcatccagctataagccaatgtgtttatgactttgtgactgtccatcacattttccgtcagttctttgtcatagtaaatgcttctcaaggtaataaggcaatatcagcttattgtcatttttctctttcactctgtgtatatgtgtgtgtgcgtgcacgcgtgtgcacacacaatgttgccattcagtttagccaacaggtcattaaattcaagctgtacatcaaacagtgcatataatgtggtatgctgccaggctaactattcaatccaatgcataaaggaattgactactgttttctctgctgca

SEQ ID NO: 118183 - DNA, 1089 bp, Homo sapiens
cggggctggagcctcaaacccgtgtccatattgtgtgtgtgaagaagcatcgaagcgcggcagccatgttcagcgtggcatttcggaaggcttgtcaggggtggagaagcggggcgggttgctgttctttcacctgacactaaagcgccatgccggaagcactgagtctgatacgtcggaaccagtctccaccgtgtggtttggtcttgatttccactggtactctggggtcttggataagtctctggacctcgcctttgtcatttgcgaagtcgataggttccaatagagattttcccagaatcattcaactaaaaatagagaactttttttttttgagaggaaggacgggggcgcagttaaagatgttaatgttaagtcatcccttctgtgatttcgggacattatctttgcacgtaagtaatagtattttacagtccaaaggaatttcacatgagtgtcattaaaaactctacacgactctgacatgtaggcaaggatcaacttaatcaccttttctgttgtttaatggataaggaattgtcttcagagagtgtaattgattttcacaatgtctcgcagatggactgaaattcagatttttaccttttacatcctgtgttcttgccctaatatacatgtaattaatatgggctaaaatccctagatttaaatagatacaaatacttcttaggaaagttagtgtgcattaaagccatgtgagacacaatttgacaagacgtagcattgactaggctattctgctggagaagaaaaagctgaagaaggcttgggaatcccatttcttcttattcttttcttgattgatagcagacctactggtttttcccctctttccccaatatggttcggcaccttaggtttcagcttgtcttaggcagtcacagttttagctatcccattccgtatgtcaaaccatatatctgtgtttttatttggagctctggtaggacaaacaaaacaaaacctcatcatattcatgtactattcattgtaatctcagctttcatgttacattcttcctgtaattgaagacaaaaatgaatttttatgctatttgcttctgtc

SEQ ID NO: 118184 - DNA, 1058 bp, Homo sapiens
cacagaagggatgacttaacattaacatctttaactgcgcccccgtccttcctctcaaaaaaaaaaagttctctatttttagttgaatgattctgggaaaatctctattggaacctatcgacttcgcaaatgacaaaggcgaggtccagagacttatccaagaccccagagtaccagtggaaatcaagaccaaaccacacggtggagactggttccgacgtatcagactcagtgcttccggcatggcgctttagtgtcaggtgaaagaacagcaacccgccccgcttctccacccctgacaagccttccgaaatgccacgctgaacatggctgccgcgcttcgatgcttcttcacacacacaatatggacacgggtttgaggctccagccccggatgacaacactccggaaatatgcgagcggcggcggaagcggaagtgcctcagcggtaggggccggggaagtgtctgtagcgtccctccctctcaaccacaataacaggcggagggtcggcgtaggtgaggcggcggctgagtgggcctggggaccgggagcggggtggcaaagcccggagtgcgtgcggcagggctgaggtagctgggtggggattctggaacttccgaccgcttaagctcggcctctggcccccttggggcctagagctccttgagagatcaggggttgaatttgtagttcctggccttctaggccgtgcttgcgggggttgcctgcttgtctgaacctggccccaaaatccagcataaagaactctctctgggccccagtttcctcaatgaaatgggtgagggtgttggactggacagcttctgtgactgtctcccaccccgggcgtcacgaatttcatgattttaatgttaagtcggtgtttcggccagtaaagtgaaggaggtctgtgttcagcgtagtgaggagatgtccctgagcaggaagcagtgaacacatctttggctgccacgcctgagtatcaggagccctgaattctagtttcaccccttccacctacacaccgtgtgaccttgtctaggtccattagcttt

SEQ ID NO: 118185 - DNA, 1311 bp, Homo sapiens
ctggtacatcctgcctctgtgactttggacaagccatctaacatctctaggcctcactttccttatctgtaaaacgaagggttgagctggatgattcctaggcctttttcagcaccatcatcctgttggggggtttttgttttgttttgtttgtgtgtggtttttatctgagcagtttggtttatgtggtgtggtatttctttagacaagagaggctgtcctggtcagtagatacacaagatagtctatgatgtcaattaaggtctgtgaggtcaaattaagtgatatgcaagattactttgatatgagcaagctgaaaccaatagaaactaaagaaaggcatgagaaacttgaagggcagggaagcccttgaccagataggatcattgagaatatagggaagtttcaagtgagagggggtatttttcacgagggtaaagaaaagtaatttgagtttgggatgggaaggagatttgaattgacgagataggagaacactttttggaaacaactctggtttaagaatgtgcttgcaacaccaagacaaaagtaatgcttcctgtggctaaggtcagctaagcaggcagccacagagtgactgtaatataccaaaggtggccatagaccactgcatgggagcctaaattaaatggaccataaatcctaattggtgaaggtagggtgtggtcagatgcagttctatcagagcatctagaagcctttctccaagcactagggcattgctctggaatgcaggaagacaaccacagtgacagaggactgacttgatgatagaatgtttactgtaacctgggaagtctgtatcccagcctgaaccttgacactatttaatcttgggcaagtgatttgtcaccttatcctctctggttctgtttgttcatcttaaaaatttgggatcactagatgagcttcgatgtctgtgaatatgaaccccctgaaatcgtgtatgtatttctgcttgcatgagtctggaaaacggatgtgccactttcatcgtattctcagatgggtttgtgacccacaaaaaattgagaactgtgtgattaggtagtgtctctggtcctcttcaacttttaacattctgggattctgtaattctgtcatttctgacatttccttaaggttcagagtcttagggtctagaagttgctaagcctataggtaacacctggtaccgcaaagtatagtctttatatataatactctcctccttatttattcaggcatagctcagagatactgcaggtttggttccagactactgcaataaagcaagtcacaaagtttttg

SEQ ID NO: 118186 - DNA, 1047 bp, Homo sapiens
ggctgctagatttctccaggctataagtcctgtcaatctcctatatataagatagagatgttttcttttaccctagtgtttatctccacaagttccttccccacgataggcttagggtaggggcctcactattcacctgcctggtaagaactaaaagacccaagtcttcaattctagccgtgatgtaagaaacaggaatagttttacctaaaattttgtcagtcctgctaatttaaaatttaggctttttgctagttagtgttaaaggatattgtaggttaagaaggtttttgtcagcttcctggagatctaacctcagtataatattgtataacatcatttctgtgagtaaatatttgttaactctcaataagtggagttttataaactcaatgatatttaaggtgcagggtatttagtctaaaaatttacgtatagtttgtgcactagggctactaaatctaattcacacaaaagcaccacattgcagaatcctaaggaacaatcaaaggtggaatcagtagaggaaggtgttattaggtggtgtgaatttgaggaagaaaaaggaggaagaagggattaaaaaaaagctttttattaaaggaataaagaatcgagcatcatctcgatgaaggattgtcaagattcttaaagctgaacatgtgctaaagtataacaactggtggattggtctgagcatctaggtaatttgtgggtggattagtctttgctggttaatcgtcctgttgaggcttttacatgctacagagtagctgttaggtgtgtcactgcagtaaaatctgattgcattattgtctaggttataagtttgttgctgagatcattgaatgctgtggtagcaaacgtctcataagagcatgaaatggtttttagcagcagcctcgaagctactggatgtatatagaataatggaaagactggtggatattcatacattagatatttgaggatatattgtgagcaaggacttgttgtcacctagaggcaagattttttagcagaaacatgactaataaatcactacac

SEQ ID NO: 118187 - DNA, 1077 bp, Homo sapiens
aattaagttatggctagcagtgatgatttattttgtataatatttgatttaaatcattttaaaggggtaagaagagggacgagaagtagaaaaaataaatggatctgctaaatattcaacaggtatatgtggacttttcttttagaattagcagtgttgttaagagttagtgtcagacaaaactgtgtttgccattcctgaccctttctccctcttacctagccatgtgacattttgcaggtttaattcttctgagctaatttcagcacttataaaatggagtaataatagtgtatactatgtcagtgaagtgccagcagataacagaaaatacacttacctggaatttgaagataatttaatgaagggactatttacagagatgtagatggagtttagggaacaagtaagggatgatgaagaatttgtctaggggattagcagcagtagaaaggcagcattgccacctggagccctccagctggtgcatctcattggctaaagttaacagccagagaggggtagggaacacagcaggtcagagagggggagataaaggactgggagagagttgtatgccaaacaggaaccagctagttacctcttaaggttgttgtgaaacaatgagtagaatgtgacgcaatacaggttcagtaggtaaaggtagctttaacttttcaaaacatttaattaatctaggcatgtgtggaggggtcttaagagaaaaatagacctttcagaatatataacagaacaaaagtcaggattaattgaaagtttcaggaaaagataataaagaagaatggaaaagaggaagttgtaattcacatgaggtgtcttaatactttacgcaatacttttatcagtgtatgtgaccttaaaggttaaaaaaaaaaaaaaaatgggaaaagaaattgtgtactatatgactagtatacatatttgttgatggagaagatagtagagtttgcaggagcaggatggtggagttgagagggagcagaatgtccctgcaggagtagattctgtaaaagatacgaaataatattgtgcatgttcaaattgagtaattctctc

SEQ ID NO: 118188 - DNA, 1063 bp, Homo sapiens
accaatttgaaattctaaaataaatgactggcaggtttctgcttttctcagagccatgctggctggcttctcccacacatttacaaattcttaagattcatatatttatagaaaacagcttttaaagttctgtgtttggctatcttccagatatctatttgcatatttaaacccatctagctgactttgctctgagaaatatagttctcctactagggggcagtggatgttggtagtcaaatagtaaatttgtgtgttccatctccatcgttatagttttgctttcagtaatccattttcactttacctcttctgggaaaacgtatcctagaagagttgtaagattatgagaaagacttacatgtctaagacatagaaatactttttaaactctatcttcccattggcctttcctaaaaaagttaagtcagtttatggtttacgtaaactgttctttgtaagcctgttttaaataaggcaaacttgatagattttgtataatttgttcggataaaaatccttgaaggttaagctgttaatatgaaaaatagactcttgaacttataagcaaaatatagtatatttttgtgatttttttcttgtttgttcttttttatatttgtgttttaggggtgaatgttcctgaaattccttgtatcccaatgctaaggcacctttatatgaagtgggtaagactcactaaaccacagccatttaaagacttcctttgtatcagcttaagaactttcgtcatgaggaactgtgcaggtaatggtacacaattatggtggaattaaacataagttattctaaaaatatcctgaagcaaactctagctacatttgtaaatacaattatattatgctattactatttatgtcttataacatattcatcttgtgaagataaatgtactttttgttttaaagacattagaaagatgatttgtgtttgacctcagcaaaaaaaaaaaaacaaaactcagaatatctctattttttacgggtactttttacttttcctaggattgttttattaaatttcagtcttcttactttgtttc

SEQ ID NO: 118189 - DNA, 1016 bp, Homo sapiens
aattatcatctcagataatactttataatgtatagtatataaatacttcactaaaaatgctatggtcaaacacttgtttttgttcctcgtctttaggtggttttagaaatttgcacactattgttctgggagcttgcaaaaatgctcttgaagtagatcttggttacctcatcattactgctgcccgtaggtatgtttcctctttgtattgtgtctctcactttagaagtaattatgtttttccctattttacaaaaaattgtggaatgtgtgtgtatatatgtgtgtacatttgatcaagccttgttcaaatttaaaatacgaagaagtccaaataacagataagtataacatcatggtagtcttaatgttataactggtaaccagttgagctgcatactagcaagctccagagtggcatggtctcatatcagagaaaagcagtggaatttctggaaatggctgagagtccaatagaagttagcattgaagctctggtgtctgtagccctctcaggaccattgtctccatctctggatgattttctgaattgttctagttacttggtgataatatttgctattcagaaatcagtgttttaaatcagcttttccaaagtctgaccttgtaacacctctatattttttaaccaagtggttatatcactttatgccacatttactatttcttacatatcaatggtctacctccacttttattttataatattttctttaagcatttttaaaatttattcagaaacaaagctttttccatcaagagacttgattaggattataaataaaagtgtttctaagtttaggtaggtattgttacctactacagaattatactctttgttaaaatgcaacattaatagctagcctaagcaaaatgtcaaataccagcaccagatgcagattctcacattgactcttcaggtttagtaaagcacttgaaaggatataagattcttacctgtaattaattgttatttaatgtatagcttcagtgta

SEQ ID NO: 118190 - DNA, 2082 bp, Homo sapiens
agcaagttaattctcattttttaaatgaagataaggtggtatcctgcttttctcttgggtagctctgaggaaccaagggaaaagtgatgtatacatttacagtaatctctgacacttaggaagtattcaataaatgataacttttacctttagctcacctgtgggctgaaaagaaaaacaaaaatgaatctcaagtaatatcatcaggattttgaaaggagtgtgtcaagcaggaagccccaagagtagaaacatggtgttcatctcaaaaaactaaatgcaagacatcgatttgtcatgttaggttacagcatttattcagatagtgcccaggaaacagggtcagttcaaggtttaccctatcttaaggaaaatggtaagtttcatctgaagtcctaagagcagggaaatgatccttaccaggagctaaagaaaatagttcagctaaattgtaaaggatggattaaggtgaaatttgtaagatgtgccaggagataccaaatataggaactataggagaaagactgtcaactatatggaaagtaaaattggaagtttggagaagatggattgtttttaacatgttgtagctaaagttgtaaatccctgtgatattcagggcagcttcaccagagtggcagtgttttttttttgtcctgcatattggttgattgcagactgtgagagacgtattcccatgagctcttgtatccccagcactatgctagacactaaagatgtaactatgaactaacagaatcttggagcgtgagggggcaggcagatgggagaaatgataagaggcaagggatgaggtgtgattcttagtgacatgatctagaataaaggatcctcctttacttattcccaaacccctagtttgtgaccagagagtaggcactaaagcccagtggcatgtgtttgagttagaagtgcacttttagggtatagatagatgttactaaccagtgccatgggttctaacaatgaatcttaaattctcagagtttacctttctctacacatgtccacactgggctccaagaacatcattttattgtaagggagttgagtttttaagattttgttttccttttaaatgataaagctaaaactttaccatggtatgaaccagtatgatagatccttcacttatgctttaagaatttttgccttttctcttctctaaacaattggaaataatttttcctactagctgtcccttgacttttaatataatttattattttgtacaagaagtgctaccatatgtacggaatacctaacctaaaattatacctgaacccaatgataagcagatgatacagaatgatggtagagactttttatactgactggtaagatacaaagttggtaacactccctaacacttaagaatttgactttttttttttttaattgattgctctttttaggcagaatggctaatgcggatctggtgaagtatggtttggctgatgtggtagaaaatcctggtatcatcactgatatagggatgaaagcagtcaatgaagttttttcctgtatcaaatatctggcaatttacaattgccctcatctacacaacccatacaattggatctcaggtattacagacttaaaaatacagctatgttttattgatactgaaataatacaactttccatgttttctatgtgtgatatgattgcattcctaatgtaaaatgtaggtatttcatttggattgttcatacaagttctggtaacctttgataaccaagttggaagtatattcaatgcctctttaaacttctgacgttctctgcctagaagtgtatactctccaggttgtggattcaagtgccctgatttttatatgtacttctttgggctaggaacataaaattaaggttagttcattgttacctaggacttaggatattgtagttattttctcagaattatcttcacaatagcacatcatctgaaaggacaaagtaggtatgtatgttgaactttaattaagtgacattaacctgagataaaaatttctattgactagaaatcccagtctatttcagatctccccctccaatctcc

SEQ ID NO: 118191 - DNA, 2054 bp, Homo sapiens
tttaaaaatgatttatattataccaaaggatcttactctgtatacactgtcctgtagcttgttttttgtactaagtataatttggagagttttccatgtcagcaagcatattaagctctccttaattcttttgaaatagctacataatgttctattaaataaatatgccataattttttaattcagtgtcctattgttgaaaagccatgtaggttgttgagtggatcacatttaaatcagggctgattggattcaaattaatgttccccaggccatttagttctcacaatggaattaggtatgtaaacatcataatttagaatcatcgggttttagaagtcatgaaaaaaaggaaaagttattttaaaaaaaaggatttgaaagtctttgtgacctgtatcaaaattcatcagtaatggggaaaatgttacttagattttctctggtcatgtcatttctttaacagaccactcaagatggactcgattggttgatatcaacctagtacggtgccatgctttgaagctggactcttttggccagtttattgaattattacccagcctagagtttatttcactggatcagatgtttcgtgaaccacccaaggtaagatacatttgagggagtttttgtttattttgataggaaagaaaataaaaacagcctgtgatttttttttttttttcttttcaatgatatgcctttacggtgttacagtcggactttttactgccagcctcagtgaaggcataaaggttgtaataatgcatagcctctcattcttctaaatgagaattaagggttctctggggaagggtaaggaaaaaataagtggaagctgtctgttagtatataaacaaaaggtaaggtaagggtgaggctggaaatttaagacagaaattattacgtgggataattcattggtggattaaatataattaggttggtagattaaatctaattaggaatccaaagtataaacaagaattaaggatttatttggggaatgttttactttgctgctatctttctgttaagttgtatagcctgggaaatctgaggtagcccagttgtacaaaatgttattttaaaactgcttaacatatagaactttgtactcttaaggcaattaaaaacttaatccttcaaccatttatgttctctcttgtcagttattaatggttacattcccactgttgaagcagtacaatataatggggaaagctcaggatttaaggtcagaatcctggtttcaaattgcggctctaccacttactggccatgtgctgttgggcagatctcttctccttgcatgactcctcatctgtaaatcaagccagtaaccctttatctatcttgaagtgttgcaggccttaaatgggattttctatgtgtatgtgaaagcatttcataaataagtactatataaatattagttataatgtaaaggtgaaatgaagggatattaaaaatgaagggatatatactaacccaaattaataaacgtatgtgttttggttttgccttagggttgtgctcgagttggtctgagtgcaggcacaggaattggtgtttcatcagctcttgttagcaaccagaactccaacaatgacgataataatgcccagaataacaatgccaacatccacgacaacaatcaccatcatccagatgactcagacgaggagaatgactttcggcaagatctgcagccaggagagcagcagtttgcagctgacggtaacccagatcttttatgagctccagatagaaatgattttcactttgtattgtatttctggctttatcctgttccctttttcccctgtttcaacttgtcactttccacattgaggaaagctagttgataaggaacatgagggagtaggtgaaatttttctcttttcttgcttgtttcaaaactgcttttatccacagaccctataagaatacctacagaatgggaaagattacagatgccaggggaattagggtagagtggtaactcttgaggtctgagacttaactttcaggatttagacaaaggagta

SEQ ID NO: 118192 - DNA, 2056 bp, Homo sapiens
tagggatattcctgaaaagaaaaaaaacaaggatgtttatcccagctgcagcagcaccaccgccagcacagtgggaaactccagctcacacaacactgcttctcaaagccccgactttgtaaggacggtgaacagcggcggctcttccgagcctagccctacagaagtggatgtgtccaggcagtgtgcctgctcccccggtgggtcagaggactctgaggccatggaggagggagatgcagagagttctgtctgccccagatgctgctgtcacaggccccaggaatcccaaaggagaactagcaggtgttctgatgaggaacgtccttcaaccagccgagcctgtgttgtgaatggcccggatggtacgagatccgccttttcctttaggactctgccacaaggggggtcttcaggcccagcacatgatgagaggactaatgggagtggctctggggctacaggtgaggacaggagggggagctcccagcctgagagttgtgacgtgcagtctaatgaagactaccctcggaggcccctaaccagggccaggagcagactgtcccatgtactgctggtatctgagtcaggtatgacaatgctcctaggattagcaactgcagggtagggctgcagaaaggcatgaacttgtttcatgagttttcttacaaaaagccagtttggcaaattaaattctattttggggttttgtgggtcatgtgaattttgaactaatttcagcaatggtttggagggtgggtgtgtaaaacagtttataaaatgtccaacctggaaagctcaaaatagttcagcttttaaggaaaatgtcattgtgtatatttaccctaaatataacactgactgacacctaagccccagtagatgaactctgctgccatcacacacttagagaagtcttaacttaggaaagttttaaactcagccaaaaggcaaggacttgacgttgctggggctgggggaacacatctcagtgcagcttcctgtgtatacccctctttctgtctctgcagtacttagtaattttttcagaaatctagttttgcttcaagtaagatttgccaggagataagcaggtaagtaaatggtttggctgagaattattttggtgaaaatactcaaaacatatatgtgtatttaatttcattaatgtttataatgtgtagccatggattgggtgtaagcatatttattaatcataagtctgttactgtttctgaccttatttttaagtactctttcctgcctttattatatcattactgcctgacagtgataataatgtattttaattttcttcaagtagccctcagttttaaaatcttaaaatcagtcccagaacataggcagtcagtgctttttgtatattcaaaatagaactaatggattcatacagagctaaacagaacaaaagtaagctttcatgagatacatttgagaccttagttatgtgctagttaccatagttgcataaactcattgaaatatatgagttttatttgaagacttttttatgctttgcaaacagtggttctgccatatggtgaaagtacttttcccagcttaaattgtaaatgtttgataatatcttttttttaattggtggtaaaatataactttaccattcagtgtacagtgtataattcagtggcactaaatacattcatcttgttaggcagctgtcaccaccaaccatctgaactttttcatcatcctgaactgaaactctgtgtccattaaacagtatctgcctcctatgacaccttttgttgtgtggtttttcgtatttgcaaagtcagatatgcatgttttcctttatgagtttatttttatgctgcgaaaggcctttcctacacttggttcagataaatgtgcgcatcttcttattcctttattcattgatttcagtttagttccttagttcagttggaattttatttcaatatgtgggagctaatttttttttttttattccaaactatcaccatcttgtttcaatattggttatggatgtccattctcgtgctatgattttgaa

SEQ ID NO: 118193 - DNA, 1026 bp, Homo sapiens
ccattttagaagctaatataattgttttgtgaatttatattttgggaataaataactaagttgcttttaatcctcactgtataacaatttataaatattagagaaatatataattggattgtcaaagaataacatttaagattagttgctataaatattaaacactttccctgacaccccaagactggattgatctgcctttctctgtttctgtagcatcttcaacattaatgtgaaccacactctgttgtaatttcttgttttactgtcttcctttccagtagactgtgagctccatgaggacaaggacagtctctgctttttcaccagtatatttctatcctttagcaccatgtcttacacatggaatggggcttagataataactatgaacataataagtatagaaaccatcatatgaggtattgttgatactagcggatgttttgagttactaaaaaatgttcctaaacaaaattaattgtctctaaacagggagggaggcataagagaataataacaaacacacaaactttcttcctcatgcatcagaaatgtttgtttttcaagctcatgtatgtatgaagtgtgacttcattttataactttgcctagaaaatgtaaactaccagtttgggtaccctggagagcaggaaactttacctaattttgaaccccatgctctgataaattaaaggggaagggagagagcaatccaggaaggtgagatacttgaaaatcagatcataaaagtattttactgagagatctttattagaacactgtcatgtagtggaaacaggcttgctttttgtttgttcattttcatttttgtggtactgggagagggaaccaggacttactaatgaggttttaaaaggattgtgaattttggctatcaggtgaaatgtgctgcctttagaaggtttcatgtcaatgaagattgtttgattttggatgaagttccttcaggatactgtgggagaaggcctacgttgtgttgtgtggtcaatagtcttcatgttt

SEQ ID NO: 118194 - DNA, 1022 bp, Homo sapiens
acctaggcatgagaagggttgttatgtttgatgtagatatgtttgaagtaatggagggtgatcctgttttgaaacaatccactggaaataccaatgtaactgtattccactgggaaccaaattgtagatttgggaattaccttgattatgttcatacgtatgtgattgaatgtgcttgagggaaagaaagcaaggctaaaatttggattttctttttttttgccttttttagaagtagccaaaacaaagccacgtcacgccatgaaacggaagcggacagcagataaatccactagtacaagtgatcctgtgatcgaggatgaccatgtgcaggtagagaaaaaaccctcacttacctttatcacagtctagcccagttcctaaataatgcacataaactaaagtttgtatctttatatagtttctaatttttctgcttgtaggttcttgtattaaaatccaagaatcttgttggagtcactatgaccaattgtggaatcacagatctagtgctaaaagactgtccaaagatgatgttcatccatggtatgtatttgggcccatattatacaagagtatcatgaatgagttaaaagaattaggaactcataaatactgtaatagcattactgtcttattttcttaaaggaaatattgtgttgggttatctttagttccgcctttgttctagttctcaaattattactccatagtatttctgagcatcatatatagaaacttcgttcatcttttaaaatagcctgtctccaaaagataattactgcctgatctggcagagtaaataacagcctgcacaggctttggagtcagatagacctcagcttgattgctggcttggtcatttactagctgtgtgacttgggcatggtttttgagggaagcagcggttgggcctcaagtgtataactgctctgtatttgattgagatgattaattgtatctttactttgtggcccattatcattaatccaagcccctttttctttttagtctcatgtccc

SEQ ID NO: 118195 - DNA, 1763 bp, Homo sapiens
gcttagtctgtaggtagtggctaagttaatgacagcggagatgattaaatgagattagaactgaccttagtcatgtcggattttatagctaagaaccactggatccttactgtcatctagcgctctcctttcctctgttgctgtcctcaacaacagttccccttctttccaccaagtcacaaaaggagaaaatgaacgtgagaggcgggagtctctctcagtgtttaaatgtcaagttagttacattagattgcacaagacgatgatgacatttgggtcaaggatgttacagatgtctgtgaaatgttaagatcagacaaatgagcctgtggttttataatcttttccatttgatctctctcaagttggacctggttgaaatctgcagtgaaaattggaccaggttgaaattggagattaaaaaaagagaaggaaatatttttctgaagttgatatactagttcagttaaatgtgtttattatatcaaaattacttttttctgacttcatgttttatatgtcaaacagaaaaactaatcatgttttagatgagcatttcaatagaactttaatgttctgtgtctacactgttcagtattatggtaaccactaaccacatggctactagattggactgaatagctttagaccaaagtatccaaatgtgtttctgggtcttttttttcaaggttctacttttacgtttgtgacaggaattaaaatccaactctgctcattcctgagagtgaatgtaaggtaacataggtgaattatttcaggtctgactattgactataaaaatgtataatagttactcattttttaaataaatatttcctaaacagtttctgtctgggcaagtcattttctgagacttggttttcttaacagtaaaatcttagaaaaaggcactttaatgccccttctaccttcttttgaattgaacagaaccacattttcaaatttttttgttaactgtgatttgtactctatgatattatttgacctctgttaaagatgtttgttactgcagtattttgtgccaacaaaaattaggccatctctccaaagatgatatgtacggagcttaccattgttttcattttgtagctaccaggtgcagggtactaaaacatttaaaggtagaaaatgcaccaattgtaaaccgatttgactatgcacagtgcaagaaactgaacatggatcaggtactagaccagatactaagaatgccacccgagagaaaccgcatcatatacctacgcccaatgcagcaggtaacgagctttgcttctttccgatgatacacatattgtggtgtttttctttttctttttcttgttagtctttagccttttggatttggcattcattcacttgcccaacctacagtaatgatattttagtttttacaggttatgtatgatatagggagttgttattcaacaggtttttatacttattaaaagttacctgtggtttaagagcacagtctctggttcagactgcctgattaaatttctggctgtctgacctgtagcagattatttgacttcgatgtcttagtttcttcatctgtaaaattagaataataatgatatacccaggattattgtgatatttaatatatgtgaaactctaaaacatgtgctagtatatagtaagccatcatataactactgttagtgtcattatcattattaagagtatattgtatataaggttctgtgcttaatgccaaaagagggtttaaaggaaatttt

SEQ ID NO: 118196 - DNA, 2282 bp, Homo sapiens
gaagttaacgtaagtaagaaactgagggaaatgaggacttaaaactaaaaagcatgtgtatatatttatgatctttaaaactcaggtaaaaattacaagaacagattgcacatgtacttgtaacattatttagccttggggcatgaaaaagagatcaacttgaagaagatcttaagactatgatattctatatcatcagaaaatttgacttttataaatttgttatataaatgttgcattaagcaccttttgtgtagaagacatatgcttagaaagtgactttctttccctgatatgattttgaagatagtgaagaaagtagttttgacctgactacacttggattctctagtttgagtgtatcctacttccgttaggtatttgatgttttgtttgagatgttcggtagaatctgtgtccgaaacagttttgatggttccttcctacccgacactaattatttccagttttgtaatttttacttaatttttcctgttgcttccagagagctcattaaatatgaattcttccctgaagccactcgaagtgaagaagacttaaagaaataccccaagtacccctgggggagagaaatctatactttagaaggtgagtatttacaaatgtttagaaagttaaatagcctgtgcagtacttacctctgtaatcccagcgactcaggaggctgaggtgggaggatcacttgagcccaagagttcaagaccggcctgggaaacaaaacctggccctttctcattcacggatgaatgaatgatccatcaatcaattagtcaaactggtttgggcttacagcaagcagtaacccaaatgtagagaattacactttttaaaaaaagaaagttgaatagctattaactagatgaccgaacatgccttagggaagatatgaatgggggtcctacagttcttcaaaatatggatgattttaatacctgcaagaagtgggagccagatgaagattgctttgcctgtatgagtctttactatttctaggacaatcagaaccagtgatgaaacataaaacgtaaacagaaattacaaattagtttgatagctggaaatgatttgaggacacctgactcactctctttattttatattttacattctgcttacaaaatactgcagaatttggctctgtcagcactcccacgccagttagcaatgttacatttgtcttttaggtgttgtggatggagctccatattccatgatttctgacttcccttggctgaggtcattacgagctgcagagcccaacagcttcgctcgatacgactttgaagacgatgaagaaagtaattatgacctgacttgacatctattctctagtttaagtatagcctactgtgttacatacttaatatctttttgtgagttaggagcagtgcagtgttaaatggtttcccatagaaataatttgtatttactcacttcaaaacagttctttatttgtgcagtagatgttcagtggacttactagggatatataaaggctggtagaaaggattcctttagacagattttcctacaagatttttatattacctaaatatttataatcttatttattaaataacttcaactatattgtttcaaaattgttccaattgtattattctcctgctagttatgagctgcttattgtgtggaaacttataatttaggtgtagaaattaggggagaaatttttgaatgtagtttctctaagtggtagcatacttgaatatttattgttaaccaaaggttttttaaaaatactttataaggaaatggattttatgaactacatgtgcatgtgtctgacttgcctttggtgcagtatttttaccttgagactttaagcatgtattctgtcttaggcatcaaacataagaacaaactggtggtgacccattccttgacctattcatgcatcagttacattatagtgcagtatatgggactgtcctatggaccagcttatcagtgattttccaaatgattctgattatcatatgtatctctccttttatttctaatttcaaaggcactatctatgctcctagaaggaaaggacagctgtctgcagacatctgtatggaaacaataggagaggaaatttcagagatgcgtcagatgaagaagggtgtatttcagcgagtagtggcaatttttatccactattgtgatgtcaatggagagccagttgaagatgactacatttaattggtccctcctcctttccagctattttgtcagaaagcaagtagggccatcca

SEQ ID NO: 118197 - DNA, 1038 bp, Homo sapiens
ggaaaattgctcactcataattaggacctgtttttaggctaggtaggacaataatcccaatttctgattcccactaggctgcctctgtttttcgtgacagaaatacaaggatgccagcaagtttttctaacacaaaatattccgcgttaatcagtgtctttccttaacgttctctttttttcccaggctctaaaaattctcattacattaggaagagtgattcaattgggtacttcattctattgtctccttattacattatttttaactcagctaacttataattagacaagtgtgtttcactatacagattacaagtgtggtaagaggcaggaaatacagaatatcctagatatttcaaagtaatctgggattcccaaccctgagcgaagacaatctaactctaggttttcactgtaacctgttaaccaaattatctaagtaatgcttacattagccacaagaggccgctgctttgtaatttttggcttagtcatgtctttgtctaacctaacctaaactgttagatcagtggaagtacagctggcagcgctaaaatcattcaaaagttgctaagactggaatagctgaaaaaaaatctggaagatgccaactacgatagtcactctgaatatatatataatacgaagggctggagagtgattgctctacagcaagggtcagcaaactatataggtccaaatggtaaatattttaggctcaatgggccacattctctgtggcaactgcacaactattgtgaaagtcatagacgatataaacgaatgggcatggctgtgttgcaataaaactttatggacacaaatttcaatttcatgtaattttcacgtcacaaaataaaactttttccacagccatttactaaagtaaaacaccatcctgaaggctcatagaccagatttggcctccaggccacggtttggccacacctgccatagagaactgagatatcctattcattcatttaattatatcaccagctgttggtgcagtgcagtgcctggcacattttttaaa

SEQ ID NO: 118198 - DNA, 1041 bp, Homo sapiens
catataaagcactgaccacaatgcctagcagaaaaaaaaaactcattaaatgtcagtttctcttattgctattttattattatttttattaacaaagatatagatctggggcaaactgaaagaaaaggtaaagaaggagaaacctaatctgaatccactgtaacagtagttaaaaatgtatgcagtttcttatcccttctctccatgtttccaaaagtgtagaatgcagcttgtagctaaatcacaataactcctaaagcttggaagcttctcttttgtaaattctcttttgaccctcccaattaactgaaagagccccaagcaagaggtagggcatttctaacaactctccaacattcacttgtctcccttttaaacacagaaacagaggttgcactttgatcactggcatctagttaaaactcattagcctttttttctattttgagtactgatataatgttcccttcaaaaataaatttaggtaagtgaaaacttgaatggacttaaataaggatattaaataggtaacagaacaggcagaacacatttgataaaaatcctaacagtggccctcagatgacccatgttggagcacttacaacaatcgtacaaactcagaaattatctctattttgtagatgagacaggtgaagttaagtgttgggtaaggcccaaagcaatgcgttgttcatacttaggacttcaaatccattcctgaattgtttgacttcaaaccaaatattcagcctcagttttctaaattagatggaaaagagattacaaattttggccagaagaggtaaatgcattagtctttttttccttcctagactagatgttacaagattttgaccacagcaaagtgaagagacaaaaagagaggagtgacaacgttttctcaccagagagatccaataccaaagagataagtgggtagacagcacagcaccaagaagacattatttttgttcttgcttgaagacaatattaaaggcagtgtagttatatccactccccagcccctccctaggtcccctc

SEQ ID NO: 118199 - DNA, 1076 bp, Homo sapiens
caaaaaataaaagattagtggggcatggtagcacattcctctggtaccagctacttgggaggctgaggagagagaatccacttgagcccaggaggttgatgctgcaatgagccatgatcatgccactgcattccaacctgggtgacagagcaagacattgtctcaaaaaaaaaaaaaatagcctatggtaaaactggttttcttataccatctcattttgcttatagttgcagtttccaagaatctattgaggatgttgagtgagaacttactgtataatgtttatacctgctcctaacacaggctttccttcccctaagctgatcagcaaaaagagacatgctaaacccatccttcatgtgacacttagcaccttgtattgtgtctgtttacttgtctttttcccccactaaaactaaggaacatgaggccaagactgtatgcctcttactttccttagcttagatagaatttggcatgtggtaggtgctcaataaatatttataagaacatttaatgccagtgactttatttctgacacatgagacgtaccttttcaaaaataactgggaaatttttttttgcacaaccaaatggtacacaaaggcatctatcaacaaatagataaaagagagataatagcgttaaaatagagcagatgcccatattaggaaggctgaattgaatgaggcaaagtgaccaccttgcttaggcaatgaagttcctagaaatcatagtgtacttcataaaacagaattgcatattactgttaaattttaaaaaagcaagctgtgctgaatcatgtatcaacttatacccaattctagtagagactagaattgtaggagctgacagtttaaattaattgattcttaatattcagtaagctctgttcactaaatgaatgctttccaaaatataataggcatattgtaggtagaatattgatagttttagaggtacatagatatatatcttaatggttatttgtgtattttaataaattttagagagaatataactaacatacaggctccgtgacatcacaaatcttactgctttgggtaaggctaaag

SEQ ID NO: 118200 - DNA, 1051 bp, Homo sapiens
aatcatcttacagaatccctagaatgtttggattctacctctactttatcagttccaaacaggacagcaaaagtgaccttctcatgtaattatctgttatgaattttatcaaactggtaagcttacattggcctcataataaccaaaaatgccccattcctgccttcacggtctattactcattatgtccctattttcatctctgaacagtcttagctggttttaggatgaaatccttacactgggatttcccgatgtgtgttttatgtgaaaagagtcttgtggtcaaataaggttggggaactctgccaacttcagtcttgtcttaaggagactagacgcaaataatcatcctgaagactctgagaagtcctccagtaaagaggtctggttacctttgttgaacagagcatttcccatgctgagtcaatgtttcattgtgtaacatttattcacaaaccttgaaataaatgttaatagaataaactttgggaaatactacctttcacaactttctgacttctccattcattatcacacatgtatttaccatcatcaagaatggcttcccccttcctgggagccaaactgtcttcttttccctcagaaccacatttgccccttaatgaaatcatcccagatgaaccatgtctagccacaaaacttcagttatttcagaaaccacttggtctctcataaacagctctgtgcaacaatcggttagacagcaatattttaaaagcacaaatcatatatatcattcctccgctcagaactcttcaggggctctcccaaaatatgcaaaaagaagacagactcttatggtccagtgatctgcccccttctacttcctcaacataattttctgccactccagctcttggtaacctttctgcctttctcacagatgccaagctaattcctgctgcagggtcttttcatgtgctctctctttcacaggggatgctcatagcccacatcctcccgtgctcacacttcttctcactcaggtatctcacttgtcacctgcccagtgaggtcttcctggacc

SEQ ID NO: 118201 - DNA, 1130 bp, Homo sapiens
agaaatctcactgggtcaaggagagaaggtcaaggtaccccggctaagtctaatcgctatgaggtggtggaacatgccctgggcctggagaaaggagagtcttgtcctggccttctcacctgctgtgtgactgcctctctctgggactcaatttcctcatctgtaaagtgataaagtcaaatcgagtgatctttaagatcagtgcctggcacatcatagttaattggtggtggttaagggttctgaaaaacaataagcctgttttttgtttatcatgcgttattatataccaggagctgggcttggccccttacgtacatattccctgcttttattcttatttctgtacagttttcaaaatagacagttattcctattttacagatgacaaaactgaagtttaaagaaattaagcagcctgcctcaggttacatagtagataataggaagagaaggaacccagctctgtctaaacaaaagtctcactctgcaccactaacacaagattcagatgcaatagtccaagctcaatcaagcctgcatgctcaggctgctgaaaaggaagttccctggttgtcagggtctcacagctgagttttaccagactgctggagcaaagaggcagcagtttcctatcacttatgggaaaaatgccaaatgatcaagatttagggccaactaccctggtcacaatttctaaaaagagagggaggatgttagggcttagatatcattggccgtgagtctctgggctttgcttgtgccccttcctccattcacagcactttccttctttcctcatttcctgcacaaatccccactcccaatacacacacactcacacacacacacactcacacacacacaataacctaaacttcctaaagtactgtgtaaagggctacaacatataaaaaaatgaacaaagaggcagggtccttgcctgtaagaaactcacaggctagtagtggagattagcacataaacttgacttccacgtaacatagtaaattctatgattgaggtaggaacttgagtttcttagttccttaaatgtcaggtgtgtatgtaaagatattgtttcaattttagttgcaataaagattaaggaaaattaattgttcagaaag

SEQ ID NO: 118202 - DNA, 2149 bp, Homo sapiens
gagcacgggctggaactggcaggcaccgcgagcccctagcacccgacaagctgagtgtgcaggacgagtccccaccacacccacaccacagccgctgaatgaggcttccaggcgtccgctcgcggcccgcagagccccgccgtgggtccgcccgctgaggcgcccccagccagtgcgctcacctgccagactgcgcgccatggggcaacccgggaacggcagcgccttcttgctggcacccaatggaagccatgcgccggaccacgacgtcacgcaggaaagggacgaggtgtgggtggtgggcatgggcatcgtcatgtctctcatcgtcctggccatcgtgtttggcaatgtgctggtcatcacagccattgccaagttcgagcgtctgcagacggtcaccaactacttcatcacttcactggcctgtgctgatctggtcatgggcctggcagtggtgccctttggggccgcccatattcttatgaaaatgtggacttttggcaacttctggtgcgagttttggacttccattgatgtgctgtgcgtcacggccagcattgagaccctgtgcgtgatcgcagtggatcgctactttgccattacttcacctttcaagtaccagagcctgctgaccaagaataaggcccgggtgatcattctgatggtgtggattgtgtcaggccttacctccttcttgcccattcagatgcactggtaccgggccacccaccaggaagccatcaactgctatgccaatgagacctgctgtgacttcttcacgaaccaagcctatgccattgcctcttccatcgtgtccttctacgttcccctggtgatcatggtcttcgtctactccagggtctttcaggaggccaaaaggcagctccagaagattgacaaatctgagggccgcttccatgtccagaaccttagccaggtggagcaggatgggcggacggggcatggactccgcagatcttccaagttctgcttgaaggagcacaaagccctcaagacgttaggcatcatcatgggcactttcaccctctgctggctgcccttcttcatcgttaacattgtgcatgtgatccaggataacctcatccgtaaggaagtttacatcctcctaaattggataggctatgtcaattctggtttcaatccccttatctactgccggagcccagatttcaggattgccttccaggagcttctgtgcctgcgcaggtcttctttgaaggcctatgggaatggctactccagcaacggcaacacaggggagcagagtggatatcacgtggaacaggagaaagaaaataaactgctgtgtgaagacctcccaggcacggaagactttgtgggccatcaaggtactgtgcctagcgataacattgattcacaagggaggaattgtagtacaaatgactcactgctgtaaagcagtttttctacttttaaagacccccccccccaacagaacactaaacagactatttaacttgagggtaataaacttagaataaaattgtaaaattgtatagagatatgcagaaggaagggcatccttctgccttttttatttttttaagctgtaaaaagagagaaaacttatttgagtgattatttgttatttgtacagttcagttcctctttgcatggaatttgtaagtttatgtctaaagagctttagtcctagaggacctgagtctgctatattttcatgacttttccatgtatctacctcactattcaagtattaggggtaatatattgctgctggtaatttgtatctgaaggagattttccttcctacacccttggacttgaggattttgagtatctcggacctttcagctgtgaacatggactcttcccccactcctcttatttgctcacacggggtattttaggcagggatttgaggagcagcttcagttgttttcccgagcaaagtctaaagtttacagtaaataaattgtttgaccatgccttcattgcacctgtttctccaaaaccccttgactggagtgctgttgcctcccccactggaaaccgcaggtaactacttgtaattactgcccatgacttaatgtagaatgatacaagaatgacatgcacagattgcttaaccctttcatttgccttt

SEQ ID NO: 118203 - DNA, 1049 bp, Homo sapiens
tctgtcatgtgagacaataagctttatgagtacaggcacctcttctgtcttatttcctatgccccagcacagtccctgacatctagtagaccttcaaaaagttttatggaatgaatgagtgaacaaatgatgcaaagtgttggttgcaggatatctctctcagtcttccaattcttaggagatcagaggcaagagctggtggcctttcaccgcctggctacagtgtactactccctgcacatgtatgagatggctgaggactgctacctgaagaccctgtccctctgtccaccatggctgcagagtcccaaggaggccctgtactatgccaaggtgtattatcgcctgggcagactcaccttctgccagctgaaggtaagagccagacttcccagatttcctgacagccaccacccaaccattctccttcctgactcaaagacaatgaggagcctttgtggtggagctgagaaaaccagagtgccaagatgagaagtcttgtctcatagggtgaggagtggctttacaggggacatggaagctctttccacttaaccctgctgaagatctcaaaggtgctcccatcttcgctgaggagtagaccatggttcctctttctccttgccttgccaccatgtctgtggcttctttatctgtcagatactacaggcacattgcctgtaagtctctcaagggcctatggaaatatacaagaccccaaaacaaaagaactataaggtctaaaatgaagatcaaaatgaatacttaagagtttgtccataaaatgttacagaccaactagtcaactgcaactcatttcttataaagtaatgtaaagctacattttatgagaaatgtgggtgcatattaacatgtttgagataacgaggtatggggcctttaaactaagtatacttagatcttaagaaggttttatccctgcttctcttgcttgctgaatctagaacttctttttttgcttgcttgctttttttttgggacagggtcttgctgtgtagcccaggctggagtagcatggctcaatcttg

SEQ ID NO: 118204 - DNA, 1072 bp, Homo sapiens
gcatcagtaataataataataattataagtgatctttaaacattcatcaggtgccaaggacgtaataggcactgttctaagcacttagttgtatctcaatttcatcctcacaacaatccgctcaggtgggcacaattataggtctgttttacagataaggaaaccaaggcacagaaggatcctgtacgttctcaaagtcacacagctgattggggtagagctggcattcaatcaggcccacctccctgtgtgatgtgggacatggctgttcctgctcagagcttctgtttcatcctgtgctgagtggaccctaaggcccctttgagccttcacacctcacaagttcatgtctgtccccaggtccctcaggaggtcactcacatgcatcaaggagagcctgcgtatcttcattgacctgggggagacagacaaggctgctgaggcctggcttggggcggggcgactccactacctcatgcaggaagacgagctggtggagctgtgcctgcaggtaggcctcctgcagagctctctgggagttgttgacttggatcatttggggaggcagctgtaccctccaaatcaaccagggggaaccagagagggatgatgttcaccctaagcctgtggagaaagggtcaacactgggctgctccctgaacacatggtggaaaccagggtggtctgacaagctgaatacagggagcaaagggccagtcgctgagacccatacacatgtgtgcaccctgggaggatgtgaggggagtctcacataccatctgtaacgtcacttgtcccgttaactatacctgtctttccaaagctcaacatacaccttgactttagggttttgctgcagtttgaggcaaggttggtgtgtatgtggggtattaacaatattattctcttatttttttgtttgtttgcatacttttaatatcagagatgtggtacagtgtagtggttaaaagcctgggctttgaagagagaaaagcctagagtcaaatcccagggccatcacatatggactgactgtgtgactttgggcttgccatatgacatctctgggatt

SEQ ID NO: 118205 - DNA, 1053 bp, Homo sapiens
gagtgagactgtctctcaaaaaaaaaaaaaaaaaaggattacactattattgaaggttataggtgaaaaataaaggtccccttccaacttccctttccttgatactttcctgaagtaactacttaaagatttttaaatacccatcaaggaatatttcatgcattttaaagtttatatatgatacatattttctatcttaaataaatattagatattaaatataatatgcacgttttagttacataaatggaatcatgataaaatgtctattacataatatactgttctgttctttgcttttctcgtttaaaaatatcactgtgaaatgtcaatccaacattttatcacactatgggagcccttccattgtgtcaggcactgtggtagttattggggaattcagtggttagaaaaaacaatccaaatacccacaaacagaacagtctgccctacataagagtgagcttgttgcctttacaagtattcaaacagagaccgactattcaaaaattttacaaaagagtttcctgaattgagctggatctggaactacttactaacagttttattgaggtttaattacacaccataaaattcagccttttgaagtatgaaatttagttttcagtatattcacacagttgtgtaaccatcactgctatttaatttcagaacattttcatggcccctgaaagaaagcctcctcattacccactcctcattacccaacctcactccaaccctggaaaccactaatctactttctgtcactatggatttgcctattctggacatttgatataaatggtatcatacagtatttgtccttttgtgtctggcttctttcacttagcatagtgttttcaaggttcatccatgttgtcacatgtatcaatactacattactttttatggccgaataatattttgttgtactgatatactacatttgtttattcattcatcagttgatggacatttgaattgtttccactttgtggctattatgaataatgctgctgtgaacattcatgaacaaatttttgtgtgaag

SEQ ID NO: 118206 - DNA, 1066 bp, Homo sapiens
ttaagctttgcacaatgtaaaatatttcaacagatgttgatgggaaaagaggtcataggtaggaaagtgagtcagtgcttgaagaacgactcatgtagtttggaggaagttaccagaaggtcactggtgcagcaaaggtgggtccatgctctggaaacctgggaatgcctgtgtgagggccctttccttaacctggcagagaatggggagctactgcatgtctctgagcaagggtgacatattatatgactggaccttttctctaggaaatgaaacctggctttgggggaggcatgcatcatcagggggaatctggaggcaggagaccagcgagaagcccacggtggcacttagaaaagggtgagaatggagaggaaggccactgctgaggaccaatggacaggaagtcaaagattccaggagctttacaaatatggacacctgtgttctgcctccagaggctgttgtgtaactggtctggatggaggctgggcaattatattgataaaagctccccaggtggggctggtgggcaaccaaggtgagaacattgctctgaaccaccccttcatgttaccacagggggaacagaggaccccagggatgaaggagctgaacccaaggccttccctctggaactttagaatcctgacattaaatccagtgagctctcattaaatgtcctggtgattttaaatcctgacatgaaatccaatacattctggtgagaagtcccagtgaaagggagaaagaaaaaagaggatggaaaataggaatgggggaagaaccctggaggatgcctccatttacagagcagaggaagagagaacgcagagaggaaacagaggagccacagagaggaagaaacaagctgcgggggaggcggggctgacacctgtgctgtcatcagagaggtacagcagggccaagtgaggaaagaaaggcctttgggactggccattggtaggtcttctggaagcacagtagctacatggcttacagagttgtggagtcagggtccccaaaaggcattcatgaccatgtgagtgcagcttgtgcctccact

SEQ ID NO: 118207 - DNA, 1050 bp, Homo sapiens
ccatgtatggactggggaccacttgtctgggcctccttagactttcttggggttgagtctaggaatcttcattttaaataaacttcctaggagatgcttttcacactaaagtttaagaaatcctgctggaagatatgattaaacttaaatatacagattgacagtaaacattaccccacaccatggacctgtgtggctctggcagagatctgacagttcaagtgtaaagggattgtttgttagttatttaactgacaaactactttcggagccacaaaatatcccaggtctactaacttctcaccttttcacaggtcctggtagaaagtaagttctcaataaacttttgccatcatttaaataagagaaaaaacaatactcatcatcatcatcattattctgatagactgttctgttcattgttgcaattttttgaaatctgtgtttgcaaaccccatgttttcattggcaggtggttcctaaagaattatccaggaagctgtggcctttccaggaagagggattggacaggctcctatcagattggtatggctgagtcaaaaacatagtattgttagggagataatgttgtcctgcctctcaattttatctgcaggtttggagtcagttgatgtgaatttttgtctcgtctctgctaggaactggatttagggaagccagtttctgtctgtgcacatggttttccctgcctgtgaaatgagaggtctcaatccagggggcagctacaaatgcctgcaggtgtgggcaggacacacagatgctagggggcctggatggaaggtattagggaatggcaggaataattagggattttaagatatatgagtgaaaaaacagggccaaattaaatgtttcgtgagccaaatgcggcctgtgggctgcctgtttcaatctctggtcaaaacattttctaatttcccttagagttttgtaaaattaactttgaatttaggaagagtagaaatgcctggcacataagggtactcagtaaaaatttgttgaataaatgaattatatacacacacacac

SEQ ID NO: 118208 - DNA, 1050 bp, Homo sapiens
catcctgtttaggaaatcactgtcaacatcaagtcatgcagatattcttctatattttctataagtttttttttgcatagatatctttttaaaaacaattatctaaaaaattctgatacagacagttcacatatcacattttgcaaaaccttgcaattttctgccctaagcctcacaaatccttaaaaagctgtgcaccctttccccaagccagggtccccatccttgacttcccttcttcaaggtgggctcacctcacaagccctcattgtcaggctattgtattttcttggagaattctacagcagggatacactcacaaacttgccagggtcaggtgtaaatgagtgatggaatagggtgggcaccatggtggctggagaacaaatgccctgcagagcgacagcaaccacttggccccagctgactgttgccatatgacaatgaggctcctgggctacagatcttccatgtttcaaaacaaactcaagcatctgggttatgtgaaacatttcaatttctaaatgatgtcaagcagttcaaactaaaaattcactgtgtgggccagaaaaaaataaagaagatgtttgtgggtttgctgtagtctacggtcaaactttgtcccagggaagcaggctgctactccaagtgtggtcctgggagcagcaggaggagcatcacctgtgaaaacatcagaaatgcagaacctcagctttcaaatactgaagcagaatcagcattttatcaatatccataggtgattcataggtaaaataaagtttcaaaagcaccaatctagacatatggttctcaacactggctcaaattagaatcatttgaagaacttattattaaaaaaaatctatggctgtactatggaccacaaaaatctgaatctctaaggatgaagcaatattttttctttttattcctttattatttttaatttttgtgggtacatattaggtgtatatatttatggaatacatgagatattttgatataggtgtatacaatgggtaataatcacatcagggtaaatcacatcgc

SEQ ID NO: 118209 - DNA, 1085 bp, Homo sapiens
agaaagatggctcatctatttttcaaggaactaagaaaagaaacaggcaactgactctgcccttttctctctctggaatgctaaggaactcttgtcctattagtaacactgagtattcctgaaagaaggaaacagactatccttcttttaagaaaaagaaagaaagaaaagaaaaaagaatcaatagagttggatactgcagaatatgaggactggcaaaaatgccactactttttataagcagggagagtgtgtgaattttgcagtaatggaaaatgaacagaggagaatggctcagcagccttggaagccctccgggttccccccaggaggaagtgcttctctaaacagacacctgggggacacagcaagcacagagctttgagggcttaactccatcatcatggaggtacctcccaaacccacgagtctgcaaatgcagagagtagacatcagacctcacaagaaaaggagtaacagagccatagggtgatatggatagggcattggcaggaggtccttgggtcacctgactaagcaaaaaagctcccctttgagatgtgaaattcttaacttgatcctcatgcctgatattgtccctaatagaaactcttgcttagtttttctttcacttctatttatttagtccttattctccaccagccaccatgctaagcactcccctgattgagctcaccagactgtcccacccaacctgtgagatgggtgtttttactcattttatgggtgaaaatttgaagctgtgttcagaaacgttgtagttaatgctcagtggcttcttcaagtcatgcagttaattgttgggttatgaaaggtacttggatgtgtaacacatttgacactgagtacaactcctaatcaatgattcaaatgtcaacactgaaatagaggcaaagcatgagattacaatcatccctttgtacacatggggattggtaaaactgtgcatactaagtcctgcagtcagccctgtggaacctgcttatacaaagagtcagccctcagtgtaggcaggtttcaaattctgcaaatactgtatttttttaaatttcaacttttatttt

SEQ ID NO: 118210 - DNA, 1035 bp, Homo sapiens
attacaccaaaccccaaacccttctcttgtgtaactgaatctatttcagattacttttttttttttttttttttttttagctcagaggatacaaggtcctggtttcaggagctgtgtatttctggcatggctgggttgtaactcagaaaaggtgcactaagctgagagatgttcaagtgagggcctcccattgttatgggttgtggaacgccagccctcagtcatcatctacgcatttcatgaaaccaccctctaaaaggcactactgtagtattggttgctataatttcgtagtttagcattattactttaaattggatctctctactgacagcttaggttgtaggagttatgcttaaaaactttaaatcttatgtttccccaatcctactacctaattttagatttttcagacatattctgttactgtactaaattgatacttcctgaagtctgactctactaagcatatttcattttaaatagagtatattttaatttttggcgagctgccatttttttttttatttagattttaagggttaccaagcatcttgaatcatatagaaagtattacagtgtagtagcttaaggtttgtatttctaaagtttgtttccagcttctcctctcaggtcaccacagactcatgccgatgtggccattttctcgcctgtcacatgtcacatcgacttcagcagtcaatttgtccatgttggtcagaattaggtctagagtagcaatttcccggcttacttcctctattttctgagaaacaaaattgcctgctgggcaagtcaagaacttgtcagatattcaggttttagctcgatgagacattttattagtctagacattttaggtgacagaaacctaactcaagctatgttaggcaaaagaagattgatcagctcacagaactaagaagcgtctaggagcagcacagctgggtcgaggggcccgtgagcaccatcaggtggttcttctccctgtttctttttgtgtttggccccatgctctcctgcccagactggctg

SEQ ID NO: 118211 - DNA, 1088 bp, Homo sapiens
ttctttataaatgatccaggttcaggtattctgttataagcagcaaaaaatggaccaggacaggtccacacttttatctgcaattctgaaatccagaaagctgtgaaaccaaaatatttctccattgttttggtatagactcatttggtggcaaaacttgacctgacctgatatgactgtttataatctttattcactccatgtgctatatatattcctatgtcttgccgtagaattattaacatgtttgcttacatggtaccacctgaggacatattgaggttttcatcatgtgttagtgtaggtaccatattacctttataaaatccaaaaagttctgaaacacagctgacccccaagagtcacacagaagggactgtggaccagcatcctggagggagccatggacttagaattggaagaggtgggtttgcttctttgcttttgcagtgataccttgcatagccctgggcaagtcccatcgtcctcgattttcagttacctcatcaatgaaatggaacctgtcctgtctgaaaacacattgtaggctcagaaaccagatgattaagcttgttagaaatatgtgttaacaaagagtgaataggttctgaataagatctgaggattaccccttctgaggaaggttcatgagtttcattgtataaatgcattggcaattctctacctttctcactagttgattttttggttttgggtgaagttccatagaaagggggctaccagatctctgatttttgaggagcagaactatggctctaccttggctttctgtagcacccttccttggttggaggctacgatggatgggctcctcttcctcagctcagaaacacagttgacagggagaggttgctctggaacgctgttctggggtttatttgcagtttcctgttgatggcaataaataattatataggtgagatctggtgatggctacctacacacccagcctgccctcaaaagcatgaggacactttattatttttatttttatttttgagacagagtctctgtcacccaggcgggagcgcagtggcacgagcttggctcactgcaacctctgcctc

SEQ ID NO: 118212 - DNA, 1033 bp, Homo sapiens
tgtgcttcaggaatgggaaatgaagaagacctaggaagaggatgaggatttcattccaaaggaaataccagcttgtccacctgaggaagaaatgcttttttcacaaggagacaccaagagaagactaggaagtagccctcgttctccagggcacccaaaataccagcctttattgtctgcatgattttaggggatatggggagggaacaagtagaagggaagagggaaatggagagcatccttatgactttacaaagggtggaaatgaggatggagggatacagaagtctgcacagctgtaaaggttttatagatgtctttgccttcccttctgaggaagggaagaagtaatgaaagcacatgtgaataaccccttccatcccattcacagcatcgcactcccagtccttaaggcaaagggaggcagtgctgaagcattggtggtgcagtgtaaagagacaagacctgatcatctgatcacacttgtgccaacttgattcatattgggcattactaacaacccctggtcaaggtaaataggttgaacaatcaataacattatccctgcctgcatacatgtgaacaaaagctatagaggacatgcaaattctacagtcattcctcatatgctttagacagagtgcagctactggaatcttccagatttcagtgttttaaaatcagagctctgaatacacaaaaggaaagagaaatggagcagctgacatattttaagctcacagtgatactcagtgacaggagcacagagctctaatgtccacaggatgttgtagggtagggtctctcagtaaatcaagtcccttacctatgttctgacactgaggctcttggagctatgggttagaaatccaggaggcaatatgtctttattctaatgaagtcctcatcttgcactcagaggcccactagtttgcccttctatatattaagtaaaaccaagagaaattaagaggatgatggcttctttctgtcacatgggtgctaaaccttttacaaacacttgatacttcta

SEQ ID NO: 118213 - DNA, 1598 bp, Homo sapiens
gagtgccgcgtgggagagcaagtaagcattgcaggcggggagtcgggagcgtgaggactctgaggggctagcgagccagccggggtggttgtgggctggaaggcgagagctatctgagcgtaggccaggggaccaagcttctcggcctctacgaccgtgcactcacggccccattttacagacggggaaactgaggccatcagccgtgcctctttcttaggccgaggaaggtaaggagatccgaggtcatgcatggcctggaaggtgagaagtctcttaagcccccaagggagggatgtaccactctcccggcctcttctcccagcctgtggtacctgtgggtaaatttgggttctctcccctcactccgtgtgacctaaggccagtcctttctccgttatccgggcactgttgtacctgtcagtaaaaggaggccgctgaacttgtttctccaaacggccattgcatcagccttcggaagacaagttccatcggcagcttttattggtcgcttacgaggccgactgcagaattatgggtggttctttttattattacccatttagtagttaaggaaagtgaggtttagaaaagttgagtaacttccaaacttaaatatttgggaagtggtggaacccgggctggaaaccagtcagggcgttggaatcggcgctcttatttaatgagcgatgttaattaattttctcagagactgttgcccctacactgtttcttcctgggatagagaataaaaatagttgagtacgaggtagggttggacctctgaatagtaaagtaagctacgggagaatctggtaaatgtgcttaactacatatgtcaccctttttaccttaacacacctgacccaacatcctaccctagcacctaagtgagaggttgcattcagggtttcgggacttggttttgcttaccgttctcaagtctttttggcagcttgttggtgatgtaaggaaatgaccagaagaaaaatggttccttctggtaagctgtctccctactccagttctgaagcagtaggaattgagattggccacaactccccaaccctatttcttggtctaagctttggccattttccctttgaactggccctgagaattttttttttttttttttttttttttttttttttttttttgagacggagtctcactctgtcgcccaggctggagtgcagtggcacaatctcggctcactgcaagctccgcctcccgggttcacgccattctcctgcctcagcctcccgagtagctgggactacaggcgcccgccactacgcccagctaattttttgtatttttagtagagacggggtttcaccgtggtctcgatctcctgacctcgtgatccgcacgcctcggcctcccaaagtgctgggattacaggcgtgagccaccgcgcccggcccctgagaatattttgacctgctttttcaagtggataaatgtggtttttttagggagaagatgtttcaccgtgtgtaattagccccagatctacggtgaccatattttctgaccccaaaatgtggaactgtctataaaatcacacaccggattataataattgaatttaa

SEQ ID NO: 118214 - DNA, 1820 bp, Homo sapiens
aagacaagatggctacaaacttcatggccgcaccattaggcttgcccgagtggaagtggcagtggagtctcagagaagactgtgaagaggccatcaggaactggatgttctcccagagcgcagtcacctatgtttcttttatttattaaactaggtttgtattgtacatgaggtacttcatgtgatatgttttggatttagtcatattggctttatttctaagatattctattgatttaatgtgacctgtttggtctcatcagaagtcttaccattgggcatttgaacagtgtgacaggtgttccaatggcctttatcaaaacatgtttaggaaaattggtactgtgataaatttgaatccaaaatccttttaactatgggttttcaactacatgtttcttcctagcggtctctataacaggaattgtgtagtatcttgtattttgtggaaaaaggagatggtagggattggttcaacatttgggtacttagaggataaagcttcgtggtcgtataaatttagatcatttggattgatttttatacacatagattttcaggactttaccttttgttttgtttttttccttttagccatcttttgttcttgtaatcccaactagataggctttatgctcacatcattgtcccatacccacccctttctcatccccatttgcaggggctaaaggtctagatgagacttggaaggcaaggagcatcgaaatttgagatacccaggaccctttcaagcaagaatggccaaaaagccttgtgctgtctttgctcttcaaattattttcagcctccttgtcatataatcatttcaggcaaactgaggcaacactaacagctaatgacccagatggctctatttgggtaatttacctacaacttattccaccagcctttactcctctgcccttttgtcaattttaccttataatcctttattaaatgatgggaggtggtgatcaggacaaaagtgttaggttcccatgatttctcatttcatttattaatagttaatgctgaatttttttttaagtttcctctggctctatttatgttactttttgcgataagaacacttaacataagtattctctcctcttggcaattttttttttttttcctgtgttgcccaggctgacctccaactcctgggcccaagcaatcctgcctcagcctgccaagtagctaggactacaggcgttcaccactgcgcccgcaaagtttttttgttgtttttttttttaagttggtactcacaaatcactacctctgttatattgacaagctctatttcctattctttgtatctgttaagtcacatctgtgtaaacattgagctcaccttttatatattaacctctagaattaatgggcctatgtggttttttttcagtcttatagctggtgttctgtaaaagatttgtccaataaacgacttaatgaatgatacatcagtcagattttaggaaggcagtcaattatggatattttaatgttggaagaggccttaatgatcaaatctcaccctttctgcttctgaagtatgaaaatctagtctttttaggactggacacaaggaaaataatctctaaactattgactaaattccagtgagagtatgaatgaagaacaactagatattaatgtcaatcatttaagattaatgggcatgcaattaagtctccatttaagattaatgggcatgcaatgaagtctccagcagacaatcagatgttgttggatgtctagattatataggtttaggttgaagttataaaataaaataaaattcattttccactgga

SEQ ID NO: 118215 - DNA, 1029 bp, Homo sapiens
ttgtctttttttgccttccattctgtgagatttgacagatggtgacaataagaaaatgagctgattgtaattactctctgtgtgtttttttattgctagctatcattaccagttagaattaacattaattacaattaacaataattttaggtatggaatgttatgattacctaaagagatgtctctacctaatgagctcaagtgatcctcccacctcagcctaccaagtagccaggaccacaggcaagtgcaccaccatgactggctagttttgttttttggtttttggtttttggtttttggttttttttttttggttggttggttgttttttacaggcggggtctcactatattgtccaggctagaagaattttctaatggtctattacacctcccgttttggcaagtaaattcagaataattttaggttcttttgttattcagtagttttgcagacttaaaagtgtaaatttagaattagaagatgaagctatagtagtaagaatctcaagctgaagggctttggggagccaaagcagcatattagagcataggcttgaacttaaatctcagctcagtcacctgcaggactttaggcaccagtgatttcacccttctgagcctgtttctttattcgtaaaatgattataataattctttcacagcgttgtgaggattaagtgaaatgtgttaaatgcctactacagtaggtgctcagatatttatttttatttttttattatgcacattgtttttcctgcctttttatggctgtctaaagtctagggaaaagggaagactggttaatgatgagtagaaaaaacttgtaagctaatcattcactgacttattttccttccattttctggtttttaaaattagccacaccacaggaaacccacatttttagatggaaagagcaagaaaattgtgtcagtgctcttagttattttcatcttaatggtatagtgaaaagacattgacttgagatgatactaaggaagctttggctcactctcacttgaag

SEQ ID NO: 118216 - DNA, 1112 bp, Homo sapiens
attttgatgcatctccaaataaattgcagacatcaggacacctcactaaatacgtcatcgtgcatatcattgactagagtgtcatatgtgtttacagttgcttttttttttcctccctcaacaactgtcattttaactacatgactcgtgaagattttcaagtccctcacacgtgatattcccacaggcagagatcctgggcttcggggtgggaggacaaagactctattccgctaggccactctccatgcaccccagttggcaggagtgcctggaacatctgatagaagcatcacaaacttacagggtccagtgcagtgctaaagcttcttgtgtagcagaaccacagcccaggccatacagggttaagaagactgaagcatgccagaaaccagtttgagactgagagtttagtgcttgccaagaaaagagaatcctgaggctagagtagccagagaagccctcatggagaaggtggagtttgagccaggcattgaaggatgtggaagagttaggcaggcagtatccatgagtgaccatgtgttctctctctgtccttagatcgtttgaatacagtgtggctaggagtaagcagagtgtgctgtgggaatatgcagggcactccccgttttcttaggaacaggcaacaggacaggacatttctcaccattggggaaggagcaggacctccacccagcagaattgctgcattgtggcaacatggagctctctgcctccttcctcccagctggcccttctggccccatccaagagtcatccagagcaggacacttggcaatgcctcactgcccttcagctttctagattttcctcagccctctgacgggagcctctgttcatccttggtggtttggactctacccacaacaagaatgcggattcctgttaggatggcttaatgcttgtgcttctgcaggaccaaatctgagaacccccaagtggcatcaggaccctctaaacccacccatatagttccatatgctgcccttctcatgctggtctctttgcagagtgtgcgtgtcctctcactgacaaagctgattgtcctccagcatcttgcatgaaatcttatttccccaagaaggctgtgt

SEQ ID NO: 118217 - DNA, 1020 bp, Homo sapiens
gctgggtgagtggtcagtcctggggctccagtgcccagcgccctggggctggtgacagcactgggcccttctcagacttcccagaccatcaaggccagaaggtcatgtggcccaatctcattttacagatggagcaacagaaacaagagaggggaaggaacttgcctgaggttacacagtgagttagttgcagagccgggattagaactcaggtttgactcctaggccagtttctttccctttcaatttgctgcctctaaataatcgtgattatatcaccttccacatgctagtgcttgccaggcaccttctgggtggtatgtaggcattacctcagctcccctctaccaacctgcaagatgagtgttatatctcctcttaaggcaactgaggctcagaaaatgtatagatttaagctaaagccattacagcgagaggtgggattcaaacccagcagcatctgtccaatacacgttctgtttgatgcagaaactctgcttctcagaagtgatgctacaggtggtcttacagatgtgcaaagtagcatagataccaagttattcactacagcattgtttgtaatagcaaaaggctgaaagtatcctagctgcctatccactaggacctggggttaaacaaattattgtataactacacaataggctgttcagcagtcagaatggggaagtctttatgcccagatacagggcaatctccaagatacagtgtattgttaaagtggagagcagtgtgtgtagtatgtgggggtggggaaggaacaagtcatagcagctctgtctgtgtttaggagtccactgctctgtcaagttgcagagtgcaggatggctgtaaggagctaggataacttccaagtgatctcagtgcccaaggccaccatctccaaacaagcccagtggctgtcaccccctggacattctgggataaaatctgaatttccctcacttgtggatcctcctggggaaaaaaaatgtaaaatgttacattattttcattttcatt

SEQ ID NO: 118218 - DNA, 2067 bp, Homo sapiens
aagctgagacttccatcgacccagcctttttctgttgaccgatgaggactttgaatgacatccttgcccacgctcccccaactggccagcggcggaagcagagcagaaactgagtctcctgactccatgccccttgcttcttctgcagccgcatcagcatggagaggccaggacccaccatttagacagccctgctgcaccctgagcaccagggtctcgttgtacctcaatgctggaccccagtagggagttcagtgggtagaagccaagggaaagttgacttttgtgctcttttctttccagaggggaaagccctgtaccaggtggcgtatgagaatgaggtaggcaacagctctgacttctatgacatcgtggtcatcgccacccccctgcacctggacaacagcagcagcaacttaacctttgcaggcttccacccgcccattgatgacgtgcagggctctttccagcccaccgtcgtctccttggtccacggctacctcaactcgtcctacttcggtttcccagaccctaagcttttcccctttgccaacatccttaccacagatttccccagcttcttctgcactctggacaacatctgccctgtcaacatctctgccagcttccggcgaaagcagccccaggaggcagctgtttggcgagtccagtcccccaagcccctctttcggacccagctaaagaccctgttccgttcctattactcagtgcagacagctgagtggcaggcccatcccctctatggctcccgccccacgctcccgaggtttgcactccatgaccagctcttctacctcaatgccctggagtgggcggccagctccgtggaggtgatggccgtggctgccaagaatgtggccttgctggcttacaaccgctggtaccaggacctagacaagattgatcaaaaagatttgatgcacaaggtcaagactgaactgtgagggctctagggagagcctgggaactttcatcccccactgaagatggatcatcccacagcagcccaggactgaataagccatgctcgcccaccaggcttctttctgacccctcatgtatcaagcatctccaggtgacctactgtctgcctatattaagggtccacacggcggctgctgcttttttttaagggggaaagtaagaaaagagaaggaaatccaagccagtatatttgttttatttattttttttaagaagaaaaaagttcatcttcacaaggtgcttcagacttggtttcttagctagaaaccagaagactacgggagggaatataaggcagagaactatgagtcttattttattactgtttttcactacctactcccacaatggacaatcaattgaggcaacctacaagaaaacatttacaaccagatggttacaaataaagtagaagggaagatcagaaaacctaagaaatgatcatagctcctggttactgtggacttgatggatttgaagtacctagttcagaactccctagtcaccatctccaagcctgtcaacatcactgcatattggaggagatgactgtggtaggacccaaggaagagatgtgtgcctgaatagtcgtcaccatatctccaagcttcctggcaaccagtgggaaaagaaacatgcgaggctgtaggaagagggaagctcttccttggcacctagaggaattagccattctcttccttatgcaaagattgaggaatgcaacaatataaagaagagaagtccccagatggtagagagcagtcatatcttacccctagatgttcatcccagcagaagaaagaagaaggtgttggggtaggattcttcagaggttagcctggtactttctcatcagacactagcttgaagtaagaggagaattatgcttttctttgctttttctacaaacccttaaaaatcacttgttttaaaaagaaagtaaaagcccttttcattccttttggacctgttcttttctgtaatggaagaactaagtcttaggttcccggggaccaaccactacattagtatcttctggggaaggggagggagccttgagaa

SEQ ID NO: 118219 - DNA, 1045 bp, Homo sapiens
acctcacagctaggaagtggccaaggcaggaagaagcccaccggcctttcaacaccaacagaattctttcctcagaaggaatgagggagggtggaggggtaaggacatggcatttttaatcctcctgttggactgggaggctctcaaggtcagggacagtgtctgattcagcaccccaccccctcgggccctcaactggccccactcaggatgtcacaaggccccgtgtgctgctggagggggtcccagggtcggtgacaggcagaccacagcctctggcctggaaggaggagagagggattggcaggcccatccaggctgggggtctgaggaactgtgaatgaggccgtgaacagagaccgctggggtccagcaggcctggctgcagaagggaagctctgcgcagtggaaggcaggacccggtggcagccctgggagcaggccccgctggcccctgggagaagacctccatgggcctcagcacgacactcctaggctggcagccgaggcctggttcacgtgatcccttgatttgtgttttctgacctttcttcacagacactctaggaagcctggggacacagagcctgccaggggaagtcacactctcatgaaagagctagccagcaagaaactagaaccgtggacatgtaagataggcacatgcgtggcgagtccgaagcgggaagcaagcagagggtgtgacagaatactgagggggccagggaatggctcttccagaggagacttctgagtgggagacaggagcaggggaaggagcagcatgagctctgggaagaaggcatttttggcagcgagcaatgcaagtgcaaaagccctgaggcatgaaaaacactaaagaatctgtaggaggccaaggtggccaagcaaaaggagaaagagggactccggcaagagatgggcatttctcaggactgcggtggcagggaaaagagagccccctgaaggacattccacattcaaacccctgccctgtggtgaccctgccaggtggctgggtcaggatcttccctgtcaggcccag

SEQ ID NO: 118220 - DNA, 1127 bp, Homo sapiens
actgcctgggtccaattctggcttgtttacttactggacaagtgaccctgggcaagttgcttgctgtttgagcctcagcttcctcctctgtaaaatgggtacaattctgagcttgcatggttgtcatgaggagtgagggatgtaggcacatagagcaggatgaatggggctgatgttacatcgcagtcagagcccacacctcctgcgggcaagataccctgagctatgttgagggagaagtgggaatgaaacccggccagggaatgcccagagttgctgaagagctctggaacaggctctggaaagaggcaggaggaatcaaaagtcagaggctgtgggacacaggaaagtgatcagcttgagatgcctgaaggactgggggggatctcctttcctgcctttctagggcattgtgtgggcaatgtatctgaaccactgtgcactcacccactgacgggggaccccaagtgaggcctaggaatctgcattacaagcaccccatgaattcccatgcatgtggaagtttgcgaaatgccaggctgtagggcggcctaggactctcacaaactgccgaggcaacggaatccacagagagaaagcactgctttaggttatttagcgagctgatggcagaggtggaacagaacctgcctctctgcccagccagggattccataaggtggtgcaaatcaggagaaatagatgacactatttgtggagttcttatgaggtccaggcactacctcagatcttcacatgaactaattcatttaatcctcacaagagccagtgaggaaggggcaattattatccccactccacagatgaggtacctgaggcaaagagagtttaggtggcttgcctgaggtcacacagctcatgagttgttaagttgtgtgtgccagctgcccctggggctgctaactcccccaggagtctcccacctcctgccctgcctcttagctacctcaaaacttcctggagaccctccaacagacctcatggaagggggcagaatatgtatgggagacttctgggagtcagacactgtgctgaacagcttgcattatcatttaatcctcccaggattcctgtgaggcaggaatcagcatcattccatcaccctc

SEQ ID NO: 118221 - DNA, 1067 bp, Homo sapiens
cacaaaaaattagccagatgtggcacacatctgtaatcccagctacttgggaggctgaggtggaaggatcacttgagcctgggaagcagaggttgcagtcaattgagaagagtcactgcactccagcctggttgacagagggagacctcatttcaaaaaaaaaaaaaaaaatggataggtgtcaggtgtcaggtgtcattttcccccagaactggccaggctgggaaggggctgattttgcccaaagggctgtggtgtggctgtgagggaccaatgacaaactttctgttgcggggcagcaacagggttgaagggagagcagtggcctcagagctagaaggcttgggctcaggctccggcagggcctcactcctggcctccgtctcctctgtgaggtgggattcttcatcactgccctcagaggtgtcggggtgggcagcccaagagtgtgcgttctgcagatgcatagactaggttcaaatccccttcaccactttttaattgcgtgacattgggtaatctgcagtggtttccttctctagaaagtgagggtgatggaatgatgctgattcctgcctcacaggaatcctgggaggattaaatgataatgcaagctgttcagcacagtgtctgactcccagaagtctcccatacatattctgcccccttccatgaggtctgttggagggtctccaggaagttttgaggtagctaagaggcagggcaggaggtgggagactcctgggggagttagcagccccaggggcagctggcacacacaacttaacaactcatgagctgtgtgacctcaggcaagccacctaaactctctttgcctcaggtacctcatctgtggagtggggataataattgccccttcctcactggctcttgtgaggattaaatgaattagttcatgtgaagatctgaggtagtgcctggacctcataagaactccacaaatagtgtcatctatttctcctgatttgcaccaccttatggaatccctggctgggcagagaggcaggttctgttccacctctgccatcagctcgctaaataaccta

SEQ ID NO: 118222 - DNA, 1039 bp, Homo sapiens
ggccaccgctaatcccagggcaataatatctccccctcacctttattagtggcttgtggtttatgggatgcctccagtgccagctcatgtttaatcctccccatgatgctgtgaggtagctattctcatgcccattctacagacatggaaactgaggctcagcaaagctaagctccctgccagaggtcacatagcatgtctgcgattgtgcctgggcccaaattcccaggccaggcttcttgaatgctgcatcagttcaagctcatttcaggaacctgaggtttgctacctaaaatcggcctgttggatcttgttcagccacatgaaacagcagatgtgcgcctgttctctgaagagcccatccctgcagcctcaggcactcagcccttccctgcactgccttggccctggggctgagcctgagagagaggaatggaagggcgctttgggtcctgacagagaagcgtgggtaaaagggagacaaaaagggggcagacccctagcatacacacagatgggcacaggcaggcaaaccctacagtctaggaaagtgggtaggggccaggcaaggtggcttacgcctgtaatcccagcactttaggccgaggtgggaggatcacctgaggtcaggagtttgagaccagcccagctaacacggtgaaaccctgtctctactaaaaatacaaaaattagccaggtgtagtggcgagcacctgtattcccagctgcttgggaggctgaggcaagagaattgcttgaacccggcaggcagaggttgcagtgagccgagaccatgccgctgcactccagcctgggcaacaagagtgaaactccatctcaaaaaaaaaaaaaaaaaaagtgggtatgggctggatcagaatcctggatatggctttgatcaaatcatttagtgtctgtgggcctcagttccctcatctggaaaacgtgcattacagtagcaccaccttatagagcagttccaaggactcagtggggaatccttagagtgcatttagcacaatacctggacataatgcct

SEQ ID NO: 118223 - DNA, 4274 bp, Homo sapiens
agcctgggtgacagagcgagactgtctccaaaaaaaaagaaaaaagaactaaaagaaaaggagcagtttatgattgaagaaaacatgacctgggctgaagaagtgaggattgattggagtgggctagaatgagctatagtttctagctcatttgtaaggaggtagacaaaggagcattggtgcctcagagtgggtgtctggtgagaggaaaaacggtgcttaagagattttcaggctattgctgtgggacaggcatattttctccctttgcctttagctgtagataaagtgtggttatgacctgaggcttcttgtattcaaacttggcctagggcctatgtagaggccctagggtctacttgtggtggaggagggaagtatttgtagaatgtgtaggcttgagaagtaaataaagccaaaaaagcatcacttgcttacatttttaaatgagtcacaaaacaatctttctaatgcggccggtaaagaagttttaaaggtctaaggtttctctacagaaattacatgcttctcaggtctttgtttagtaaaataatacagataattatgctttgaatgcatttattattaaagctaaccgttttaatttgtgtcagaaataatttgtgcctatggtaggattaaaattgtattctttagttaaagcaaagcaatctgtttttcattgatttgataaatatgtgaatgcctaatatgttctgcatatgtaaaaatgcagaaacatgctcatttgaattactaataattattttagtatgctgagaggctttgaattcactgtaccactccttcctagagtcattcaaaacagaaaaaattagttttaagtatagattcatgtttttctgttttaaaaagttgagctaatacttttcacaagagacgaaataacatgagccactataattattggctcagttccacccaatttccatattttgggtgtaatttaaaatttttgacttggaattttaactttttttttgttttgattttttaccaggtttctaagcatgaattgaggaacagaagaagcagagcagatgatcggagcagcatttgtttctccccaaatctagaaattttagttcatatgtacactagccagtggttgtggacaaccatttacttggtgtaaagaacttaatttcagtataaactgactctgggcagcattggtgatgctgtatcctgagttgtagcctctgtaattgtgaatattaactgagatagtgaaacatggtgtccggttttctattgcattttttcaagtggaaaagttaactaaatggttgacacacaaaaattggtggagaaattgtgcatatgccaattttttgttaaaaccttttgttttgaactatactgctttgagatctcatttcagaagaacggcatgaacagtcttcagccacagttgtgatggttgttaaatgctcacaattgtgcattcttagggtttttccatccctggggtttgcaagttgttcacttaaaacattcttaaaatggttggcttcttgtctgcaagccagctgatatggtagcaaccaaagattccagtgtttgagcatatgaaagactctgcctgcttaattgtgctagaaataacagcatctaaagtgaagacttaagaaaaacttagtgactactagattatccttaggactctgcattaactctataatgttcttggtattaaaaaaaaagcatatttgtcacagaaatttagttaacatcttacaactgaacatgtatgtatgttgcttagataaatgtaatcactgtaaacatctatatgatctgggattttgtttttattttgaaatgggagcttttttgtttacaagttcattaaaaactaaaaactgtttctgtaaggaaatgagattttttttaaacaacaaaaaatgccttgctgactcactattaaataaaaatctccccaattttttgatagactacttcaagccatttgttacatggtattcctttgcaagtcaatttaggtttcgtgttataacttttcctctttttttaagaaaaatgaaaaaagtaattcttttgtctgaaggggaaaggcattctttcatttttttctttttttttttttttttttatgacttgcaggcacaatatctagtactgcaactgccagaacttggtattgtagctgctgcccgctgactagcagctggactgattttgaataaaaatgaaagcattaaagggtttccctacaaaacatttttctttaaaatacttttgaaatggctataagcagttgactttcacccttggagagcatcacactgtgtgaggttcagtgattgttgaccctccccagcccctcctgcttctttaagttatctgtgtgcgtgcgcttcctctcaatcttctttgcacgctcatttctttttctctgacccatgagaaaggaaaacttactgatgataatttttaaatagtgtaatttattcatttatagcatgtcaggataaattaaaagaacatttgtctggaaatgctgccgggagcctattgtgtaaatgtaggtattttgtaaaataaccttgaaattgtaaattgacacgtgtttggtcagattgtgtcaagtttaatttgttttgttttcttttttcttttttttatttgaaaactactttagcaataattaattccatgattatcacattctgccattaagggatattagtaccgtaatactgaagaaattttattaagtctgaacttctggggtaggcagcttctttgtttcttttctatccacccttgtcggttgaggtatttgtttcttgactaataaaccctttgatacttttagccagaaatcagtctcataaagctatttttgagtatagtttgtgtaaaataaaaatgtttagctttggtaataacttccaagctgaactccctctagcaagatatttttcagtgcttttatttactatgcacttagactatgcactttttctgaaatatttttgtaacacttttttgtatttttgccatttgaaaaggttgtggtgtagttggtctgtaattaagttgcagatttaaaactgctgttagctttgtaaatcaaaatataggtgttttttgtcctggtatatcgtcattccatctgcagctggagctggaatcccattgatcttctagctaccattcattttcttcactgttcacaaaagaagagtgtgaaattcagtgaatgctgttactaatcctgttacgagatgaatctcatttcaccaaaattaaattatgtttttccgctaaaatgatgatacaagttgaagacacatcactctgaaattggaagacctcaccacttaaggctccacagtggcttactcagctgaactctaggttactactctttactttgttcacccattggggggtgcagtttttttaaaatgttgggagatggccattctaactactgttgaatgtctctgttttgggaaggtataacaagaaataaaaaagaatatatatgaagggagagactggttatctcctcccatatggttgtgcttatcctcttatggcttacaaatgaatatttggaggtttgctttcacaatgatttcccatcaacaaatatttttagtaggatttttcctgtttctgttagtccttgcagtactcataaatgttttaagctgagcatactgtaatagtcataagtttaatttcattataataaaaataatcaaacaaaaggactttagaacccaagacaatgagctagttttccctaaagtttgctgaactattaaggaatatgttcttatagcttttgactagaatgagtcatgggaattctaagaagggatggcctagacatttttagctcagttaaattcagcatttaatgcaggtgagttcctgggtcgttttccaactagtctggaacagtctggttctgactcaaactggtataaagcattattttaggttttctctttgccagtttttaagcagttataaccatgtaaatcaagatgtgaggacatctatatgaagtatagtaaagaagtggtgtcagcagatcaatatgtgtgtcctgggtgtgctgctctcttaagtgagactttgtgagactatactttaaatgcattattaccattgcttacattttgggggattttcttcctcctcaaaacttccatttctattgtaatattcttaatgacaatctttttttttttttagcagtgtatgtttga

SEQ ID NO: 118224 - DNA, 1073 bp, Homo sapiens
ggatctcctgagcccaggagttttaagtccagcctgggcaacataacagcaagaccccatctcaaaaaaaaaaaagcatatcttttgtttatttttttaatagacaaagtctcactatgttgcccaggtttatttggaactcctggctttaagtgatcttcctgcctcagcctcccaaagtgttagcattatagatgtgagccacctcgtctgggccagagcatacattttagatttcagattgggtggcgggcagggatagaatatccttgttagttatataaaaataaacttttttttgctttttgcagatttgaaatttaattaagctattaacttcttaatcatcacatcctccaactctgttttaactcccccctccccctcccctttttttttaaggaataaagggattcattcctcattttaactgatgttacagtgaagatgggttcttgaactcttggaagcctggatgagccacctaatctgcaagataaaaaccaaagaccaatgcgtattggggaaaagaatgcttagtactgcaagactgttgaatacctgttgaatattcctattgaggttttttcctaaacatacttcagtaacatcttaggacaattcactggagaaatgttgatccctggctggaatgtcataccattgacccatttgaagagttaaagctggatttgactgctctattctaccaggaatattgttagggtagccttttaccagtttctaaacaattgtaatcatttattgactcagcaattcctcagataacaggtcaaaagatgtacagatacattctgaagttttcttgctattaaaggcacaagagtttccttgtattttgactgacaatgtagcatgtttccattttagtttgttagtgatggtggttttccctttgaaagccatttggtatattcaccataacaattagtttaatatgattacataagaaaactatgataaaacccagcaattttagtagttgtgaaaatacgttttttaaatcatgtttaagaagaattgcaagacttgaaaccaaatcctgatggggg

SEQ ID NO: 118225 - DNA, 1550 bp, Homo sapiens
catttactaatgttttatatggtaatttttgaaaaatatatctgatatttcttcagtaaaaatggtgttgttttaataacttaataagaatgtttaaagattctttaagtctggcttatctagctaatgtgggcctattaaataataggcagacttctgccttccttatattctttagatcttttcaaatactccattccaatatccatcaaaagacttctctttatgccacttattatctatactagtttttaatgttcaattactacaagattataattactgtttttattcatgttcccaagaaaaatacataagattcacacccaacacacttcgaaatttatttcactccctttgactatatgtgattatcaaaaaagtatttttcaagatattaaaaataagtaaaggaaaatgaaatatttttaggacattcaaaatctaatgaagttcagtgtttctttaattgagggcaggcagaggtgggggagaatttcagaaggtagtgaacccaaaggtggattcttggataattctactattctgtactctcatcatcttaacccatctgtttactaccctaaccatagttactaagcagagttttatcataataatatagacagctctcaaagtattgacattcagaggggattacaaatattatttttctatcatattgacctaccatgtccacagtcttccttgaattaccttccagttttactgggctgcatctaccgtttatgtctagtttgactttttctgagttcaccaattgctgctaggaatgtgctggtcactcagcagcacacccacatcacaggggaagattttgaaatacctggacagtctgaacacactgctctgaatacactcaattctaagaagtaccagggaaccgcatcttcttgctgaaatcttgaatttttgtcagcttttttttttactgtggacagtaaagctggaaagatctaaataacccaacaggaaatgcggatgaaagtgcaagagttggtttgtggtcatctggagtccatgtctccaagactgctggaccttcaaattctgcaacttgttagatcatctggatgatagcacaactgttagaagacctagaagaatacagcgttgctatgactcagtggtgttgaatgcagaccatctaccagctggggaaagaatcaattataaacaggtattttaaaactccagaacgtcagaaatgtgtagcagaatgaattctgttataaggaagacaaaacaattcagtctgttttttaatgcagtttaggaatagtgtatacctcctatacttaaaattgtcatttatctttcccaactttaaatactcttttagtttctatagggaaggaagagttattacaggttttttttttttaattattctttaactttagatactgccaatctgatttaaaattctccaagcttaattctgtgcaacaaacagaaccacacaagcagccaggcactgtggctcactcctataatcccagcatttttgaggctagatgggaagatca

SEQ ID NO: 118226 - DNA, 2445 bp, Homo sapiens
aaaaattagctgggtatggtggcaggcgcctgtaatcccagctactcaggaggccgaggcaggagaattgcttgaacctgcgagacggaggttgcagtgagccgagattgcaccactgcactccagcctgggcaacaagagcaaaacatggtctcaaaaaaaaaaagagagaattcaggtaatcttttaaccccagaaaagtgtcttccccaggtaccagtcagacatcttattcccaaacttccagttgaatatttactcttacttgtttttaggaagtacctcctcttatgagtattcccctagataactgacagcttgatttcatgtttcagttttcatgctgcctttttcatctataataagaaatattttagaagctgccacacttgaggaaatattcgttgtgtaaagaaatgctgtcactgtcttaaaaagttagtaggttatataactggactctgttattaaaggattaacataaaatattttatgtgttccaggaccctgaaccatcaatatgactacacatttgattggacaatgttaaagcagaaagcagcacagcaggcagcctcttccagtgggcagggtcagcaggcccaaacccccacaggcaagcaaactgacaaaaccaagagtaacatgaaaggttagtagccaagaaccaagtgacgttacagggaaaaaattgaatacaaaattgggtaattcatttctaacagtgttagatcaaggaggtggttttaaaatacataaaaatttggctctgcgttaaaaaaaaaaagacgtccttggaaaatttgactactaactttaaacccaaatgtccttgttcatatatatgtatatgtatttgtatatacatatatgtgtgtatatttatatcatttctcttgggattttgggtcatttttttaacaactgcatcttttttactcattcattaaccccctttccaaaaatttggtgttgggaatataatataatcaatcaatccaaaatcctagacctaacacttgttgatttctaataatgaatttggttagccatattttgactttatttcagactaacaatgttaagattttttattttgcatgttaatgctttagcatttaaaatggaaaattgtgaacatgttgtaatttcaagaggtgagtttggcattacccccaaagtgtctatcttctcagttgcagagcatctcattttctctcttaaatgctcaaataaatgcaaagctcagcacatcttttctagtcacaaaaataattcttttatttgcagtttacgtatgatcttaatttcaaaacgatttctttgtttttggcttgatttttcacaatgttgcaaatatcaggctcccagggtttaatgtggaattgaagtctgcagccaggccttgcaaattgaaggtaactggggcaaatgccattgaaaccgctagtcttatttcctttctacttttctttggcactcttactgcctgtaaggagtagaactgttagggcacactgttgctatacagtttaactcccattttcatgttttgtctttcttttcccatttctggggcttacctcctgatacctgcttactttctggaagtagtgggcaagtaagatttggctcttggtttctaatttttaaatttctgaatactgccctagtctgaacttggcctttatagattaatctttgcttcacatttttagtgttgtatttaaactattttataatttaaaaatagattctaatctgaagatacttttcaagaaatattattaactgatgtcatcctcatcccagcagctcatctgttaggaatgaagttgagatgcttctattccatgtttttgtatttgggaaggattcaaagttgaaggtttattgtcgttgggtttttcagatggtgacatgtaaactcaggatagcaaaccctaatgttcacacagtgctctgcctctgcatctcagttgggatagttgctccttttgagtgttttaatcatcgtataactaatcatagtgccaagaagttcataatgtgttatgtagctaatgtcactgaaaaacagtcctaccattttaggtaagaccaaacagagtctctaacccaaggacttgttacacctgacaacctatagtatatttgctttttctcacaaaatgaaaccaattttgccgaaagctagctgggataataggatcatcacaagttgcagtttctataactaaaattagattgaaatctcttctgacctagaacattttacttcaggcattcagcagatttcagaaagaattaccttattttaagttagtttctttgttagtttactgtgtgtctcttattcaataaacaagcagaatttgtgtcctgccctatccatgtcttaaagatgagaagttggatccactgagttagtttcattggggcggg

SEQ ID NO: 118227 - DNA, 1143 bp, Homo sapiens
caatctgacaaaaccctgtctctactaaaaaatacaaaaaattagctgggcgtggtagctcgtgtctgtagtcccagctactcaggaagctgaggttggaggatcgcttgaagcctgggaggtggaggttgcagtaagctgagattacactactgcactccagcctgggagacagattgagaccctgtctttaaaaaaaaaaaaagttcacgaagaggcgcgactttgataaaatgacaggttttaacaagtgggctatgtaagttatttaagaacatagtactgtataggaaaagcactatatgggaagaacatatgtatttcttctactaatattgtacataatagggtaggtagggtcatgaaattttatttaaatttatgaggagaccaagccatcattttagctctcatatcttcctatgaaatggtaaaatatcccgcccaaaaatatctttttgcttatacttaaatgcatttatttttctatcttgaaatgtttgtttttaactttgttttaacccttgaacctataggggtttcctgcagaatttgcgatgtacttaaactattgtcgtgggctacgctttgaggaagccccagattacatgtatctgaggcagctattccgcattcttttcaggtcagtttttaaggtattttaagattataaactctgtgagggaaattggttaaatttacctaacaaattcattctgataaatactaaagtaaagcagatctagctaacatgaataaaaggtttcagaaactgatttatttgggactaatttggcatttttctatttgtagtgtaaataggtgattttagtttggagtggatagagagttgaatcatactcaaagtagaatgtaacttttccagaatagttataattcatattagatataagtggctgtcagtgccttctggaactctccaactttgtacagtaccaaataaaaagcaattaaaatatcacatagtcatggagtctgatcaagtggtagcagtcctaaactagggtagggttccttaggcacaacccagaactggtcttgaaaaaggggggggaatagattacatgtggctcaaactcttagttggaagagagtaagaattgaggtaatccgcccaggtac

SEQ ID NO: 118228 - DNA, 1049 bp, Homo sapiens
gcttttcagctgggtatgatgatgcacacctgtagtcccagctacttgataggctgaatcaggaggattgcttgaggccaggagttggaggccacagggaattactgctgagcctgtgaatggctactgcactccagcctgggcaacatagtgagaccccatctccttaaaaaaatatatagaaagaaagaaaatgcttttcaattttggccccagccatttttacttaaatctaatatccatatattcctattagactcaccctttccctatagctaaaattaaattcttagagaagaaacttacatcagaagttaacagtttgggaaaaattttttttagatgtattatactttgattttttaaattctgggttaaaatttctcttgaatctcacaggtatatgtttatatgtctagtgcgttaaactaccatggttcttctcagtagcactgagtatatcttttttattttattcttttccacaggctgcaacaaagaaacaaaaatatgaaaagattagtgaaaagaagatgtccacgcctgttgaagttttatgtaaggtaagtatgcatgatgaatattaaaaaaatataaatgaagccaggcacaatggctcacacctgtaatcccagcactttgggaggccaaggcagtaggtcacatgagcccaggagttcaagaccagcctgggcaacatagggaaaccccatttctaccttaatagataaatgatccggctgggcacagtggctcaagcctgcaatcccagcactttagaaggccgaggtgggcggatcacttgagcccagaagttccacaagaccagcctgggcaacatggtgaaataccttatctaccaaaaatacaaaaattagctgggtgcagtgatacacgtctgtggtcccagctactcaggagcctgaggcaggaggatcacttgagcccgggaggctccaattgcagtggtgaatcttggctgtcttgcaaggatctgagattgtgccactgcactccagcctaggtaacagagtaagactctgtctcaa

SEQ ID NO: 118229 - DNA, 1050 bp, Homo sapiens
gaactcctgacctcaagttatccgcctgcctcagcctcccaaagtgctgggattataggcgtgagctaccgcgctcggccattatatctagattttgaaacctcatgtttgtttaccagtagtaacaggtgtacagactatcaggtgtcattatgacagatagcacacttgttgcttctgctgtcaagcatgtatacatttctttctttataaagacaggttcctgagtatgtaatgaaatgggcctgtgaaatctgcaaacgacaaggataaactactagactttttttttttaacttgatttattgatgaagactagtaaaagcttatgggggggtgttaagtctgttcattatctgttctattaatacttaggatactttattttgatatatttgaatgcatagaatagataccatttaatgaataagacgcagtttaattgaacaaggttggaaacctaatgtttctgtatttctcttttaaagttattccttattgattttggtttggccaaaaagtacagagacaacaggacaaggcaacacataccatacagagaagataaaaacctcactggcactgcccgatatgctagcatcaatgcacatcttggtattgagcagaggtaagttcgaaaatggaatgtgcttatcatagccatagcagaagccatcaatgggtttttgaaatattttagtttcttacaatgtctaaggatgtttcttggctgaggatttgaaggatgcttattaatcattttacctgctgctttaaccagtgtagagaagaccgttaaatgaggtcttctggattttttgttgttgttgaaggttgtctcttggggggaaaatactgcgtgatagaaagttagaagcataagtgcaatgttgacgtttctttttgcagctgaagatagtacatatatttttagagctatttggggctttttatactttagtaattcacgctgagtttgggaagaatgcattatttatttttaaaaggaaaatgttatcagtgtcctaataaaccaaaagtgggttgatg

SEQ ID NO: 118230 - DNA, 2256 bp, Homo sapiens
aagaataggctgcattgtttaaaatgggcgcagattttactcataacatgtagttagtaaaaatccacagaaaaggagcttgattcactgaaggaagtgcctgtgtctttgcacataaaagcctatagtaaaaatgcattatcttacgcttatttgatactgacttttcctcatttggttctgcctttacatatttacagctttttggttgtatctttggcatcatgtggtttcatgtaaacatttccattatatgtttatatttattagttttaaacagcaaagcatacagagagagctactaaagaagcttgataggtacccgaaggtaatgaaccaccaatagttttatttccttttttaatttcaagtagttttcctttcagttgtttactgagaataggctatctttgttcagtactaacatttttttcctgatgtattttcagtttttataagaggagaacatttcaaattatttgctctttagatttttgtttttagattgagatgtttaagaagatcgtgtttacatatttgtagtttacttgataaataaggtttcctcctttagcgttgtgggaggaaagaactctccagcgaacactgaatttttataaagcagtcttttggttgtgagaaagtgtctggttattgagtcacaaatgaagctattgaatgtagatttagacatgaatgaaactgttagacatactcatgtcagagctcttcccttttgtccttcattttaaagtaccaaaggaagcaatcctagaaaatgtgaactggaggaaattctatgtactaatcactcttcattcaatgtctacatatttcttagagatattttttaaataccatgaagctgaatgtccttttgtgtttattttccccatgttttcttttcactatgaatctgcagaacttaatcatcacttttgttttgcttaacaaatgtattttgctcattttaatatttgtgtactgatctggttttcatatcaagagaaacttaaagtataagctttatttcttagtgttttacaacacaaattttcctgtaatgacttgattgcttaggaagggagtttaatctttttactttgagagtcttcatcatccagttaacatttactaataatttaatcttcattcttttatagtagactaagtaaaaatcagtatctcgttgacatggtgactgaagctcaactgtcagtgtctttactgtccaaagtataattgagaataggttataatgcttggctgaaatagatgttactcatgctcctaggagaggtactggtcagatctttataacctaaatcagtaacttgctttatttattgacatgaaatctgcaggttaggtgatcaagtttcccagcacatcacaaattataaactggcaaaagggacccagtagtctaatggagagaagaactacaaaatttaggagtaactagagaacaacagactagggctatatagtgtaagggcacatagacctgcctagcttaatatttgtagattaacttttattaaaatatagcataataggtgattttatgacaaaagccaaaattttaagtaaagattatttcttttcatatggtaggtaaatatgaatatgttttggatttctttttcataaaaatagttatttacttataaaaggcttaagttctggagtgtaaacttgaattacatacaacaattagctacattataaatgaataccttattccctgagtaccatatagacatgataacactaaacgttattttgttctaaacactagtttttgtttttagttagctcacttaaactgctaattgtaagccaccttgatttaaatgctaagcgctttttggggggatttttatatcaacttgttaaattttccagaagtttaacctgacccatttgtataatgtcagtgctaagtagtattttttattaataaaaagtcttggtttcattggcaatgtcagacttttagggtagataacaagtattctgttggcacatttaagaatggcctttgtaggagggaagagttcagatagtttatatctggattttttttttttttttaagaaagagttttgctctgtcacccaggctggagtgcagtgacgcggtcttggctcactgcaacctctgcctcccgggttcaagcgattctcctgcctcagcctcttgtgtagctgggactacaggcatgtgccaccatgcccggctatttttgtattt

SEQ ID NO: 118231 - DNA, 3449 bp, Homo sapiens
tgtatttaaaagggtaacttttgggcctgcttcaaaagtagttgacagttttttacttgggtgccaaattgggtgagttctccacccctccctctccctttaaaggaaaatgtagacaagtgaaatgaacattcatacaacaaaactagtgttcatttggggtctctgagagtggttcaacttatggggtgattgggttttagctagtggcgcatgattgcagttagaaactaattgtgttgactttttttctgtaatgattagtcttactgagtgaattgctttctttatcgatactatgttgagctcgggcagacaggcagcattggcaatgcactaagcatgttgtgatctgatgatctatctgatagaaattctcaacttcaggacaacttgggggctttttttgtttttttgtggcttttttgttttgtttttggaaggaagatgcccatttgttttactaaactattaggaaatgtttggtgtttttaggtctagctataaatgtttacctttgtttgcctgtatgaatgccaactgggagacattaccattagaattggtgttatttgtcaatgtgagatactgatgttggtctgattaggttttaggaaattaaatttttttgttgagctttaaataatgaaaggtgtttaaatatacacataacttatcttgtcattcccaagttgcattaaaaaatattttatagcttttctctgaagtatccaggtttttattactgtaaagcctggtaattcaattgaaaaaaaaattactgttcttaagttttggggcagttttgtccatttgactccaatcttcttggccatttcccagccctctccttcctgttttcttaccccctaaaaacccattatcaccatgtgattcctattctgcatcgttgacattgcagtacgtggtttttgccttaaatttaaatgatgacctagatatcactttgccttccccccctcccccacaacccccttaagaatagcttgttaatcgcatagttgtcttaaggaagtgtaagttatctagtggtgaaaacctttttaggaggtttaggtctccttttctccttgagatattaaaaataattttgtggagctgcttgctgcttaacactgttttagagaggccatggggaagaagcaaagtgttttactcaactaagattcaaatgctaaatgttgctcttgaacattttagattagtgttttgtttatgtagttgatttttagtgttttctgtattgtagtttgaaaaatgccagttgtatgagactggattctttggtcagcttgttccagtagttttctattcatggggaaaaaaaggttttggggggcttttgaggacaatttttaaagttaaatttcttatttggaaaattgttctgaatttgatatttaggagtggccactccaatcttagtgaatttgctcatctcttccagtaatcagccctgcatgcttacgaaaataaattttaaggtgactaaatgccttctacctcttccttactgaagatttttttcccccgtacaatatttttttgggggggaagggcagattgtggtaccaaagattgcagatctaaattccccatttttgattaaaaatataaaagagccaaatgtcaccattgctatccctgtttcaggcagtgacacaaaatagtggcattaaaaacctgagtaatttccagaattcaaatgttcttgagcatgtgattcttatttggaaaactgagaagctacagtgcttggtggaagaaggatggcatttggctaccctgttctttctctaatgcctcggtgttgcctgtctgcgccggccattgttgcaatgtaagcaatactgtttgatgcactgccaccctctattgtctgtttagtgtttagaatctccagtggggaagaggaaaagaagcatgactgttagtacttctcaggacccatctttctcaggattaaaccaggtctgaaactgtctcctattccaacctcaatcccaaattcatgtgcttttcttttttattgttttattttgatgatttttgttttgttttaattctggagaatgtagatcttgctcaagcacctcttacgttggcattattcagacatacttggcaaacataacattactaagatatttctttgtggcttttgcttaaaacttataaagtttagaaaaaagctaaatgaaaataggatattatgtttagctctctaacatacatatgaggaaatgatgttggtctagtactgaaattgtttacctaatagtaaacttgagatagatcgttagtttttaaaaatttatttggagttacacaacttaatgcacgaaatatatttaaattcagttcattagtgctgtataatgaatatattctacctcacctctcttccccttccctaaggaacttcaggtaagtgtagatcagatttcagatctagtgtttctagaacttatttcctcagtctgtattctcaacttctagcaaatggatatttacagagcattataggctctggaactagaagatactgcattcttaacaatataacaataacatagcttaagcacttatcaagttatatggtagattaccattagtaatacattgaaatatattaaatttagtttttggcaggctggataaacaccctactaattttctaaatttgtaagtagaactcttcatattttgttacacttttgttgaagttaaatagcttttttatcacaaaatttaagttcataaatgttcatgctcctgagcaaatgaatcttaatcattcagtttagtatacagtgaagaggaagtattggcatgaataatcaaaaaacaaaaaacatgctttgtaataccttaaattatccacatgtatcatctggataatcatttaacccttttccatactgcccagctttattccaggaaccacctccagctattaaaaaaggtttcagaaattcagagttatttttattcaggcaaagaagtaccaagtattgtgactagttagataaggggtggggggaagacagtagatggtggatcattaggcatattataagaataaaactagttttatagtgcctcatttttacttacccattcacatattttgcttacatttcgtagcatcatttaataatttacaaagaaagttgtattacattgtttagattttgtacatacaggttagctaggtttttagtaaagtgaccttgtgaatgttttagaagggcaagggaaattatgacccctggttaggaaaaaaaaaaaaatgctgcaagtactaaacactaagattagccacagtgattttgaagaaaatgtgcctctattgaatggaattatggaattatccccctactttttttggtttttggttttattttttgttttttttggggggtttt

SEQ ID NO: 118232 - DNA, 1093 bp, Homo sapiens
ctacttatagcttaatctgccaatctgtcaacatcctccactcccaagtatatgtgtatctgtttgtgtgcatatgtatatcttataacatggaattaggtctgggtaatacaaggccattttaacaggttactttagaaggcctaggattgagtgtggaaagtttttattttatttcctttattgtagcaactgaaactattatacaggtattccttttattatttgaaaatcacaaacaccaagtcttcctatggggttagaccctgccatggttttaattattaatactagaaggtaaagccaaaggacacagcaggtatatgcttagatatccattaacctagaaataaatggagaacttagttgtcctttccatttcattttctttagcgctgtctttgtgaactctaaataattgagatactgaaatacttaagaaatgtgttgattttcatttactacttaactcaattatctctcccttcttttttttccagatgatcagtagaattgaatatgtgcatacaaagaattttatacacagagacattaaaccagataacttcctaatgggtattgggcgtcactgtaataaggttagtcaaatgctctttgcatgaaagaacaaagagtaaagtttcgacaagaattgctttggtaaacttttcaatcttttaaaaagccatagtaagttgaatttgctgttgacagttgctttaaaagattgtgctatgaggataatcagctaactccattaacttagtaacttgaaataaattatcttcaacttacccaaccgaggttagttacctatatggaaatataaaattctaagggctgtataatgaactgtagttgtctaagttatttaactgttgaacagttgtatctatttttcattcacaaaaatagcaaaaacccccatattcttttcttcctgaatgcttaaaaccagattttaacctttggctctgaagtgtgggtttttataatatatgtgcttgtgccagtgtgggaacactgacttatctgtcaccatggtgttaacatttgctgactgagcatggttgataatgagaattcttcagtc

SEQ ID NO: 118233 - DNA, 1004 bp, Homo sapiens
atagagtcatcttcatttcttcagttacaaagtaaattcaggtgagattaaggaatttggtaaaggccataggaatcagtggccagtgggtataaaattcagctgccctggtaacaggagtgttaaggctactatgcatgtcctatctatataggagaatggagttgcatgacagggaaaaaaaaaagtctcattacccttgttttgtctttgggccttgtagttaattagtgggtttgtcttctgagtaggggaacattcgccttatataatacctagtcagtgaaagaaaactatattattcttagggttgatgatattaagtaatagctttttgtaatatcctctcttctccttttgtttcgttaggtggtatggtcaggaaaaagactacaatgtactagtcatggatcttctgggacctagcctcgaagacctcttcaatttctgttcaagaaggttcacaatgaaaactgtacttatgttagctgaccaggtatgtgaaattttgattagaatataaactgagactagtactgttgactggaatttcattattcataaatcagagtattaaaatcctgtgcatcactatttaaccttagcataggcagaaaaaaaataataatgtgacttgtagatattttcctatgggaataagacaaaacctggaattatcttggtttcttactcatctgtagactagtagttttcaatctgctccttcagatgaagttttagtgtcatatgtagcaggttattgtaagattttgtttggagagtttagagtgtatgtatgcatataattgttgataaatgtttattgacattttggttaaattaagcaaaattgaatattatgtattatgtgtgggactcttagaaaagctatatttttgaggataaaaaggtcctgaagtaatataaggaagaattttttgaccaagtagatgctgcttggagtaatggattctcaaccatttgtgttacttaagacctaggaa

SEQ ID NO: 118234 - DNA, 1013 bp, Homo sapiens
tgtctggcacttttcacttaacataatgtttttgagattcatctatgttgggagattttataaatttcacaaatcaggttaaatttaatgtatttgaaatcagtttcaaaaagcattaagcattgtcatttttcagtgctaaacccaagtacagtacatgtccttttatctggtagcttttatttaagacctgatacagacccataagggcaatgagtaatgtactgaataagcacatgaataaattaacttctgagcagaattatagtaataggtgcctattataaggtggtgagtgcagagagagttatggtagttataagctgtctgtgggtgaggctaaacagattaacctgactttcaagttaaggcttcctgagagatgggatttcaggatctggctctaaggaagaaagcttggtgaactggtttggtaaggcatccaagaatagagtgtggcttctgggtgtagtctctaaaggagaacacagtaattggatgagagtgtggaaagggtaaatttgctttaggagtggtagggtcaggtacatggaaacaaaagtggttcattggttttaaagtgaaatgtaaaaaaaaaactgtttccactgaagcaaaaaggataaagatttatgtaaacattctttatttgggtagcagcatcttcccatccccctcagtttgttccccactatttctgtatcacctatacatggtacatacttaataaatatttactcggaaagtattgaattaagttgactatttagtgttagctagataaaagttatgtgttatctattgttttagaagtattgtcactaatttaaaaaatttagattttgctgcctttatccttcatatacaaatttgttcaatcccttccctatgttttctgttacaaaattccctataggatttgctttttttttttttgacatggagtctcactctgttaccaggctggagtgcagtggtacagtcttggctcactgcagcctccacctcctggg

SEQ ID NO: 118235 - DNA, 1543 bp, Homo sapiens
aggcgacagcctctttccaaacagaaactgggttggaataggccggtccgggggaacggccagaagaaagatcaaaggttaaaaaccgcctcaaagagcacaggtcaatacccaactcctaaggaggccttaagctttcatctgccacgaaacatgaaggtgactcctcccaatatcaaggccggggggccactcagccttccagagacccggcgggtccgaggcgagtaacaggtaacacctgctgagccgccgccgaccggaagtggaagagagcccgggacgggggtgaggacaggccgcggcacgcctgcgcagtcagcaggagttgcagcgctcatgcgcagctgggcggtgacagggtgacgctcggagcgtgggccgcgactctcacggatccggttccgccctctcgctgccgatccttcggagcgagcgcccgagatccctttcccagagtgctctgcgccgtgaagaagcggctcccggggactgggggcattttgtgttggctggagctggagtaacaagatggcgtcgtccgcggagtgacaggggtccctctgggccggagccggcggcagtggtggcagcggtatcgccgccctagctcaccgcgccccttttccagcccgcgacgtcgccgcgcaagcgaggcagcggcggccgccgagaaacaagtggcccagcctggtaaccgccgagaagcccttcacaaactgcggcctggcaaaaagaaacctgactgagcggcggtgatcaggttcccctctgctgattctgggccccgaaccccggtaaaggcctccgtgttccgtttcctgccgccctcctccgtagccttgcctagtgtaggagccccgaggcctccgtcctcttcccagaggtgtcggggcttggccccagcctccatcttcgtctctcaggatggcgagtagcagcggctccaaggctgaattcattgtcggagggaaatataaactggtacggaagatcgggtctggctccttcggggacatctatttggcgatcaacatcaccaacggcgaggtaatcatctggggtggggttcacgataacgctgcgcttttactcattccccccaccaccaccgtgcacccccaaagtgctcgggcctctcctcatcgcacgcactcgccagggagtccagggagctagttttcctggcttacgaacctcgtccgctgtctccctaaaagggtcaagaacccgatagaaaggttgggggaactagtttcccaccttgttaaacacgtcccataaatgtcccttagtcgagctttttttttttttaaccgtcttttaaggtggaaacggcaaaatcctctttcagtgattcccatgtttttttttttttaattcttaattctactgggcctcttgttccaattagaacagtttccgatcgcctagttccttaaaaacctctcactacgttcagaggttgcctcttttttctggatgaatcattttcctgcactttagaggacgtacggatttcgtcactaccccctgaagaggc

SEQ ID NO: 118236 - DNA, 1041 bp, Homo sapiens
tcgcgggggctggtttggtacctggagtgggagcgccggtgccggcccgttttgcataacagtggaagggagggggaaggcggagattgggggagggaggtgggaggagagagagggaaactttgcttcttgttataatctgcctgtctttgggcggcagcagctgtcatgggaccgggtgggcggggagaggcttgcaagctgactccttgcggtgaaacgcgacttggaagggacgccgcagccgagacgttcagctccgggcagcgacttcgggctggcggctgggacggcgtggcgtggcagggtgtcgccgagaggaagcccgccacgcgggaggcaggccgcccctggcccgctgcagacgccgctgcgtaggggagccgcggggccgcgtggtcggtggcgggcgcgctcgggtgggttcgcggcagaggccggaggggctagtggcgtgtgattgcgcttctcgagatcgaggggaatgtgtgatgagcgggttgcgcgcgcgggtgtgtgtgtgtgtgtgtgtgtgtgtgtgtgtgcacacgccgcgcgcgccgggcgcgtacctttacctctgacgaaactgcggtggagctcccgccgtcgtcgccgggctccgtcacacgccccgcgccggtgtctgcgccgaaggcaggtcccagcctcagtacccccagagccgacagcttggggctagcgggcactgagtgcgggaggaggggcagagtcactcctgggaagattctgtccccagatctcgaaattgccctggggcgtctccgaatctcttggctgaaaagcggatgagagaggcctgaaatagccggagactcgttcagggacccatgtcaagaactgtccgctttggactgtaccccggattttaactcgatcttcagtgtttggctcagcaataattaattattttgccctttagccgcccagcgagcctagctagcagaaatatttcaactaaggaaactagaaaattgaatactcaggtgtttgcaggagcagtgcagtgaaagttaatct

SEQ ID NO: 118237 - DNA, 1024 bp, Homo sapiens
tgcaaccccctctcctcccccaaactttccctgaccctcccctccttcatctccctttgggagctttggggaaagtggattaaatggtaattcattgtctttgtcccaaaagattgttgttgtctttggtggctaatccagggttagattagagggaggacttctgtttaggagacttaacttttacccattggggccaaagtacggaaatttagcagaacaaggattgcgaaagtttcttggaaagctttgaggcatggatcccaaaggactgtgggtggcttcacctttgttcaggctatgcccctggcccagagtaccctcactcacccgtcctgcatggccttctcctctactaggctctcccagcccagcttgccctgctttctctcctttggttttctgcatctgtgtgatacaaccaagcactttgtgtgagtctggtgtccagtaagattctagcactagggttgtaccttttatcattgtgcctgcaaggcacctgtcagtatgctgagctgtgttcctttgcttagctcttggctaggcacatggattacagacaggggtgcagctgggtcctgccaagcagaagctcccaggctagcaggggagacagctgggcagcgagtgtgggagagaggaatgcagagggctgcagctgtgggcaaaattttagaccccaaaggccacacagcaagtccacactaaatatgggctatttgaagttgcttagggcatcagtcatagatgcacaaaatgtcagagttggcagcgggaatgttagaaatcatcagttctaacaacttatttaaaaatatttaattatagaattgttagaaaatactgccaagcataaagaaaaaaatgagaaatatgtaacatgacccaaagataaccacttaattgtcatgtatattccagactgtttatttcctgttcatatagatcacatcttatttttaaaaaatggagtcgccgggcacggtggctcacccctgtaatcctagcactttgggaggcc

SEQ ID NO: 118238 - DNA, 1419 bp, Homo sapiens
ttcttccatttgcccttagcccagatggcagatcagtcctcttagagtgcatatctgacatcactctcttgctcacacatctcccatggctcctcagtacatttttttttcttttaagactttatttttttagaacaatttcaggttcacagcaaaattgaaaggaaggtacagagatttgccatatacccttgcccccaacatgcatagcctcccccattattaatattccccaccagagttgtagatttgttataattgatgaacctacattgacacatcattgccaccccagagtctgtagtttacattagggttcactccgtgggtttggacaaatctgtaatgacaggtatctaccatggtaacatcacacagaatagtctcactgccctggaaatctgctctaccttttcatttcttctgtcccccaactcctgacaaccactgatctttttaccgtttgtacagttttgccttttccagaatgtcatatagttggaatcacgcagtatgtagtgttttcagattggcttttttttcacttgctgataggaatttaaggttcctccatgactttcatggcttgatagcttagctctccggtattttaaaattaaagcctaaacttaaacctgatttccgaaggccttcgggtacttttaagttggagagttaggcccttgactttgtcttgagctgtctgcttttactttgggatcctgtacctccccaggaaaaccctgaattttcctcctggaggcttagactcaggctgcccttttctgtgtcttccttctccatttccatgattcatcctgcgagcccctgctcaccagccactgttttggcgatgccctctccctcacctccaagccagctgttccatcttctgtgtggcagtacgcagggccagcagagcactgaccttggaatccccttactgggtttgagtcttggttctgcgatttgccagcttcgaggcctttggcgggtcacataacctttctgagcttctgtttcctgaagtgagaagatatgatgattaagattgttgtgaagaggccgggcacagtggcttacgcctgtaatcccagcgctttgggaggctgaggtgggtggatcacctgaggtcaggagttcgagaccagcctggccaacatgatgaaaccgcgtctctactaaaaatacaaaaattagccgggcatggtggcgcatgcctgtattcccagctacttgggaggctgaggcaggagaatcacttgaactggggaggtgaaggttgcagtgagccaggatcacactactacactccagcttgggtgacagagtgagactctgtctcaaaaaaaagattgttgtgaagagtcagtgaaaatcgaatgacaacatggatttaaagcatgtaacacatgcctg

SEQ ID NO: 118239 - DNA, 1113 bp, Homo sapiens
ggaggcacacgagaacagtgaagaacagagctctgagtcagcctgagtccagggtctgtcagttagctgctgacttagggcatggtacttattctgcctgggccttagtttcctcacctgtgaaatggggtgaagagatatagatatagatatagatatagatatagatatatctatatatatatatctcagtgggtagttgagttgagaagatgagaaggtacaatgtctgaagagcttagtgcagtgtgtctgggtgttatgatcaataataatgacaattaccagtgaccagatggtttggtgacagtttagtggaggaagccgtgcagcagtcactccttgtgcacgggaaaccagttgcagatttgagcaagccttgctccctgccctggatgaacagatctgctgatggccatggaaggtgcccagggcagagtgtcaagacaacttttgcagcagaaagggtattgaaggatgagcaggagctggccaacatgatgggaggggcctcctagccagggaccaggctgtcgtgatggctagcatatcatgtggctgatgactgagcaatgagtggctaggtgagaggcttgaggggaggctctgagctgactggaggactccccatgggggtgaggaacagacagcatgaacgaaatgtctggaagaatccaaagatggaacaccaagattctcgtccgagaaactagctggaggctgctctgcagaaggggaaaggccttggggaggtttcagaaggagagtgactttgagggtgactagttcttccctgggcctcacaggcagcatgggatgaatggtatcaccctgtggactgcaccgctcctccccaggccctaggagtgagtgggggacatgcagggatttgtgttaaggattgacacaaaggctggggtacagcttctcatatgtagtcctgactcaagtccctggctcaatacagcaggaatcggtggggccaggcaccacagaaccactaggtacagccctcaataaatttaatgatgcagatgatacttagtgccatcataatgattattactcctatttaccgttatacctgttagtgtgtcactgcgaaattcacac

SEQ ID NO: 118240 - DNA, 1039 bp, Homo sapiens
gggaggccgaggtgggtggatcacctgaagtcaggagttcaagaccagcctggctaacatggtgaaaccctgtctccactaaaaatacaaaaattagccaggcgtggtggcaggtgcctgtaatcccagctacttgggtggctgaggcaggagaatcgcttgaacccgggagacggaggttgcagtgagccaagatcgtaccattgcactccagcctgggtgacagagtgagactccatcttgatcacttgaagtcaggagtcaagatgaaaacataaacaaacaaacaaaaacattatgcatgttacaaatggcagtcatcccttgcactcacattcttgtgtttccatccccagagcaaccctctactaatttctaatgtgttcttccagaggtaaaccatacaaacatcgcatatatgtggtctaacttgctgcctcctgggtttttattttttgttttttgcacaaatggtagcaaactaagggcattgttgtgcaactttttttctacttagtatttcttaaagatcatttcgtatcaatatgtagagatctgcttcactgtttggattgatcatagtttgtttaactagttgggcatttaagtgattgctatttattttattttatttcgttgagacagagtctcgctctgttgcccaggctggagtgcagtggcgtgatctcggctcacagcaacctctgcctcccgggttcaagcgattctcctgcctcagcctcctgagtagctgtgattacaggcatgtgccaccacacccagctaattttttatatttttggtagaggcagggtttcaccatgttggccatgctggtctcaaactcctgacctcaagtgatcctcccacctcggcctcccaaaatgctgggattactaaaggcatgagccactgtgcctggcctatttatttatttatttttagttaaaaaaattttttttaacctacctcttacacagaaataggttatttctaattgactactgctgctagtttgcagtaagttttgcacacatgt

SEQ ID NO: 118241 - DNA, 1034 bp, Homo sapiens
taattaaagacttggccattagtttcatacattcccaataacggtggttcatataatcatatcttttcctgctttgttttttaactataaaatgaaaggctagttttagaattttattacaaaagaattaaatctttgttgaagaaaattaaagaactgcagatataccctttcaaaggaaataaaaaccacccataattatttaaaagtgactattatttcttttttcacatatttatttttcctttaaaaaagtcagatcatattgtctttatgactttttcatttagcattatattgaagaatctatctttattaaggccttatagatcttcattaaggtttaaagaaggttttttccatggccttaaattggttcacctcctcatttgatgacagtaggattcctcatggatgtagcttgagattctgttttgtggtttgcacttctctcttcttgagagccagttatgttttactcatgacctcaggcaagtaattgacttgtttgcctctttatttatttgtacaggaggaaaataactgcacttctcttggagtggatgggaggggtgaacaagcagaggggcctagtactggtgaaagctgtagcaacagtggccaccgtggagcaggaggggcaggagaggtactaccatttcccatttggtacccagaagccagacactgagggttaagttacctgtcttcagcagctgttgacccaagttggacttgggcagcatacaaatgagagttagcctgagccctgggctggggtgggttggttcattgcaaagatggagctcctccggctccttccctcatcctcacaaaccagaggaagtgtatttggttgaaaatgacccacatccttcaccaggcatgctgccagcagcagcatggggcagctgcaaggctgctgcttgggagttggtgaatggcctggctgccaagagccccctgggccaggggccacccacacccaccctggatattgaggctcagagaggcagtgctatttgcctaagtca

SEQ ID NO: 118242 - DNA, 1147 bp, Homo sapiens
attgaggtaaacttgacaaataaaaactgtgttatttaacgtacataatgtgatgatttgatgtatgtatatactgtgaaaagatgaccacaatcaagctaattaacatatccaacacctcacacagttatctttgtgtgtgtgtgcttgtgtgtatgtgtctgtgtgtgtggtgagaacgtttaagatctactctcttagtcaatttcaagtatacaatatagtgtttagtcacatcgctgtagtgtagatctccaggatttattcatcctgcatgactgaaactttgtactatctgacaaacacctccccatttcctctgtccttcagcccctggtcaccagcattctaccttgtgcttttcccacttctgggtatgtatccaaaggaaatgaaatcaagatctcagagagatctgcactctcacgttcattgcagcattatttacaacagccaagatatggaaacaacctaagtgtttgttgacagatgaatggataaagaaaatgtggtatgtacatataacagaatattatgcaaccttaagaaaggaagggaattctgtcatttgtgtagcatggatgaacctggaggacattatgccaagtgaaatgagccagatgcagaaagacaaatgctgcgtgatgttactcttgtagaatgtagaaaagactgtgacttattaacttgacaggcaataggtcctgctcttgtcagcctcctcatccatagcaggggagcactgtgttatcccgtggacatgtggataacagtagtgccaacctgattgtggtactgtgagggtaaaataatatatgtttaaagagcctgacagagtgcctgtcaccatgagcgctcaagtttttgctcttgggatttggatatctgcctatcctttgctgttccctcctcagggaaactgtcatcctcttctctggccagaccctggttcttcttgggttctcctggggacctgtgtgagatgatgggataagtgcaagggcagtgacaagcagggaggcaggtgggtgacttgggtcaggaatcccatgggtttttttttttttttttgagatggagtctgtctcctgggcaggagtgcaggggtgcaatctcggctcactgcaacctctgcctcctaggctta

SEQ ID NO: 118243 - DNA, 1068 bp, Homo sapiens
agcaaagaaggtacttgtcctgggtccccctttcagctctgacctgaattccctttggggagaggccatggtgacatgggcatcagagccccagcggaaagtccaggggtggcaccttgcagcagccatgaggcagagagcctgtggagtcccctgttcccccctagtgaggggacaccgtcgtagagaagtttacagaatgggtgtcggggcctgagttaaagttagtgttgctgctactgactgtgtgcactgggctccggtttcctcacctgcacagcagggctaaaaatctggcatagccctgggtgctgtgaggttgccatgagatgctacaggtaaggcatatagcatttagcagtgagccgggcatatagcagcggatcagtagaggtctgcggcgctggtaatccttctggcttctggtcccacgatgaccggcctgaccacaataatcacatccgagcattagcggggattgggatgatctctaggactcccagctttgacattcattcatttgttcattcattcatctagcatgcaggccacacctcttaggagtttgtctctatttagggtgccagggctttagggacctgtaatgactaggtccctgccccatgtgtgacctggcagctgggcaggcctgaacctcaccccctctccctcctgcctctggccctatactgacttgcagaactccatttgtagctggatcctcaggccttctcagaagatgacagattctccaggatccactcatgggagtcatggagaccaggctgctgctttgggagttgagagcattttgtctagtggttgggttctatccctactcgcgcttcccaggatctagatgggctcatctgggactcagtggagcagcatgtccccacagccagagagccgggcgagctgcagccacagcaggcaggggaaactggttccacaattccacctagaattgcttcccccttctccctttggtgggctgtgttcattggcagctgagggttgtgtaggggtggagtagggcagctccctactgtggaggcctcctgccag

SEQ ID NO: 118244 - DNA, 1053 bp, Homo sapiens
gctcagtaacaaatacaatgggcactttgcgtctgggggaggggctgcctcttctgccctcaaggccaagttttgaaacccccatcttcacaaagtgttgctggaccacttcaggcaccactgcaacatccatgccttcaggaggtttttattgaacatctactgtatagcacacactaaggatacaacagtgaaaagaccagcaggccactgcatccctggagctctctagagagagagaaacaaggagacaaatcagataaaaagcaacatgctctgggaagtccagggagggaggaaataatgggagtcagctggagggggcaacagggaagcctgttccaggagtgacttttgagactacctggcaaaaaagagaatttgaaaaggtctggaggggttccaagaggaggccacaggtgtgctggggaggaagatgtgagaggcctccggaggtggcaaggttagggcatgcctgtgccttcccacgacactgtgtgctggggttgcccaggatgtatccgggatgcagggagaggcttagtgctccatgattgagaaaggagtagatggagccccttcccagccccttcccctggccttggtctgcacaagatctctcctgtttgctggtgtcattttcatttcctaataccctctggctggcagcaagtgattgactgtgtcctcagcccaagatgctgaaaggaggtctgagtgaaagggctttccacctaggggagtgtaaggagagaaagctgggatgaattcctaggcccacaggtacaaagcctgtttctgctgcagggtctgggagctgggagacagacgggagcagagccgtgtgtgattggagcatcgaaaacccacacacccagagcacaggctccagcgcaggatgagcagccagagccccgtgtgaccacctggccccaggcctggccggttcagattctcatccttactggtcaccagctctcagtgtgtgacccacgttggctctcctgaccttgaattgggtgcaggatttcaaatcaagccttaactaatgtt

SEQ ID NO: 118245 - DNA, 1513 bp, Homo sapiens
tatatgatctgcaagctcaaaaaaaagtttcctccaggaagtagagtgaaggatgaataggagataagtaggcaaagcctttatgtgtgggaagcgtgttccgggagagggaacagcatgcgcagaggctatgtcaggggacagatcctgtcaagtgccaggggtggaaagaagccagcaggactcagagtggcagtagggagtgggtgctggtgtgaaatgatgtgggacagggaggcaggagacacaccgtgcaggaccttacaggccacagaaagagtttcagtctttacctgggaggaatcagagggagccagtggggtcaggtctgtgtcttgagaagatagctgtggctgctctgtgtctagccgcctggtgggggctggagtagaggcaggaggctatggctgccattgacgtgtgagttggtggtgtgaactgggtctgtctcagagcatgaagggttaactcagtgactgggtgtgaggaagctacaggaaggcccagcaacccagagaggctgcagctgtagttgcttaaggactcttgtgtagtaatctcactgatggccattgtcttttgagtatctactttgcactagacactatgtgaagcccttctcgttaatcctcataagaaccctaagcaggtgggtgtaccctattttactgagacccggagaagttaaatcatttggccaagattacacagctcagcaccgccccgtccctgacccccgagctcctctggttgacggtcctctggataagtgttctccagttcactttgacccttctcaggacttggcccaaggccccagcttctgtctggttgctccagtgaccctcagtgtagtgtctgccctgacctcaggaaccagttcagagctggtctggaagagcattgtcctacacggtctgaaaggacacagccatgtggccctcgctcctccgtccctcctggcttgctggcttctggcagcactcaatttgcgacgtgagctgaaccggttgtgtctctgggctttgcatgttgcctgcctcccgggattcagatggtctctgctgcttgtttttatttttcttcttgacttcctctcctctcctcctttccctctgctcccaccctgtccccatctgttgtggccccatgggggtcttttcctcccctcccagatgtgcaggcaggatttgggatggaggcagaagcctccttccttctggcttctcgagaaggaaggaagctaacagtttggacagctgttacctgccgggctctgggctaggcttttggcatacgtgatcacacagagccctcatgacacttctgtgaggcatacacagctttatctctacagatggggcagctggggctgggaggactcaggtgttgcatccatggtcacatgataaggatctgactcgatttaaaatttttggcttcccaaacttaaatgtgcctatgaatcacctgagtattttgttaaaatgcagattctgattcaggaggtctg

SEQ ID NO: 118246 - DNA, 1378 bp, Homo sapiens
cagggccaacagaacatcaccaagccattctgtttctgtgtcagccccccaactcaggctatttctgaatctgtagggcagttcttctattggtaaccattaaactggggagaccagggtgagaaattgattggcttctgattcagtagctctgggtttaggcctgagaatttatattatttccaacataccaggtttccaggtgattctggtgctgcccgtctgggactacactttgagaaccactgattcaggcaatgctgttatcagagtcacctgtggctcccttctcccctactcactgctgttaggtgggtttatgaccgtctagatcttttcctgtgtgtttgcatacatgctatcctacatagagaaatatatggcttgatttttactttctttacacatgtggggttatattttacatgctggtattctacaacttttttatttaatgtgtcttggagaacacacagatcttcctcattcttttcaacagcactgtagtatttcatgatatgggtgtttgtttgtttgtttgtttttgtttttttttgtttgtttttcgtttttttgagacagtttccatctgtcacccaggctggagtgcagtggctcgatctcagctcactgcaacgtccgcctcccgggctcaagtgattctcatgcctcagtctcccaagttactgagattacaggcatgcgccaccacccctggctaatttgtgtatttttagtaaagacgggctttcgccatgttggccaggctggtcttgaacccctgacctcgaatgatccgcccaccttggcctctcaaattgttgggattacaggcatgagccaccatgcccggcccgtgatacgggtgttttatggctttatttacatattgtctattgattggtgttccatcatatatcatatatgtaattttatgttcatcatatatgttccatcgtatattacatcatatatgtaattttagacattacatatattcctataaaattcctgggaacatgaatgggtgtttctccagaacctagcagtcacacaatactgtcagtcattattattgctgttttttgtttcattattaatatagaggcattgttagctttaagaagtccacttataagtggggacatatgtgtaaaggattagctcctctatttacagtctttaataaagttttcaacaaaacagttctggtaacaggaggacagagatgtatgtgggcagggccttgagggatatgtaggagtgcagaggggagagcagcagggggttttgtactgctggggcctagcttagctaccagaagattcaaccaaggggtgaagctgatctttccatttcttggtcatttggcaaaatc

SEQ ID NO: 118247 - DNA, 1116 bp, Homo sapiens
ggggaatcttatttttctgtgtcttcttttcagactctcccaggtgcctcatgctggccttgtcacaaaggtagatttttagaaattattggtgtattgttccatgagattttgtcttgttggatgtgtgtgttggtggtgatgggggattcatcagcgcccacccctggccccggccccacaccctgtgccctgattgtcatctgggaccctcaggagctgggctcctttagaagggagttggtgtttagaaactgacttttgcaggccagaggaaaggcctcaggccatttcataacctgtcctcttgggggccctgaaaagagttcttttctgacagtgccctgtggctttcagcaagtccgttcctccttctgggcctcggttgctccctctataaaataaggaggctgacaacacttgtcctctatttaccctccagtgaaccttgcctgtgtctcctaaaagagctgtgcagcttgaattcctctaacagccgggatggggtttcccccagagcgaatgcatctcaggctccatttccatgggcagtggaaccagggcctgtcacagcactccctgcgaccctttcatgggcggggaggtggatgcctgctgctgacttgcttctttcctttctgtcctccctgcctccaccagcgacccaacttttggcaagaagagctttgagcagaccttgacagtggagctctgtggcacagcaggtgagccagggggcttccactggcaggtgccttcaggaaaacacccgtgcatctctgagtttttcatcatgcatgggcaaggtgccacgcaatgaacgatgcgcaagatgcctgccttcacggggcttatgttataggcagtcaaaaagcaaacagaaaaggaagatcattacaaattgcaataggtaccataaagaagactcactgggaatgaaccagcattacaggcgtgagccaccgcacccagcccaggtgggcagttttatctgcggtgcctgccccctctccgtcatgggaaacaccagaggcatatgagaggtatagttgggagggtttgttgaacgattggacgtagatcaggaagaggtatttggatgactgggaggttcca

SEQ ID NO: 118248 - DNA, 1052 bp, Homo sapiens
aaaaaacacacaggatctttaaaaaagagtcttggacgtactaccaatattagacattaaagaggaagaagggtccgggcatggtggctcacgcctgtaatcccaacactttgggacagattacttgaggctaggagtttgagaccaacccggccaacatggtgaaaccccgtctctactaaaaatacaaaaaattacccgggcgtggtggcacatgcctgtaatctcagctactcaggaggctgaggcataagaatcgcttgaacccggaaggcagaggctacagtgagctgggattgcgaccactgcattccagcctgggtgacagagcgagactctgtctcaaaaaacaaataaatagataaagaggcagaagggttcaaacttggccctggttcagagaggtgtcaggaaacatgattcacgtaaatgtttattaggcacccactatttgtaatcctgtcctaatagttggtgaatgccactttgtctctgccttgaggagtttacatagcagatgatatgtcagtcgggactctttctgttgttcatggaagtgaaaagttggaatagaattgacttttggtccttctcgggcagacttttctcctggttgcagagtggctgcctgtagctttaagctaccccccagcagcttagagacccctgagaaggtaggagtcactacatgactccagcaaagacctgagatggattctttggggttcagccttaagtaaacaggcttatccttgaacaaaccatggtgtccaggaagggccattgtcacgtggcttgccctggcaccctgagcctggttgaccacacatgctgttgtcagaggaaggggagtggaagctgaacaggcaggcatcatagatgtctaccatgaagggcaagatgcgtgcagaagaccagccctactaggggaggtgaaggccaagatggcagccaaggaattggtgactgaggctggctttgaaggaggcagaaagtggtacagtagtataggcaggggaatggcatggcaatggcaaatccagggaaatggg

SEQ ID NO: 118249 - DNA, 2068 bp, Homo sapiens
ggtggccgctaggctggtctgcaggaaagcgcggcctgccgtttccgggccgtatctgccaagccctgccttgtctcttactgagcaagtttggctcaaattataggagcccccatcttgtgcccagctcatgctccaagtgtgtgtctatccatttgtactcagactcttgagtaccttgtaaggaaggcggggcaagctgcatcattcctgttttccaggggaggctggcagctcctcaagaggcgaaatgactgtgggaggtccggttaccagtgaggaggcagagcggtgacccagaccaggccttctggttcttggtcccgtgcttccgtagtagctggggtaaagacaccgtttcagggactggtagaggtgagttcggctaaattgggcaccgggctagaagcctaagggctcattttaggggttacattaggtgttgattcaccagcatcaggtgaattcaagccctggcatgtgtcttggatgcaccatcagctttgatcctgagtggtcctgcggtttgtctgtgcctgtggacacactgtcagaacttcagtgacacccctggcagcggtacagacaggtggtctgggagcagtcatcttttttgggccagccaccagcccatcctactccctcaggtagtccttcgtctttaccttgtccttgtctgtaaagttgttttggtggctggggcaggggagccaggaggagggagtgaaggttgggaatagataggacaatctcctagctctcctccaattgagaaaacactccaattgggctttgctttaaactttgtgttcttaagtgatgtcaaagccatttccagcttaatgttctgtgggtaccttgggggccattcatgcagggagcatggccaggcagggtatgagtacattgtttctgatttctttcatacatcagggttcctcgggaaatttttgtattttttttttaagtcctgctgctttaaaaatttgaaagtggctcattaaactaaacaggctaatgtaatttgttgcttatgccaagcctagactgttgagaattgacgtttttaaagattatcaaatacctcagtaggtaaaatgagcccatgatcttccactgagtggtgagcatactcccagcccatggacaaggccggaagagacaggctttagtaggggtagggaatttgaactgttgtgtgtcacagcagttgacctctctggactccaatttcctttcctgtgaaatgaactgattagacatgtttcaacattgttagcttctgctgaggcagtgtctagcccaagatggcaaatacatagctcatgtgccactactcccacctccttgaccaatacagacataactaatcaatcacaccactcaggttccctgagcctggatgtgctataagaatcctgaaatcagtgctctggtaagtcattactaattgattagagttcaatctatttgacatcttgggctaatctttggaaggtttccaacaatcacacaaaaccatatgctggctgggtttcatgctggcctatccctgtctgtgatgttccgttccatgagagaaaactcccctaatgctattccatggcgtaacactcccaatactattttgacgcccacgtccccttgcagagggtgcagggggcggtagacgaatgacagacaggaacatatttggggaaggcagggcttaggaagatggaccaaaaagggacttcccacagcacagacctgatcattcggatttcctctttagctattcactgcctagcacatagtaggcacacaataaatgattatggaatgggataaaatttagatctttctgctgcctccactaagttaagtcctgatttacatcaaggagagaactgagataggaaagaacactagattccaagtctggagagttgggggagtccagattctaccaagaatttcctttgtaactttggtaagtcccttttactccctggcaccccggtgtgctgaaaggagttggtccatatatgatctcttagcccctcctatttgcttcttccttgattgc

SEQ ID NO: 118250 - DNA, 1112 bp, Homo sapiens
gtgtgtggaattacattgatgcatttattgagaaaggtgcaagaatttcacctacacagagggacacatctgctttgttatttataatagaaagctaaattttaattttttaaaggacactgctaatgattgagaatcaagtttttagttttgctattttttttaattggtagaggatttttatatattttttccattttgttgggttgtgtccttatttatataaatactttatccgtaagaggcaaggaggaaaccttctttgcttttacatattgtggttgtcatcgtccctattttatttctggtgtgatttctctgtcttaccttctaaatgagaaaatgttttcttgtatttgtacattgtcagattctatagtttcctagataatttaaccaaattgctctatgtattattattctgtgagtataaagttctattttaatgtctgtaaatacttcagaactggcttcttttctcaaactcccactgtggggttattgtttacatcacagaaactgtagaatctctatgctcatgtactgtaaatagtgaagtgatctgcttataaataaacttaacaaatacactatggagattaaaaacaaaataccacccacagctttgcccatgtgtgtttttccttgttggtcctgggagctcattgagggacactctgaccactaaatggggaagagatttcagttttcagcgtcaccttctcagataagaccccggatgatgtctgctcctcacctcaccacacttctccctccttcagagcacttttcacagttcataatatccattcgtgccaggcacaggggctgaggtgggggatcacttgagcccaggagttcaaggccagcctgggcaacatagtgagacccccatctctgaaaaagtaaagtaaataaaatataataaataaataaaataaccattcagactcatctcacataacagctgttccatgaacgactttttgccctgacttttataaagctataccactttctgaacaaagacttccttgttttggtatatcaactttcacataagcacattgaataaatgcactgtaggaggtattttggcattgtggttccag

SEQ ID NO: 118251 - DNA, 1085 bp, Homo sapiens
tcgaacctagatatctggaatagggatcgaggagataggagccaccaccacctcggacagatggggaaactgaggccggcacaggcgagacggcttggttatcttggttattaaaaatcacacacccgattaagtacaaaatcaggacctgttctttcggactcacacactaagttggtattatttcactggatggatggaaacactgagaagacagagagggcccagagccttgcctaaaaatacacagcaagtcttttgcagagctaggacttgtacccagctctccaaactcatagactatcagcctgggctccttccttgcacagattggggatcacagtgagttagaaacattcagaacttaaattgccttccggcgcccattctagttaacctgtcttttctccttgtccccaacagttctttatgtgaaatctacaactaatgtgatatgcaatactagattaagcagaactttttgtttttgaaaattgaatcaataagaaatggagggccaaagctgtgggaaaggaatggaccctttaaaatcaggaatctcaaggcaggatatagcaagggacagagactaatagctgtcgtttattgagtaaatgctatgtgccaggcactgtggtaggtagttgtgttagccttacaaaccagcaagttaggtaatgttaccccattttacaggtcagaaattgatgctgagtacagtgaagttttacaaaaccattgccatatgactgctgagcagtatagctgggatctgaacagagatctgtttgacttccagaacacatccagtgattctccaagtgtggtcctaagctcactcgttcagcatcatctagcgtgtggagtcctggatctcatccttggatttgcagggatggtcctaagaagctaacggctctctgtatttgacaattattgtactgtaatgtgctgcctcctaggggaagatctagaggtgaacatactctgggctaggggtaatttttgagggaaaaaaatcacttttttttaatttctgatttgactttttttttttttgagaccaggtcttactctgtcatccg

SEQ ID NO: 118252 - DNA, 1704 bp, Homo sapiens
aagttatatttctggggtcagatgtggtggctcacacctgtaatcctagcactttgggaggccagggtgggaggatcacttgaggccaagagtttgggaaccagcctggggagcttagtagcaagaccttgtctctacaaaaaaaattaaaaaatgagccaggcttggtcgtgcacacctgtaatcctcactactcaggaggctgaggtgggagaatcacttgagcccaggagttcgaggccatggtgagccataattgcatgtcactgcacttcagcctgggcaacagggcaagaccctatttctataaaagatatatatttctttgatacaaagataccactccatcatgttctggcctccatgatttccaataagaagtctgctataattcttatttttgtttctgtataagtaatatatgttttttctttgtcttcaggattttctctttatcttttgttttcagcagcttgaatatcatatgtgtaggtgagggtttttgttttctttttgtttttatatttactcttcttggaattctctaagattcttggagatagattatatattatatatatatgtattttttttttgagacagagttttgctttgtcaccatgctggagtgcagtggcgcgatcttggctcactgcagcctccgcctcccaggttcaagcaattctcctgcctcagcctcctgagtagctgggactacaggagcgcaccaccatgcccagctaatttttgtatttttttagaagagacggggtttcaccatgttggccaggatggtcttgatctcttgaccttgtgatctgcctgccttggcctccggaagtgttggaattacaggtgtgagccactgcacccggccttttttttttttttttttttgagaaggagttttcctcttgctgtccagacaggagtgcaatggcgtgatctcggctcactgcaacctccagttcctgggttccagcgattctcctgcctcggcctcgcgagtagctgggattacaggcgtgtgccaccatgcctgactaattttatatttttagtagagaccctgtttcaccatgttggtcatgctggtcttgaactcctggcctcaggttacttggatctatattttgatgtctcttattaattttggaaatttcttggccattatatcttgaaatatttcttctgcccattctctctcttcttttggtattctaattatgcatatgtttgatactttgatgtgtcccgcagctcttggatgttatgttacattgttgatattgggggttttttgttttgtttcgttatttaaacttttctgcgttttagtttagctaatttctgtttatctgtctttttgagttcatcgattctttctttggctttcaggtctagtaatgatcctatcgaaggcattcatcatctctgttactgtgtttttcacttttagcattccttatttgattttttcttacagtttccatttctttgttttactttctatgtgaatttttatctatattcttcccagatagcagccatactgggcaagatttggattcccttagttttttcttatgtctcttttgcatatcttaggtttggaaaaaccttttcacccagaaatcaccaagagctctccaaaataggacgttggtgcactcaagctagctctagaaagcaggaaatgacagg

SEQ ID NO: 118253 - DNA, 1594 bp, Homo sapiens
ccgctggtagcatatgtatggaaaggagacaggctgcccttacatcttttcaggaggaaaaactgccagggggagccaggcatatatggagaagaatccttaatggtttatactcttgggaagtcctgtacccagccagttatttgctttgacttggctgtttaaggtctggttctggtctttttttttccccctaaccaagacaaatgaggctcaattaaggaaaagggacataagatacctattccaaaactgaattccttttaactctcatgaaatgacaaatagaattgttagtatatgtgagcactgagaattactttattgatgaacactggtattttctctggtgtaggaagctgaaccatctatctccagaaatgtcttcagaaagtaaagagcaacataacgtttcacccagagactcagctgaaggaaatgacagttatccatctgggatccatctggaacttcaaagggaatcaagtactgacttcaagcaatttgagaccaatgatcaatgcagaccttatcataggatccttattgagcgtcaagagaaatcagatacaaacttcaaggagtttgttattaaaaagctgcagaagaattgccagtgcagtccagccaaagccaaaaatatgattttaggtttccttcctgttttgcagtggctcccaaaatacgacctaaagaaaaacattttaggggatgtgatgtcaggcttgattgtgggcatattattggtgccccagtccattgcttattccctgctggctggccaagaacctgtctatggtctgtacacatctttttttgccagcatcatttattttctcttgggtacctcccgtcacatctctgtgggcatttttggagtactgtgccttatgattggtgagacagttgaccgagaactacagaaagctggctatgacaatgcccatagtgctccttccttaggaatggtttcaaatgggagcacattattaaatcatacatcagacaggatatgtgacaaaagttgctatgcaattatggttggcagcactgtaacctttatagctggagtttatcaggtaagcagcaatgaaacaattggttatttctagaaaagtaatctagtacatgaaatctcatatctctaagggatctgaggaatcacaataattaaaggtatcatttattgagagttcaggatatatgaagggtagaggcaaaattcaaaccctaacctgactccacaggtaatataaggctggttcactggacctccaccacccagtacaactccttaattttacatgtcagaaaatcttggctttgcttgagattatttgtggctggttattggcagagtcagcattagcagttaggcaagtgggtaacagaatggagttgagagtgcaggagtttctcactttttttttttttctggagacagggtctcactctgtcacgctggagtgcagtggcactatcttagttcactgcaacgtccgcctccctggctcaagcagtcctcctacctcaacctcctgagtagctaggactacaggcacatgctaccacacctggctaattttattttatt

SEQ ID NO: 118254 - DNA, 3312 bp, Homo sapiens
cacttgctcttagccaagaggctgagaagccgtaagacttcacttttacagtagtgatttgtaatttaaggaaaatacttggtttcttaactagaataattttttccaatttgaagttttcttgtggatccttgagaatgtttttcttttaaaagaggtctgttctttgtgatgggaagaatgaaaaaaaaaagaggtatgaaccttattcaagtttaagaaacgtatgaaaagaaagaaatccaaagttcctgtctcacctgggttaataagtaacagtgtgaccttgggcaagttgcttagccctttaaacataattttcatctttgtaaaatgagaagattgatatatgattgtgtttattctagctctgacattctgtgatgctctgatgatatgtctccatgcaagaaatgtcaggataatataaaatttagaagttcttttccatttatatttaacacttctatatccttccttccaggtagcgatgggcttctttcaagtgggttttgtttctgtctacctctcagatgccttgctgagtggatttgtcactggtgcctccttcactattcttacatctcaggccaagtatcttcttgggctcaaccttcctcggactaatggtgtgggctcactcatcactacctggatacatgtcttcagaaacatccataagaccaatctctgtgatcttatcaccagccttttgtgccttttggttcttttgccaaccaaagaactcaatgaacacttcaaatccaagcttaaggcaccgattcctattgaacttgttgttgttgtagcagccacattagcctctcattttggaaaactacatgaaaattataattctagtattgctggacatattcccactgggtttatgccacccaaagtaccagaatggaacctaattcctagtgtggctgtagatgcaatagctatttccatcattggttttgctatcactgtatcactttctgagatgtttgccaagaaacatggttacacagtcaaagcaaaccaggaaatgtatgccattggcttttgtaatatcatcccttccttcttccactgttttactactagtgcagctcttgcaaagacattggttaaagaatcaacaggctgccatactcagctttctggtgtggtaacagccctggttcttttgttggtcctcctagtaatagctcctttgttctattcccttcaaaaaagtgtccttggtgtgatcacaattgtaaatctacggggagcccttcgtaaatttagggatcttcccaaaatgtggagtattagtagaatggatacagttatctggtttgttactatgctgtcctctgcactgctaagtactgaaataggcctacttgttggggtttgtttttctatattttgtgtcatcctccgcactcagaagccaaagagttcactgcttggcttggtggaagagtctgaggtctttgaatctgtgtctgcttacaagaaccttcagattaagccaggcatcaagattttccgctttgtagcccctctctactacataaacaaagaatgctttaaatctgctttatacaaacaaactgtcaacccaatcttaataaaggtggcttggaagaaggcagcaaagagaaagatcaaagaaaaagtagtgactcttggtggaatccaggatgaaatgtcagtgcaactttcccatgatcccttggagctgcatactatagtgattgactgcagtgcaattcaatttttagatacagcagggatccacacactgaaagaagttcgcagagattatgaagccattggaatccaggttctgctggctcagtgcaatcccactgtgagggattccctaaccaacggagaatattgcaaaaaggaagaagaaaaccttctcttctatagtgtgtatgaagcgatggcttttgcagaagtatctaaaaatcagaaaggagtatgtgttcccaatggtctgagtcttagtagtgattaattgagaaggtagatagaagaatgtctagccaataggttaaaatttcaagtgtccaacatttcccagttccacagtgggaaattttgcacacttgaaattttaaccaagtggctagatattattcctcctttgaagctaatggcatttgtatatacacactgcagcagagcttgtagctggacagagtcaaaaagaagaaaatacggtttcaggctttcttgcagatatgaagtattcttggaatgcaataagtatgtattgaactgtactgtaaagtagctccaaaacttaattactctcctgttttaggggttatacatttggactgtgcattctccaagagatgaagcggtgaagttgggatttacattggaagtgctgtagacttctttatgtggctcagtggagagagggaaagaatgttgcacctgctctagtaccataggtcaagaggcttctggatcacaaagtcataactagacaggtttgttcttgtagttttctatccccagtctttgctccccagatggcagtagtttttagtaggaaagtgccattcctgtccttaaggcacagtctcatcagaagtctaatacctgggcaggtttataacatcctgagagccagcctgacattagacagaataccctttgtaatacattggaaatttttactcatgcctttttgtttaggataaataggtaagcacaaagagctcttcaaaatcagaaaaaacaataggagtccttccttgtcttttctgtgatctctgtccttgtttctgagactttctctaccattaagctctattttagctttcagttattctagtttgtttcccatggaatctgtcctaaactggtgtttttgtcagtgacagtcttgccagtcagcaatttctaacagcattttaaatgagtttgatgtacagtaaatattgatgacaatgacagcttttaactcttcaagtcacctaaagctattatgcaggaggatttagaagtcacattcataaaacccaagtgctatgggtgtattattcatgatagctggcccacaggtcatgaattgaggaggaatttgctttcaaaaagcaagaatgtccaacactgaaagtttatagttttatatttggaccttgaaaggtaagaaaaaaccaggttctccaaagttaggaatagggaactaatttatgaaacagccatcttaaaaaaaaaaaaagtaaactgcaaaagtacaaaatcatttttcaatctgttcccagtttctaaacaattttaaatatttatgagaagcaaaccctatgt

SEQ ID NO: 118255 - DNA, 1003 bp, Homo sapiens
ccacttaaatgaccataagtggtcatttaagaacatgttagggttagccctgatctgaatataaaagtgagaaaagggctacagtgcatttcttggtaacttaaactgagtcttgaagttataatgatccattcgagttctgtgatccttattgttcttaattgtgtttctctacgtattgttacagatgagccatacgtttctttgtatcaatgtagacatgacttcagatacctctgaggacctacccagcagtctaggaccctgggccaagtgctgggactatggtactaaatccagtagatgggctgtgtagcaactctcccagggaacacactagggtacttagggaggtgctttgtggagcatgttgaagctttgagatctgagcaggaggcagtgatgtccctggtctattcagggaaagatttcagtgtgaaatggtaaacatccaattgacaggatttagattttgcttagtttttctgctttttaatgtttctatcccccatctcagtgttttctttatccatcccagtgatgccttatttgaaactgggcttaaactgcaaaaagaatgaagttggatttaggaagctgttagatcattgagtggtgttgagagtgaagtttcactagcagggaagtttccttgagcctaaaataaaaagaaaaaattaaaaagaatcagtttttttaattaaaaaaatagaaagctgttaggctcctaattcgtggggtttttttttgtaaaaacagtttagataatcctgaatgcaatcattaacttggttgctaattacaagaatgaaaattataatggaaaaggacaaaataatataccagctggtttgttattatagtccgtgtattaaaatactattgaaatacgttaaaggtaaatttttaaggtttaaaaaaaatttagtaacttacagggatggagaatttagatgtcagaggtggggagatttatttttataaggtaatttttatcctgata

SEQ ID NO: 118256 - DNA, 1092 bp, Homo sapiens
ctgatgggacagagaaagtgtctcgcatatttcaggtattgaccttaactctgttttacagatgaaataacggagacttagggtaagtagattgcttaaggtcagaggtccccgtgctggtgcgactggtgtagtctgtactagaacccggattttctgtcctctagagcccttcgtttttaaccttaaattgtcctgcctttttttgcattgctatactgctgcctcgagtctgataacaaacttgtactcaggcttagaacagggtaataaaacaaacaaaaccgtagggtgttgtcttcctgccctcagcccaaggtggctgtaatgagtgtttcctaacccgttttgcgcagggtgcttagtaccctatatgccattcattacagatgctctcctgcagttactgcccttctccacaaggctttcagccgcccagaagtcaattcagggcaaaaaagcgcagtccccacgtagccttgatttgaactactgcttcccttatcctttactggcctattgcttacccagccaagttgtagactgtgttctcttcctgggttgcactatggcagttagaatgtaggtttttgttttgtttttctttgttagtttagtttttgtttttaataggaagaggaatcatttagagatgacagagaactaggaagaacctaaggaataatgtgtgctttacctggggtatatcctgaaaattataggtgaaatacagtgtgtctgcaatttctaggagaggttttttgttgttgtagttgtttgtttttttaagctttcgcaacattgtcaaaagaattcttgcctccaaaagactaggagccactgggttcatccttttctcacagtagaaacagttgaaatttaggatgtggaatagacttctctgagatcataaggttagagtttaggtctcttgactccacatgcagtgctcattataccttatttgtggagtgaggtctaaatgagaggtgtgtgggctttgtactgcacgtatcagtcccatatttaccaccacaactgcctcttcccagaattctaaatttcctcctgacagattttcaggggcaacta

SEQ ID NO: 118257 - DNA, 1044 bp, Homo sapiens
tcacacacacacacacacacacacacacacacacacacacacacaaatcagcaatctttttgtgcatgataaaatcctacgtaatcctggagtgatttgatttttaaaactacacactaatgtagatcattatcaagactttaaaaaaatttaaatcatctgcaatgattcttccttatttacatgcttatttctatctaccactatctctaccactgccaccaagaacatgagtaggttagttctgataatagctgagtgaccattttaacttttgagtcttggtttcctcatctgtaaaatggcagtagtctcttctcataatgtttaaaataggtaatgtaaatcacctagctgaattcttgataatactgacataataaatattaccctttagtagattaaacattcattgactatataataaggaaaagtggcatttattgagtacctggaatgtagtaagactgagtgaagctttatgtgctgtgtttgacctctcccagactgcctggtgtgatgggaagaccctcaatgcccacataccttgggagcctgtcagagccctgtggcaggctgtcctccttagcagcccttcaggtctcttgccaagtgcaggctccagtgatatgccttctagtctataaaatgagtatcattcaggccttccaggtttctttgtgcttggatttgttaagtccaggccatgctgtgtgtatttgccaccatttagtcttgttctcctaacatggctgcttcaaagggtggcttgagaatgccatttccccattacctctccaataaaggctccataaaagattcagtccatctgcttttatgtttcatctgagtgctgcttttaacttttcatttctgagtgcttcctttatgccttaagtagtctcatcgacttcttgcttttgatttattgaagaatccttttgtagttgactttagtgttcattttaaaagatacttctgaaatttttttttgttctgtttaattttaggtctcatttaactgttcactttgaacttttctgt

SEQ ID NO: 118258 - DNA, 1461 bp, Homo sapiens
tcccttgttttacagatggggcagctgaggcctcaggaggggaaaggatttgctcaaggctatgccagacctcaggttctagctcacagtttcatatggcaagaccagtgctctttccagagttcagtccatgctgtttcctgtgtgactgagtgaataagctacattggctaaagtgtgattcaaatgaagatgacactgctgttgacaggggctgaccttatctgaattaggtcaagagagtagagtttttccagtcccttttgcaggaaaaaaaaagaacttacacatatatatatatctttctctctccatgtggtcttagtccatttatctctgcttgtctcccccttcctggcttcctcatcctcagaactctaagctctctgcactgactgctgtggttccggacatcccaggtttccgcaagatcctcccacgctcagattatatcatcatccccaagagcagcctgcaggaggaccggagctgccctcagctagagctatgtgtggctcagaaccagatgtccccgaaaggacctcctcttgtgtccaacactgccccggagacagtgcccagccatgcaggcatggcagagcagtgcctggctgtggaggccctggctgaggaggtgggagcccttacccagtcaggtgctgtacaggagattgccacctcagagatcctcagccaggatgtgctcctagaggacgcttccctagaagtaggggagagccaccaaccttaccagacaagcctggtaattgaagagaccttggtgaatggctcaccagacctccccactggaagcctggctgtgccccacccccaggttggggagagtgtatcagtggtaacagtcatgagggtaagtggctttggtactgaagtctttggctttgtctggagttacttaaagggcagctagcaccatacagtgtgattccagagcagtggtaatcaagagtactggtgtggcacttactgatactgcagttctcttgaatgtgtcttgcccctgggctcactccagagttccttgaaatttctcaggcactcttaccaactctttgcccagcttagccagaattttcttcacatgagatggttcataagctacattagcaagaaagctgcaaattgtatttgaattatccacgagtcaaagctaggatctgtcaggcaatttagtatcagtcaggattttatgttttctgaagactgcttccttttcttgaaatgggatttcactctgttgcccaagctggtcttgcattcctgggcttaagcagtcctcctgcctcagcctcccaagtagccaggattataggcttgtccatcacactggctccctgaagactatttcagcaaacaatggcaccttgagctgtgtacaagaattttcacacaagacctgtacccaggtcttcctggattcagatggggtaggaagaaaaa

SEQ ID NO: 118259 - DNA, 1050 bp, Homo sapiens
tcttgtcacccaggctggagtgcagtggcacaatctcggctcactgcaacctccacctcccgggttcaagagattctcctgcctcagcctccaagtagctgggattacaagcatgcgccaccacgcctggctaatttttgtatttttttttttttagtagacatagggtttcaccacgttggccaggctggtcttgaactcctgacctcaggtgatccgcccgcctcggcctcccaaagtgctgggattacaggcgtgagccgccgtgcccggccgccactagcctgtttaaagcaggtaaatagggtgctgagaacacttgaaagggttagaattggattctctcactaactgcttatgtgatcttagaagtcctaaatgtcttagaacctcagttttctcatctataaaataaacatagcacacttcctgtggaaatagttttctctttgttcttaaactttttgagataatcataaattcattccttttgataagcacattgggatgagtacactgtctgttattaaacttaatccaggcttccagtgttgagtggcctgggtgttctttattactctgtttcagtgaaactgtccttctcttcattgcccataggattccagtgagagtagctcctctgcaccagccacacagttcatcatgttgcctctgcctgcctactcggttgtggagaaccccacctccatcaaactggtcagtactgtatgtgggggattgatggcaattagggtgtcataagcattttttttctaagtagatttgtctttttttctttctgagctaccagttgtaggaccaagaagatttctaaaagtcttagaacctcaggatgcgaggactggcaaagatttcagggattatgtggtccatatgttcttaatgggggtgagggggttgtagatagatctccatgggatccatgaactcacctcaagttttatacaaacttttttcctggaatggattccatgacttttataaaattttcgtaagcatacatgatttaggaaaatgagcagccactga

SEQ ID NO: 118260 - DNA, 2470 bp, Homo sapiens
gtgtttttccggtgtctttaaaagccttggctgcagcgggcttcctgaccgacttgttccttggcgagagagaacagcggtgagtcaggagcaggagcgggcaggagcgggcggaccgcagctccgcaccacctatgactgtgtcttcctcaaagagcaaaacattatatttttttgtgtgtgattattttatttttatttttttaggctcatcagctattgttagtgttagtgtattttatgtgtgactcaagacagttcttccaatgtggcccagggaagccaaaattggacaccccgatctattaataagatttcttgaattctgatttttgaggcagcaagtataatttgtctctaaaagctccaagtgtgtttgtgccagccaggaaatgactcaccttttgttgtattgttctagagttcatactggctaaaattagcccaagaaatatgtggcatagttcccaatgagttggataaaacaaaagatagtatataaggctgtttagctcaaggcttcattcttaaggctctctgatggcagcagttgaggtctctctgagcctgcagcctcagagaattttgaaagtaacatctaaaatgagtaggctgagttaatgaaatgtgagatcaccaggtagagttgttttgctcagattgcttaaattacccaatctttctgtggtgatttttgtctaaaatagcctacttagtaggcagtgtttgctcaaaaatcttatctcaaaaaatgagtttagtctcctgtttttctgctaaattttccctctcctgcagtaaataagctctgtgcacttgacttggaatttttctccatgttaactcactcttaggggctattatgtgttagaatctgagaatgctttaccaaagagctcttaagaggtcacctgttactggctctttttttttttttttttttccagacagggacagggtctcgctctgtcacccaggcatgaatacagctcatgcagcctcagcctcctggggtcaagtgatcctgccacctcagcctctcgagtagctgggaacacaggcacacaggctgcataccaccatgcctggctaatttttttttttttttttttttttgtagagatgtggtcttgccatgtttcccaaactggtcttgaactcctgggcttaggtgagcctcttgcctcagtttcccaaagacttaggatcacgggcatgagccatgacgcctggctgttaccagttctgaactagaagtgcagtatgcagatggctttggaaatgttgaggggtttttgggtagtaagcgactgggagataaatcattgaaatttagtgacattggcacagacactaaactttctgtaatgtgcagggaggtcctacacactatagaattaggtcacccaaaatgctgtctggctcctgttgacaaatactgagagcccaaccctttgctatttcataaggggaaatgaggattcaattgaagcttgccttataccacataactaattaggagtggagctaagcttgatagaacccagcctttatgtttcctagtttacagtgccctttatgatatacatggtgggtagaaaacctttctgaagacaaccactatttaaaaacatttttaaaagcgtatgtgtgtatatataatactattatttccactgcagtgctaattggataaaagctaagacaccaaggactttttaaagccaggtctagctgaaatagcagctgccatttttagtgagtttgaatatttgtagcacataataatgcatgagttaatttgatccagtgcaaagtatgtgacatatgtgcaagtcattcttaagactctccttaaagaatctgggacaaaaaacagaatttttcccaaaggagatgggaaaatttgaatctgtccacatgaggttgcggccacattgggattaactgaatctcataaaaggaccaccaaggtgaacaacttagggcttttaggccctgtatggcagtatgtcaccctctttctagacacacagaagtagcctttgaataatgtaaaactaaatgtaaacctaaaaaatgccaacatttggttgatgaaacctggagaagcttttcaataagaattcattagaagatgaacagttttattcaaacgaaggcatttaatgctatagtgaaaggaacctgtagccagaaaacttagattcaggctagttttacacttgagatcttaagttaacttcttcctttcatggaccttagtttccttatttattgcccatatgttattaaaaatgagagaatgtttgtgaatgtcatcaactgtaaaatcccttatgtatacaaggtattcttatttttctaggaaaagccagccaaagtaaaagtggaattggcttctggcgtctcttccaaaggctctgtggtgaaaagaaatcagcaacctgtcaccactgagcaaaattcc

SEQ ID NO: 118261 - DNA, 1053 bp, Homo sapiens
ttttctgtgtgtccaaattccatggattagtggggttggttggttggttttttggctatatgtagctagaatagttatcaagttttttttttttttttcatgtcaaatgggtaatgtgctgacgttataatgaggtttgagggaggcacatctcacccatgtgcatgaataccagattgtcatacttgtgagctataaaaggatctctcaaaatttcctaagttagcatttttcaagcttttgatcatgaccttcagtaacaggcatattttttattactgcccagtaaacatatatactaaaggtttaatgaagctgtgcccttactatatgcagtcactttttttttctcattcctatttgcaaaatcctggtttcaacccattaaattaatgttatgacccctcattggattgtgacctgtagtttgaaaactgtgtcatggaccaggttggaataggaaaacgggtctgccatctcccctgtcatgtgttctttgtcagttaacttcctttctttaacagttttacatttgccctgacaggaatatcaactggcttttactttgagaactgttttgttttccacacagatgtggcagctctgggtgtatgtgtgatcttgcggtgtagaaggaaggtatctggttagcgtcggtagttttgtatatttccagcccctagattcccttcatgtacactctgttacttgggtaaaccccagtcttctctgtaaatagtttccttttgattggtgacattgggtatttgttaaaagccacaagctcttttactagtcttaaaccagtaaagaggtacatgagatattcagaaaatcaacttaaattcattattatagaataattttaattttgtatgctttatcttttctttcttttttttagctatataagtaaaatatacattccttataaaacatttgaggccaggcatggtggctcttgcctgtaatcccagcactttgggaggctgaggtgggagcattgcttgagtccagcagttcaagaccagcctgggcaacatagtgagaccc

SEQ ID NO: 118262 - DNA, 1111 bp, Homo sapiens
gatagtaacttgtcataggagcttagatgctagagctttgagctttaatagtctgtaagtcacagtttgtcttcaggcagggcttgaactctttagttcaccagtctcaagcactctttgtttaaacagacctgctttactccaccaactgcctggaccctgaaggcatttgagtttctgaccattgagagtcaactctcctgtttcacagatagggaaggactggactggatttgccaaaaatttacagcctgtattaaaagtaaaagagttaactgcagaaaaggttaaggctcttgaagttaggctgaatctggtttgcagttgccactctcttctctgatttactggcagctgctcattctggttctgggttctgcccaggtttaacttaatttttgtagaattgaacactggtcttacttttttaggatttgggcctggctacatcaagaggccggggaaagtgcaagaatccctcttgtagctatgtctacaccaacaggcacaaacctcgaatttgtcccagctgtggtgttaaccttgccaaagaccggactgagaaaaccaccaaggctatcgtgagttccttcccccaaacacatcccctggcctgttctgggctctgttagtgaacctgtcttagtagaaataagaagatttttaaagtacatggtggtagttagagcatccaaactgaaccagttggtgggttctgaacctgagcaagtgccgccttttctctgagcctccttgtccccattgccagggtgaaggggttgactaggtatcttgatctctgagaaccaagagttcactcactgcagagaatgatgtagcacaggccttaagtaggagtgaaaggagagggacgaaagggttgcatcctcttaccgctgaggcctgatacaagacctgtaagttgatttactgtttcggtaaatagagaatgccaacctgagactttgcagattagaccaccgctgctttctcaggctccttggaaagcttttagttaatcaaagctttatttctagcagtctaggcagccctcctctctgaagttgggccaaactacttgggtagtaaaatacattccacttggctcctt

SEQ ID NO: 118263 - DNA, 1041 bp, Homo sapiens
ttgctgcacatttaccctttcctcccctattattcatcaacatcaggcatttgtggaacactcaccgtgtaccagccattttaagactttggttgaatcctaagttttgtttgtagaattgagtgctgaagatgaaagtgtatttttgatgtattctctttgtcttagaacttaatggtgctttattttgaattcatgtttttaatgtcttatattattagattgagtttgtactattttatgctcttgccaacagttaacaaaagtgcctattaccctgttgtctatccaggctagtactcaggattatatatttatttagtcaacatgtattttaaaatttacatgtagttaagtgtgttgctccaagttccataagttctgacagatgcactaagtggtgtaactaccttcacaatcaatatatagaacaggtctatcacccaaaacattctcttttactgttcctttgtatttaaacccatccctctcccccaacctctggtaactgtttgatctcatctttatccatatagtgttctctttcccagaatgtcatgtgaaagcaattatggcacgtagccttttgagtctggcttctttcagtaagttaatcctttgagagtcatccatattgtgtttatcagtgatttattcctttttattgtggagtagttttctgtggtgtggatgtaccacaggttgtttagctgttccccatgggaggatatttggtttgctaccggtgtttggcagttacaaatagagctgctacaaatatttgtgtaccagcttttgtgtgaacctaagttttcatttctcttgggtaaatacctaggagtcagattgctgggtcatgtggtaagtgtgtgtttaattttataagaaaactgcattaccaaagtggctgtaccattttgcattccttcccacaatgggtaaaagttacagtttgctctacatgccagtacttagcattatctgtttttgtttttcagccattctaataggtgtgtctccgtataaactgtagagtcagct

SEQ ID NO: 118264 - DNA, 2117 bp, Homo sapiens
ggcatttagttgtggggtttttgttttgcctttttcaagatatataacttgaataaaatagagatggggctttgctatgttgtccaggctggtcttgaactcctgggctcaagcgatcctcccaccttgggagactacaggtctcccaaagtgctgagactacaggcatgagattacaggccatacctggcctgttttgtttttttgagatggagtctctcactgtgttacccaagctagtcgacaactcctgggctcaagcgatcctcctgcctcatcctcccaagtgcctgcaactacaggcacgtgccaccgcacccagctggtgtgtattctattttttgccattgtgtatgatacattaatttccttgttgcctcttcttaacctgcaggtctctttaatgtggggaacaagctgctggtaagcctggacttgctttttgcaatcagaaatcagatcaagctcggagaggaccccagagtgtccatcaatgttgttctgaagtcggtgcaggagcagacaggtaaaagttgttttcttccctttcccaaggttagtcctaagctccctcggaattttcagtgatggcatttggttaaaagactcattttgaagaagagtctgattattttgaaaaggagacattcttgacttcctaatacactcttccttttgaattttacaaatgccaaactaattttggaaagcatgaatctttttgtgcatccagggacccttagcaagagattacgagtgacttgtagaagtaccttctttggtcatagggagacttggccccattgcatgttagactcattctgaccacacagctcctggatatctgcttccagtcccaaggctcatgccaagacctaagagtgaggaccatcctttctgtctagaatatttttcctccatgccctctttactcctatttgtgcttttcccatcccattcctataggctccaatccccctctaccttacctgctgtgagaacagatggagtagagcctactagagttacatgggcctgtgtttcagtcttggctctgccactgttgcagtgtgattttgagcaagttattcttgtgcctctgtttctccagttataaaatgaggataatagctcctcgttcataaagaattaaattgaggtgagattaatgacataacatatccaaagctttcagcacagcatctagtacttagtacaaggcagctatcactccagtgggaattgctctttgggttgccacctgagcacttgcaggccagatccctgaccctcagggtaggtagtacactggagtgttctttaaggtgaatcagtctggcagaattgctctacttactacccactggctcatccctagtggcttcagtgtctttttctgtgcccttctcagtgttcttgctcttctttcagagaagactctgacctcggaggagctgagccagctgcaggagctgctgtgcaatggctattgggcctttgagtgcctcactgtccgagactacaatgacatgatctgtggcatctgtggtgtggcccccaaagtggaaatggctcagaggagtgaagagaatgtgctagcactgaagagcgtggaggtaagtgcctcttagccaccgtgagggacctgcggaattttctcattttggcacctcccttcctatatgatatccccagggggtggatagctccagtcctgtctaggtgaggcaagtgagtttttcctcccacagcccaagatttcatttagggaatgccagatggaaatggaggcatttgtttattcagttactcacttgaaaaatgtatttatccagtgaataagtatcaaaaaatatatatagtaaatatattgaacataaactaaatgcatgttttagacacctgggagatagtagttaaacaaagtttctgtcctcatggagctcactttctggtttggaggacacaggaaacaaatatctgtccaggagtagtgagtgctgtgaagcacagtaaagctgggtaagagagagagaacagtgtcatgggaaagggcatttgtattttatagagggcagtgaggggggaaggcccctctgatacagtagcatttgagt

SEQ ID NO: 118265 - DNA, 1064 bp, Homo sapiens
tcaggagtggtaccaggaaacctcttctggccccgagagagcacttgggggacacggtatgtttaatggaggggaggctgagggaaaggctcgtagctggtgggttccgtggggcctgcggtgtgggtcagggtggaggtcctgggtgggctaaggcgtgagccccagcactaggtgggaaggctgctgaggtctctcccacccctgaggagccctggtttcagccccctcagtctgatgaattgcttagcctgttgcctttgactaggggcctgggtggcctcattaactctaggggtccctttgggctcttgattctccctgaaggagggatgcatttctctcttgctcttcctgtacccacatttgggggaagctgaggagggaggaacagtcagccacagctctcttccagcactgtcctctccaccccaagctttgaggaagagcatccccttcctcctttccctggccactgctgctgcagccaatatcctctctgggcctgggaccctctccacagaggggatgtggtccctggtcatgacataacctagcagcagtaggaaaaactcccttctatgaaggggaagcagactgggccataaggaaacagcaggactggctcaagtgcccaaggtttgtttagggcctgggaattggccatgtgttaatttattgagtggagtaggtggctttttttccctccctcttcccccaacaagaataaagtttattaaattatctggttttggtgtagcaggagtcaattccgtgcacatcgtatggggcacagtgtggtcaagctccacagctgtgagctcgtcacttcatgtgaaggagggaaggaaagaaagacgttccagggaatttgcaggtactcatgtggcacaaagaaccagaggctgactgcattaatgctgttagtttaatgtggacagagacatcccacggcgtgactgttagttaggatgagtcagcttgggggagtttgtgcttcctgcttggtgtggccagccacatgccaaggtcccctgccttctagcccagaatgacgggactgg

SEQ ID NO: 118266 - DNA, 1430 bp, Homo sapiens
agctgggtgtggtggcaggtgcctgtaatcccagctacttgggaggctgaggcaggagaagtgcttaaacctgggaggcagaggttgcagtgacccaagatcaagccattgcactttagcctgggcaacaagagtgaaattccatctcaaaaaaaaaaaaaaaagtacaattattatgtgtcaatcaaaaataaaataaaacttgaagaaacctggagtagctgtattaatatcagacaaaatagacttcagaacaagaaatatttccaggcataatgagggacattacatagtgaagacagaatcaattttacaagaagacataacaatcctgggtgtatatgcactttagaacagagcttcagtttttttttccggctggaaccatggagggtgtagaagagaagaagaaggaggttcctgctgtgccagaaacccttaagaaaaagcgaaggaatttcgcagagctgaagatgaagcgcctgagaaagaagtttgcccaaaagatgcttcgaaaggcaaggaggaagcttatctatgaaaaagcaaagcactatcacaaggaatataggcagatgtacaggactgaaattcgaatggcgaggatggcaagaaaagctggcaacttctatgtacctgcagaacccaaattggcgtttgtcatcagaatcagaggtatcaatggagtgagcccaaaggttcgaaaggtgttgcagcttcttcgccttcgtcaaatcttcaatggaacctttgtgaagctcaacaaggcttcgattaacatgctgaggattgtagagccatatattgcatgggggtaccccaatctgaagtcagtaaatgaactaatctacaagcgtggttatggcaaaatcaataagaagcgaattgctttgacagataacgctttgattgctcgatctcttggtaaatacggcatcatctgcgtggaggatttgattcatgagatctatactgttggaaaacgcttcaaagaggcaaataacttcctgtggcccttcaaattgtcttctccacgaggtggaatgaagaaaaagaccacccattttgtagaaggtggagatgctggcaacagggaggaccagatcaacaggcttattagaagaatgaactaaggtgtctaccatgattatttttctaagctggttggttaataaacagtacctgctctcaaattggaaaaaaaaaaaaaaaaaaaaagaacagagcttcaaactacatgaaacaaaactgatagacccgaaaggagagatataaaaatctcttgtaacacccttctcccagttgtaggtggtacaagtagagagcaaatcagcaaggttatagaaaacctgaataaaatcgtaaatgattgacctaattgatttttatccacctaacaattgcagaatacacattcatctcaagggcat

SEQ ID NO: 118267 - DNA, 1081 bp, Homo sapiens
gtgaccagccctctgcctccagggaggccaactgactctgagccagggttcccccagggaactcagttttcccatatgtaaaatgggaaagttaggcttgatgacccagaatctaggattctctccctggctgacaggtggggagaccgaatccctccctgggaagattcttggagttactgaggtggtaaattaacttttttctgttcagccagctacccctcaaggaatcatagctctctcctcgcacttttatccacccaggagctagggaagagaccctagcctccctggctgctggctgagctagggcctagccttgagcagtgttgcctcatccagaagaaagccagtctcctccctatgatgccagtccctgcgttccctggcccgagctggtctggggccattaggcagcctaattaatgctggaggctgagccaagtacaggacacccccagcctgcagcccttgcccagggcacttggagcacacgcagccatagcaagtgcctgtgtccctgtccttcaggcccatcagtcctggggctttttctttatcaccctcagtcttaatccatccaccagagtctagaaggccagacgggccccgcatctgtgatgagaatgtaaatgtgccagtgtggagtggccacgtgtgtgtgccagtatatggccctggctctgcattggacctgctatgaggctttggaggaatccctcaccctctctgggcctcagtttccccttcaaaaaatgaataagtcggacttattaactctgagtgccttgccagcactaacattctagagtattccaggtggttgcacatttgtccagatgaagcaaggccatataccctaaacttccatcctgggggtcagctgggctcctgggagattccagatcacacatcacactctggggactcaggaaccatgccccttccccaggcccccagcaagtctcaagaacacagctgcacaggccttgacttagagtgacagccggtgtcctggaaagcccccagcagctgccccagggacatgggaagaccacgggacctctttcactacccacga

SEQ ID NO: 118268 - DNA, 1082 bp, Homo sapiens
gaagcccagatagctgccagctccccagaagccactccacccggctggcagagagcttggcctgggcagcccagcagcctctccccacaccaggcgccggcgcagccatgctgctcatcgtgggcttggtggccatctactacaacatgatcatcgcctacgtgctcttctacctcttcgcctccctcaccagcgacctaccctgggagcactgtggcaactggtggaacacagaactctgcctggagcacagagtctccaaggacggcaacggggccctgcccctcaacctcacctgcaccgtcagccccagcgaggagtactggaggtcaggcagctgctggccccgcggcatctgaggggaccctgcactgctgagggtggccagagggcatcccccacagtctcagcatgtaccgccaagatgagctcaggtggtgatggcaggtggactctggcttctaatcccagctcttcacctgaccagctgtgtggcctcaaacaatttatttggcttctgttgctttatctgtagcatgagggcaataatactaggtatctcagaaaggttgttgtgaagattaaaggagagaaagcatatattaataaattgtgcagtccagtctggtggatagtaagtgctcaataaatactagctgagaatgatgatgatgatgataacagtaatagtaacattatggagtctcagtttcctcctctgtaacaggggttggtaacagtacctgcttcataaggtgttatccagttagtcatttacccactcattcattcttttaataaatatttattgagcaactgctatatcataggtaaagcacttagcataaggccaggacgtacatagtaaggaccatctcagactcctctaatagagataggactataatagagtaagggactgtcatcagaattaaacaacataatgcaggtgaaaccattatcacggtgctgggcacacagtgggtcctgggaatggtgggtgtcggaaggacgttgcactcatcagcctatcccaatgccccattttatggtcaataaaacaaagccttgtcactgcattc

SEQ ID NO: 118269 - DNA, 1032 bp, Homo sapiens
ggaccaagcttagagaccatcttctagatcctgggtgggaaactgaagcccgcagaggggaagggacttgcccatgtcccaccgtgtaaatgttgggggaggctttgctcctggtccacgtcacttgtgagccaggctcatgaccacgccatccctcgtgaccacgccatccctggagctgtcacaccatcttcattcactgccttccttctctgtccttgaccatccgcacaccctccctttccatccttcccggcacaggtgtggattgaagctgctcttcagatcttctattccctgggtgtgggcttcggggggctcctcacctttgcctcctacaacacgtttcaccagaacatctataggtcagtgtcccacagcctcccagaccctggggtccaaagcagggaggagagtggctggccagggagggcctcagaggctgaaaggaaggcccactcaccctggcccgcacctggacttcttctggtagagacactttcatcgtcactctgggcaacgccatcaccagcatcctggctggctttgccatcttctccgtgctgggctacatgtctcaggagctgggcgtgcctgtggaccaagtagccaaagcaggtgggcaggctgccaggcctcagtggggtgagcatgtgtgttgggtagagatggggctgggccagtggaccagcaagattatggatgggggccaggcgcggtggctcatgcctgtgatcccagcactttgggaggccaaggtgggcggatcgcttgaggtcaggagttcgagaccagcctggtcaacctggtgagtcccagtgtctactaaaaatacaaaaagtagccgggcgtggtggcacatgcctgtaatcccagtactcaggaggctgaggcaggagaatcgcttgaacccgggaggtggaggttgcaatgagccaagattgggtcactgccctctagcatgggcaacagagcaagactctgcctcaaaaaaaaaaaaaaaagattgtggatgggtatgtcatgtgtgtg

SEQ ID NO: 118270 - DNA, 1031 bp, Homo sapiens
ccttgctgcccaggcccaggggcaggctcttggcctgccccaggcccagagggcttcccagtaaggcccagtgatcccattatcccaggggcaaaaccacctgtccccttttgagctgccagttccctacagccatccccagtcaagggtgagggtgtggccttcaccaggggctgctgtaattaccgagcaaggtctgagctcttcttcagcctcagttccctcattggttaaaagggttctttgttcccatccagccgatgaaggagcaaacgtctggctatgtgaagcctaatttacctgcaggaactggcagggatagtcactggctggactcctgtttacttctagacctggtcaggctccatcccctcccccacctgcccctgattcccctcgtcggtgcctgtcaactgcttttcagcagtggactgcaggggaaagagcagtgatttggggtgagtaggcttcaattcccagctctgaccagacttgctgtgtgaccttgggcaagttcctttccctctttggagcttggtttccctgccagaggaaactgagctggaggagcctgaggtcctgcctttcattggctgacacacctcctgtccactgtgtcactctccaagtgccagagaagtggaggcagatcgctaccccaggctgagatggcccccactgtgaaggccacgcctgtgggtgggcagccacctggtgccaccacagggcaccagggatgatcctgatgtggcaggcaggggagactcacagaaaaatctgcccagagcctaccctcaccagacaaactctgtgctcctccaaaacatcctttagatgcaaaataataataataataataataaataaataaataaaaatccaaacccaagtcaaaaccttggctccagcatgaaaacacgtttacaggaaagtgttctcctgggtttgtgcccaccatggtgcgaatcctgacccaaggcctcctgtctcccttcaaagggagacccttttgggggatgagtttgccagac

SEQ ID NO: 118271 - DNA, 1054 bp, Homo sapiens
tggactttccagatgtaagaagcaccaggcccccagatcttctgtcccacagaacaaagctagggagattcctgcccactaggctttattgttggtaacttggtgtcccaagtagctggagacacagccaagtcaggcactgtctcaggctacattaatagaggtataatatccagaattggggaggggatagagagtgctaccccagacatgatattctgcattattcaggccacacctgatattgtgtgcacgtactcagagaggtatctagacagctccaggactctcaaggattaaatggccagcttgagtcagtaccacaacctggaggccttcagctctgagaagagaagactaggcatagaggctggggaagcaggtgttcacttcggggccccagaaggcagaaagaagacaagaactgtatctagcgggttttggaaggacagatttcaacttgaaaggagaaggaagtgaaaatagccagggcagtccaacattgcagccagcttccgggcaggccacaagccctgggttccaaccagagctacaccccctcatatcaggctgctgggaaatatccctgccctgactagagactccaggatgtcctcaggaggaagttccaattcagagattcccagatgataataaccacactctcatttcccaagagccaggcactgtgctaacttctttacataatgcagcatcctttacataagtgctttgatctaaaggactcggaacagcaactggctctctgtgaggaccatgtacatgttagctatttctattgacatattcttaactcaatccttagaacaactctacaaggtaagtactattagtatcttcattatacatatagggaaactgaggcactggaagttcccttgtccaagggaacagctattaagtaagtggcatagccagaatccaaagccagggactttggctccagaatccatgacctcagccactgtgctagactctctgagatggcagggagaagcagacctcaggaaacaggcattgagcacaggctcct

SEQ ID NO: 118272 - DNA, 1603 bp, Homo sapiens
gagaggaaggagaggagggaggagaggggaagggaatcggggagatgaggggctgactgcaggctgatgactgtggaagccacaccatccagcccagctggggaaaatgcagggtctgtgagcatttatgcccctgtgagcacacgggcattggaagtgtccagtgagccaccccatcccttctgtggaggccccggatggaaggcacagggccttgagttcaaaggccactcctggcccaaccatcactttgtagctcagcctccttcactcccttggatggaggagggaagaagtcctattggaagatgagaataacctgggggcctggcccaggattttggggagctcactggatcttggagtcagaaacccagaattagacctgagaccctcaaggcatatccagtgcctcccatggcaaaggcctgccctgtgggctcctcgagtcccttctttccagcagggagaggggcctcctggcctctctggtataagggcatctagaataggatgagcctttggagagggtctgactgtgggtgcctggagacctggacagaggaaagagcctgaacgcagggcctgggttctagcctcagctctgctagtggcttgccgcgaggccttgtgcaggccactgcacctctctgggcctcagtttctcatctgtgcaatgcaagggtctgtcttcacctaccatcttctgtgaatgggagtctttaagactcctggcttggagagctgagggaaggagaaggtaatttacatttgtccccctctccttctcttggtaccgtagccaatacaggggatgctacaaatccccaaaatgctagtgtaagctgaatggcagggccaaaagactcaagttctagactcagctccacttctggctgagcctcagtttctccatcagcataaaggggtggaataggccagccaccaggaggttgtgaatgcaagctggattgcaaaggctacttagaggactggctcccatgcttggccctgctttggcatcacctgcagatattgtttaaaatggagatgctcaggccgcaccccagacctagttatcaaactcctcagaggggacctgattctgtttattgtaacgagtttcccaagtgactgtgacagtcaattgggaatgaggtcctcctagccgagatgcacggggagcctaggagaagacattgggcctcacttccaggcctgagcaccctttgtccttcaagagcattggattctggaggcctccagtgactggcttccagagccaggattggcttttgccatcagagttaggcagggtgggtagccctggtcccagggaggcttggccatgagcttggctgttagatcgctagacccaggcagtgtgcatgaggactcagagcttcaggacgaggactggccccgccaggtcaactgttgctggtggccttgactccttgactccttgtcccgatgccaagccgacaaaggactacagaggatgaccccgaggcccatcctcctcccaaacctcccctgtcgttcctctgctccctgccgttttcacgctgtgtcttttcctgtcccatctcttctccttgtt

SEQ ID NO: 118273 - DNA, 1010 bp, Homo sapiens
aggcttcttatttactctgggactttcaagacttgagtaaaggcaagacaccataagcagatcacatgggagccttgaccacagaagggggaagatgggatatgaatggataaatgaggaattcaggatttgcctaaccatttactcctgcctcagggtgatagcctggatcaaggggtcatatgagctcacaggcaggcacttgggagctggtcttaaaaaactgggaaactagacgagtcttagagatttcccatttcaaccaactcctatacgggagcaaactgaggcccccatgtgggaagagatacggcagcccagtttgctgaaaaagagtccctgcttagactctgcttggatttatgttcaagtcctggctctgttcctgaccaccgagcgacctcagttaaggcccttccccttcccttaaaaagaccttaggtcctttttaagatgaggtgagtaaactagagaatgaattgggtcccttctggctctaaaaccctcttaagtgtcattcattcattcatttcataaataattgagtgctctttgaacatcacttgggtgctaggaatagaaggttgaataaaggacagtctcatcacatgtcactgggcgcaagagcatgtgcagacgagtataatcccacggccaagtaagaaaacgatggtgtgtactaaatgctaggggaacccagaagcaaaagtgactaattctttgggagagttatgaaagactttatagcatggataacatttggactgagctttgaagagtgagtaagagtttgcctgggaaagcagggcttgctctaggccccagtgcaagttaatagcttagagcttagggattccgaagtctggagccagactgcttgggttataaatcccactccaactactagccgtgtgagtcaccgggcaactaatttaatttaccaagcctcagttcccttatttggaaaatgggaacaataatatgtacctctgaatttgtggtgaggatta

SEQ ID NO: 118274 - DNA, 1078 bp, Homo sapiens
aggtgcttattacagatttgttcagttagcgaatgaatcaatgaataaactggcaattcgtgtctggttcatgggcaccaaaaaccgtgcgaaatggataaatgagcaggtaatggcagtacaaagttcggatctagagaaagatccagattagggagttcagagatgagtaaaacgcagacccagccatcagagaattaacaaggaagataaatctcttcaagaagccagccggaaggattaaaagagagtcgtccaagtcccggccggccccgggggcgggtccctgtctagccccgcatgctccgcgccaatgggcggtattgttgatcacgagtctccgcccccttcgccttgaggggcggggccggccactcccggagaggggactacgtttcccggcgcgccgcgcggccggagcgaaagaggagccggaagtgtggcgcgcgaggtctaagggcgcgagggaagtggcgggcggggactaaggcggggcgtgcaggtagccggccggccgggggtcgcgggtatggccgaggccaggaagcggcgggagctacttcccctgatctaccaccatctgctgcgggctggctatgtgcgtgcggcgcgggaagtgaaggagcagagcggccaggtaagcgttcgtgggccgtgtgcgagggccgcgtgcaagatgtggagatcagcggcccgcggcccgcgccccgtccccaggcgacccggcaggcgcccggagccgggtcccgcagtgctcgacggcgcggccaggggtaccggaggagccgcaatctctgccttcccactgcgacttcagttcccctgggcctcactttcctcatccgggcagtgggttgggccagaaagtgtgctcgcaggggccgaactttgtaattcccgcttcccttacctccacgcccttcctggtagcgggtattttaagtttcctaagtctcccgccacgtggctaggctctgcgcggccccccctggggcaaggaggttgctgcgagtctcgggggtggattgcgaccagcccctcgggggagcgcctggaaaagggaccctacagcctctta

SEQ ID NO: 118275 - DNA, 1720 bp, Homo sapiens
agcaactagctgtatgtatgaccttgagtggatttcttggcctccctgagtctgtcttcacctataaaatgaaaataatgatggcaattatctcattgcattgtgagggttagacacagtgctccatataaagtgctaaaactaccggttggaggctccccgacttcctgcacccgcctcagtatttattaagcatctactacaacccagcaatattcttgatatagctgggaacaaaccagagaaaaatccctgctcaacatttttgttgggggaaaagaggcagaataaattgatacatgtaaaaatgaaacctgtttttaacaggagaatcctgacaagtggctttcctgggaacaagggaccctactatcacatcccaaaccatgacagagcagagtccatcgcagctgggaaacctggggcctagacagtgactccctgggatgggggtcaatgggcgtgagacttcaaagtccagggcctcagccatctgggtgcttatcctacccatgccctagactcactttgccatgagcaagtcacttagttgttcagtttttgagacatgtgtgaggcactgaggatactgtagtgagctgccagctgccttcctccctgggcctttctgtgtaggggaggagtctaggaagtaagtaaaataacaggagatagagaaaagctatgaagaaaatgaaacaggatcacagggcagagcatgccttggaagaggggcaatcttcgagggcctctcttggggggctacattaaagttgagacgggaaggacgaggacctgggcagagtcttccaagaaggcacagtacacacagcatgttctgcagggggaagagcctgggcggttctgtgaggtgcctgcatgggtcagctcctatcacttaaagactggtagctgctgcagctgttatataacattatccagcattcctgattattttaaagactaatcaagaattgtaaaagcactttatgaagtgagtgaaaatgcagaatacaaaattgtgcctatactgtgttttcaccactgtttagattctatgcacattgcctttaagagctggaaggatgcgggaaggtctgtctagtcaattcttgtggagttgttctgtcacccagttggtatagacagtcacccttgtcctgcagaacctcagagcttggtcggaagcggaaggcagaggaagatgcggcactgcaagctaagaaaacccgtgtgtcagaccccatcagcacctcggagagctcggaagaggaggaagaagcagaagccgaaaccgccaaagccagtaagagccttgcagctttgggaacaggctatggaatattgattgttctagggtagagtctacctccagcttcttctcttatcactagaagacctaaaagaccctggggaggagattgggagggcaccacatatctttggcagtatttgagcccttcctccgtgccaggcattatatctccatgctctgggggtgcaaggccgaaccaaaacaaccagatgggcccttccagtctcatttggtgtatggggcccaggagctgccctattacaggctcccaggtgattcttattagctggaaagaagacacacgttcagaagtactgctggagggatttcagaaagcagctagcggacacattttctgtgtgacctgtgggatgctttaggaattgctgatcttcatgttcattt

SEQ ID NO: 118276 - DNA, 1024 bp, Homo sapiens
cgcctctactctttcccaagctgcaggcacattccagacccaatgccttacagagtttcattatgcagctcacttaaatatttgtcttcccttctgagcctcccacctgtaccatgaggtgggtgttttatttttattttttgaaccatgggctattttgaagtaagccgtttaatttccaaatatctgggattacccaggtttctttttgttgatttctaatttagtcacattgtggttggagaacatattttgtatgatttaaatccttttttgtgtattgagacttgttaggtcaagtcagtcttgtgtcttgtttcttgtggaaaacatggctcccctctggaggatttacgtgctctactgatgagcacctcggcctgagtcatacttggtccacactgtagggaatcttcttgaagtcctgattcttcacctcatttgacctcatgtgtttgaggaatgctgggggatggggttgttttctgacactgaccagatgccatccctgagtgaggcaggggccttgagatgctgccagagtcctcattctgtttcacattaggcttgctgtcactcctgttaaggatctcactctgggaatttccctttttttttgttctccttctatttgttggaatccctgacaggccttttgggggttctctggatatcggttaaggctagattaagctgaagaaaaccttaaacaacaagtatcttgttctgccgtggctgcttgagctccagctctgacctcagcattccatctagcctggaggaggaagagacatgtttctgaccttttatggcactcaacttacatcctatgagccagaatttaatgacattgccacctagctgaaagggagcctggaaaacatctgttttaggtagtcttgtgcttagctaatgctaaggaaggcacgcacaatgagtttgagtgtttattatgttccagacatcatgttaaactctgaatctcctatttagtcttcatcataacccgtaggtgggccttatt

SEQ ID NO: 118277 - DNA, 1160 bp, Homo sapiens
atcggagtcataaatccctttcatgttcggagtcagctctggaaggagctagcagggtggaagcatgtttccagtggctgtggggcaggtcaggccagcaggtatccctgtgcatgtgcaggaaggggccacgctgcctcccctggaaaccagagtgcctgagggtcattgcctactggctgtttccccctcagcaaatgccccactccccgaccacgtgcttatccaggtcttgtcccctcagaaggacagtaactccaaacctgccagaagcaagaccctggccccagcacccccagagaggaacacggaggggtcctcggagagcagtgaggaagagctgccactgacccaggtgcgccatgccttctctctgcagatgctgcaggatcagagctgggctggcaggccttgcaggagagggcagatcttgcccatagggaaaatctcgccatatttaaacagcacctcacagcttccagagctctttcctctattgtgacattcatctgagccctgtgaggcaggcagcagtacacagttaaacatacaggcttcagagccaggtggtgttggggcgaagcccagctcttccacccaacagccccatggtcctgggcagatgccttttcccctgtgtgaggctcaatgtttcagccataaaatggggacagtactggcacctctctcctgcctctgtgcactggtgccagcacacaaggtacttgccacagtcccctgcctaagaaagggtgcctgttaactgtgagaagggcagggagtgttgccccatttgacagattgggaatcaagccttagagttgaagcagtttccccaaattctcatgattcataagaggctgaggaaaggtccaaacgctggtcccctggctccctgtatctctctgttttctgtttaggaccaggagtcttcttgaatcccatgagctctgcccaggaccctctctcaagcacctgtggcataccttcatgtgctccactgcacccagagcttaagccacagtcctgctcaggctacacctccaagggtgggaccaggcccaccttatcttcctgtactccagaggcccaagtcagccatgctggtgtggtccaagcttctgtgtgaaccctggcccttccatcagacagcattaccc

SEQ ID NO: 118278 - DNA, 1509 bp, Homo sapiens
ctcgtttcacgcaaaccctccactcagttccccaacgcccctggattactttgcagccagtctcagacatgtcagctcatccaccaggatttcagtatgcagctctcagttataaggacctttttaagcacaactacgatacagtgtcacacctaataagttgatctacccagtcagtgtccctatttccctgattgtctcatggagttcagttaaaggccacgtacggcattgagttattaatcctctaagtcttaatctgttggttctcacccactcacccaacccttgtttctcttgtgcatttttttgttgaagaaactgaattggtatagctggggagtttcatcctgggccatgtatcaggagggctgcatcagaacctctggggttggggcaactagactgtaaatacctccccaggtgaattgcatattccaaccaggcagccttggaaaactgcttagaccactccctgcattcagcaagtaactgtttctgaagccagccggggaaagaaggcagaattggacattctggccgtggctttgcttccagtagggacagcagccttgggtcgctccctttccctctgggcttgtggttttcccactttgtataagggagctgatcctgctgaatgtagggcttcactgtgagggtcaggtgggctctgggagttgtgaagtgctgtgctgggtcttagcagatgtgtggggtgggagggggcaccctgggcagctggaatggcttctgtgcccagctgcccctgagctcagtggaccctttgccttgtaaaacactccctaaccccatcacctcctttccctggccaagcctttaatcactgggggggtgttttgtttttgtttttcaaggtgattaaaccccctctgatttttgtcgaccctaatcgtagtccagctggcccagctgctacacccgcacaagcccaggctgcaagcaccccgaggaaggcccgagcctcggagagcacagccaggagctcctcctccgagagcgaggatgaggacgtgatccccgctacacagtgcttgactcctggtgagcgcagcccttatgcagtggtgggaggggctgccagcactgccccacattgaggcccagaagggacaggacactggctgagtcacatagcaaggtgttggtcgggaggggcttggggtcaggtctctgggccctgcattagccattctgattagggcctggctcagacctgcagttctgggggaatagttgccagagcttttttgtggcagccccagtcatggagcccagaccagtggctagaagctgcagggaccaggttcctacatagtctaagaaagaattctgtatcagttgactgcctgtggaacaagtggtcagggtggtagtgagcttcccgtccttggtggcatgtaaagtaggttaggcaatccctaagccagagacatcacagggatagatttcatctatcagagagacaggaccaatctgaggtttctt

SEQ ID NO: 118279 - DNA, 1001 bp, Homo sapiens
ccaagacagggacaaggaattcccaggccagtcagggagtggtgaggggcagcgattaaacaaggaaacccacatataaataaaaagtattcaccagctggtaggagaggaaacaataaaaactagagaatagtggggtgacctgctatatgaaggcctcctgagacagcgatgcttaagcagaaaaagcagccagtcacaggatgagctgggccaccctccaggcagggaaactgcaggtaccaggtcttcgggggaagcgcttgggaatgagggaaactgagaggtggggacagctggatgaggagctgggggagaggagatgagccaggccgtggcaagagccacgccacatttgaaggctctcagcaaggggtcatgcccaatttccatgcccaccactctccctgactgctagtggttataagaagtagagatgggggtccaccaggttggagattatccccagtgaaggtgcagattgagtagtggggcctaagctgcttccctgccctgggctgggaactgtcccttgctccttgagaacaatgtgattcgctcataacctgaagcctgccaccagttttgcccctttgactgcccctcagtccctgctccagccctcaccccagccagacagcatctgaccagggtgtggcacagctggcatcccaaggacttgtgagtctgagggctacctcttgccacccacaggtgtcaaagaagaacccagcttccctcccactgacccaggctgccctgaaggtcctcgcccagaaagccagtgaggctcagcctcctgttgccaggacccagccttcaagtggggtgagcttggggagccaggggaagcaagcccacggagcgtagaaggtgcaggcgtggccctgcatcgcggcaccagcactcatctgccccatgacctctgcacttggtttgcctccctcggcctcagtggcctaatctgtaagaaggaattacagtacctttcgtagttggaa

SEQ ID NO: 118280 - DNA, 1036 bp, Homo sapiens
ctaaactaaacactaaaggactcagcccagttctcagaacattccaagtgctaaaaaatgtccactgtggttaatgcctcccccctgcattggagatgccagatttcattttccttgcaggggaaaagggtcaggaaatttgacatctgcatgtgtttccttcccctagggatttcctagccgagcagtggccatccccatgcctctgacctccaccgacctctgcccaccatgggttggaactaaactgttaccttccctcgctccacagaagaagacagccagcttcaggggtccctgtgctggccaagccagtgagcctgcggggaggctggtccaaggagaaagtggaccagctcccatgacctcaccccactcccccaacacaggacgcttcatatagatgtgtacagtatatgtatttttttaagtgacctcctctccttccacagaccccacatgcccaaaggcctcgggacttcccaccaccttgctccacagatccagctaggcctgacctgtgcctcatcccgtgccgctcggtctctggctgatcccgaggctttgtcttcctctcgtcagttcttttggttgtgttttttgttttttttttaataactcaaaaaaaaaataaaagacttggaggaagggtgcaagctcccagtgcatctggggcacatgtttcttggaagggactgtctcgccgacactcgggattccctcttgcctgcatgttgaggctatgggtgaccgtggttagtgggacaggcagtgagcagtgaagtgcctgagtgccgaattggtggggaaggcttcctggatgaggtggcatctaaactaaaggatggaactaaaggatggtcatggttgatttcctgttgccagagtaagtcatgtaaatacccaaagacaagaaatggaaggggctgagaatcctcgagttaggcctcgagctaggggcaggctccctggaggtgcctggtgaacagctgtggcaggcacagcaggtctaggaaaatcggaagtgagttgcccc

SEQ ID NO: 118281 - DNA, 1090 bp, Homo sapiens
ctatgagagaggtcacctgtaccctgtggtgacaggcctctgtgggcccttaggaacccttagacaagatgggggtgggtcaggggagggggacagccaaaccaagaaggaacagacaggagagagagagaagtgagaaagaagtgagagctgagaggatgggagattccgcggtgctgggaccagggagtgctggaggccccggcctcagcagcttcaggagagccccgagggtccagaagccctggcacgctaaagctcccactccctgtacctttcggtggagcgtcagtgggcttttgctccaaggagtgcctgctcatttcaaacaggagccaatggtgcatccagctctcaaagacctaatacggatagaggtggaggtcaggttcgatggccaccaccaagcccctacactgcctggctttgcccctggggacagaaacatgcagggccaaatagggccccaacacccgggtccagctgcagcctggttccctcttaaagacccctggggctgaaccccacatactctgcagcatccaggttttggaagtgctggtaaaccccttcagcttcctgagaatggcttccccagcccaccctcaccccacctctcctagccctgccctagacaccagaggaaagagagagttcccatgcagggaaacctgctgaccttccagtctatggtctccatggtgttcttaaggtgtctcaggttctccgggaagctccccttcagtggcgggtacaccttcagggggtcagcattctacagggtagcagggcaggaaggatggttcaagaagagctccctggcaggcagtgtgaaatgtgtagcccacgttcccttggtcttccattctgaggaatggaccagagctacaccaagcctaaaccctggacttcagccatgatgggaggggaggggagggtacgggtaagggtagtccagctgttcagctacgagactgcagcgttgcgagtcgagttccagattccaggccagctctaccaacaagccccagtgtcctccctgtggatggctgctcagctttcaggtcttacctgctccagcaggtgagga

SEQ ID NO: 118282 - DNA, 1068 bp, Homo sapiens
tgcaccctgcctactccagcaaccagcaaggatggtttaggacgctccaggagtcccttgtgcctggtaactcatgacatcacagactggctcattctcattggcttgctgcgtgccagtctgtgctttctgggataaggcccagcccaagggagagttattcgggaaggaaacagcaaaaacccgacggtgggcggggggcgggggggaagtggggagaccagacaggaagggaaaacaaattctacttcttggccttctcaaggaacacgggtggcctagcctgtgttcaggctctccagcctcatcctccacctgttcagtgcttctgcaaccccacacccaattctagccccagctctacctcccacacacgacatgggacagtaccttcccctctctgcaccacagttcctcaggaggcctaagaacctagagattcaccctgaagacgagaccacataacctggattggaatcctggctctggagtcggttagttctgggaccatctaagttgattaaccctctgtgtgagtaaaatcgggtaaaacatctgctccaagggctgttacattaaataagatgatgagggtaaagctcttggctccacacctagcacattgttagcactctataaataaattacactcagtgcaattctcaggggagttcgtagttaagtttagcatctgcttttcttcctctttatgcatcttgaacgcctgtcccctggttctggtagagtgccaactcttgtcacccccctctttatttcctcatttacactaccttcttctgcaattaaaaaaaaaaaaaaaaaagccaaagtcaggagccaaccagagctagcaggaatcgtgacacagatgttgccaggcagaagcattcacaaaagcctccaaaacaggctccagtctggaatggcctaagcacacatagccagctttagaagcagtaactgaataaagggaaaactagacaaggattagacaaggggacatgcactctgaacactgagcccacctgggtctgtaaatcactgagtggtctgagctcagaggggtct

SEQ ID NO: 118283 - DNA, 1027 bp, Homo sapiens
tcccaaactcctggcctcaggcgttccaccagcctcagtctcccaaagcccaaagtgctaggattacaggcatgagccaccgcgcccagccttaaaagattttttcagactttttttcagtgtctttttacttaatgaaaacgagacagttgcagttaccctgtctaaaagggttttttcctctagagaagacggtgggctagatgtcagaacctggatttgtcctgtgcctctgacatcttgcgcacagctcagcctgtttccctttctggaaagtgagttaagaccacgtcaggaaattcgaggaactggcagatggggccacttcatgttcacatccatctgttaggtactggggagtcatttggggagcagcaggatctgttgctgattggttaggccattggtctagggagtcctgggggcccttcccatccagctccaggcaatgacgctttctcttcctccccacagaggatgtcacccccatcccctctgacagcactcgcaggaaggggggtcgccgtggtcgccgtctgtgaacaagattcctcaaaatattttctgttaataaattgccttcatgtaaactgtttcaactccagccttctctccttcatcaggggctactcaggcatttgatttcttcctcctatttggcttcttgggagaaaggagcctgaggagagctgagatcctggtgctgcatttggggtcttttccatgctacttgcggcattaagttgccttggtcatctaaagcagaccaaggcgttggagacctcgttttgagtggagatgctggttctaaatatggaccaattcttaaagagccagagtgggaactgttgatccaagtgtagcctgaagcgaaagaggagccttccagacccatgccatatataaacacacgtgggtgtgcattctccccccacaccttctgtgcaaagctgggagctcactccactgcgtcttgctttttttcacttggcagatcttggagattgttccacatcagtacataaag

SEQ ID NO: 118284 - DNA, 3569 bp, Homo sapiens
agtgcgggtccagccttttaaggcctcggccccgcaatacggccacggccacggccgcgtttgagctgcacagcgtagttgagggaacccgggacagacgtgggctcccgcctctacctcgccaaacttttttcttggtgatcgcaggcccacgcctaatctcgtttgtttcctcgtttgcaaaataggaataacaatagcaccgatcccatgggtttgtagtgatcattcaaagaaggaaagcagggaaaactctcgcactatgttggatgcttctaaatctgggcgattctttccgttgctgagtcgggcacgttgcaagttctgggcgctcagggcccagcaccaatgtttgctgtgcgcttgccctgcgtttatatactcctgatgaccactctgctcgttactttaggggatgttaggaacggagaaactgcaaattggcatttactgaatggccatcatgccgaaacatactcatgcttacgtatttgagatatgctggagcctttctatgcttctcgaggcagaactttgggcttctctcctgtggcgcgttccttacaatagttaacgcactgggtcgtgctcattggtctgatttgaagataggaacatttaacttcgtacacccaagacttacacttgaagtacttactgtggtcacacacttaactaaagtttatatagggaaggcagaggagagatctaggaacacctgagacagactagggtagttatttgtggtgtagaggcatcttggcaggaggcagagagtgctgggctgggagtcaggacacgttgtttctatgtttggttttgccactgtctttactgtgaccataggctgagacactctctatcttcaccatctgcaggatatcgattagtgttagtgtcttctgaaaatgttaaattgttctgaacaccaggaggttcagaaggcctggggctttaggccggaagcagtcttatcctagccttccactttctcattcattctcacccgccttcctcctgtcagtttctctctcccttagatcttgtgacagtatgattgcaattattatgaaggtcataataggttagagttatttagtctcaggacccatcagatttctgagatgggtcttttccattagcctgccttttggatatattttagtgcctttgatatttgatgttggtgacaaagatttagttctaaatagttgtgggagtcaaatcagttgcatttttgaacattttgaagggatcaggtggagcacaggaaaacaggagatgagaggcttgagggctgtgttggtaagggtcccttgaattctaagctgaggagttcatgcaggaatcaagcagctccctcgccccatgaagggtgttaggaatggtaccagtacatgggtagctgttggtcttgggtttcttcttgccttttggggtgcagccttcaggcatctgctgctagatccctaggcttctatcttgtaggtgctgtgagctgagctgttggtagtttctggggaaaggatacttctcatggtactttgccatgtggccacagttgatacccccccaagtgcaaggagaaagaagttttagtgaggcagaaatgagagaatacagtagagtattggatggaagaagacagggacatgaagcaggactagggtttcatttaatagccaggggaaagggattctggaaatgttttgtctgttaaccttgagtttcttttccttccactcagaaatggcacctcgaaaggggaaggaaaagaaggaagaacaggtcatcagcctcggacctcaggtggctgaaggagagaatgtatttggtgtctgccatatctttgcatccttcaatgacacttttgtccatgtcactgatctttctggcaagtgagtacctgggtggagaggcatccagctggcaaaaggctgaggaaggcaatggctgggacgggctagcagttcaggggattctctctaaagaaatgctgttttgtccaggtaagaaaatgtgcttgtccatttagcccacaaatattgtgatttcccaggggttacaagagaggagacacattcttcgtccttacagcgtgatggtcattgaatccttggtttcttgggaattatcttctttccctagttccctttgcaggagcagcagtggactgcaagtgggctctgggtgcgggttcgacggccatttagcaagttgtgacttgtgtgaaatcactcagattctgagttttggtttcctcatatgtaaaattaggacagtaatgtctaccttgtggagtaatggtaaggattaaatgcaaaagtagatatataaaatgttaatactgagtatagctatattgggccattcaaccccactggactgaactccatgagggcagagcccatgaccatcatcctccaccatgactgagctgtgttgctcttcactcattaggatatcgtaagcactccttgttggacgaggaagaaatgaccctgtgcttttgtccccagggaaaccatctgccgtgtgactggtgggatgaaggtaaaggcagaccgagatgaatcctcaccatatgctgctatgttggctgcccaggatgtggcccagaggtgcaaggagctgggtatcaccgccctacacatcaaactccgggccacaggaggaaataggtacgagtcgcagaggggatggctgggtggtagaaaacctgctgggcttgggtgctggagcacctggatttgaggtttgggttttttgttgtgaccttgaacaagatattttaggcatatacatacttaataattggctcctgtgtacaccccccagcagctcagtgttgagcacccactgtatactaggagctgtgtttcaggtactagaagagagtgatggggaaacagacatggtctctaccctccttgtgtgggaccgaggctggtgggagagtcagactttaaacaacagagcaccagggagtatgtggttttcatttgtgacaaatgccaggaagcacaagtaaggagttggtgataaagtgtaatttaaactagggtctaaatgataagtccggagtccttccagtgaaataaggacaggaggagggtattccagctagagacaactgcagggaaaggtcttgaggtgggggtgaacctgggcacctgtgaaggaaagagtggcatgaggtgcagtcagaggggaagaggtggagtcctgtaggagaggggaaggacctggatttgagtgatgggggcatgaaagctgaaatagatgactgttgcgtgaacaagccagacagtggtcagaacataacaacaaaccatagtggccccctcagcctaaaatatttactgtctggcttttttttttttcctcttttttgagacagggtctcactctcacccaggctggagtgcagtggcgctatctcagcttactgcagtctctggctttcaggctctagcagtcctcccacctcagcctcccgagtagctgggactgctagtagtagtgccaccacgcctggctaaattgtgtatttttgtagagatggggtt

SEQ ID NO: 118285 - DNA, 1103 bp, Homo sapiens
ctttctcggccaaggactcctatggggtgagactccctttctcaggttggtgctgcttagggcttcccagcggtcttagaggctcctgcaaatcagccttggggagcgtatgtgggagatgaagtgggggctctgcccagcccgagactgttgctcaggtcctttttcagagactaattctctgcagctttctggttgcttcctgcctcagagtgaggcaggaagcaaggccaacagggattttggctccagctcctttgtcctcactcagctcatcctccccctcccctactccaacttctggatcagcctcttttttgcctaaccagggaccttgaacttaatgttcactcccaggccgacttcccagtgtgagagcagcaactcagggctgggaatccagagactgccaagaactgaagggtgcttttccttccgggcgggcagatttggagaaagcctgccctgagatgggagagataggggtgggtctggaatgtgcaagcggcccacacctgcacatcaatttacaaagaagctccacggtgatccagtgatcctgttggttcatccccaaccaccccggttagagatgggttagcttgttatcatcccaattgaacagaagaggaaacaggctcagggggatttagtgacctgttcatgactatgtagacatttaggggcaaaagcaaatgtttacccaattctgcaaagattgtataataatactttttttttttgtggagtcttgcactattgcccaggctggagtgcagtggcgcgatctcgactaatcctgccgccacgcctggctaatttttgtatttttagtagagacggggtttcatcatgttggccaggctggtctcgaactcctgacctcaggtgattcacccgcctcggcctcccaaagtgctgggattacaagtgtgagccactgtgcccagccataatactattattattgcaaatattttctaagttctgactgtgccaaaagctttcctcttattacctcgtttaatcctctcaacaactctaagaagtagtgatccctattttacagatgagggaactaactgaggctcagagaagcaaat

SEQ ID NO: 118286 - DNA, 1057 bp, Homo sapiens
atgtcactcacgaggaatgccccctccccctcccctgctcccgaacaggggaaacttttgtctagcgagggagggggttagaggccgggtcctggcttcgcgaaggctgaggcagccggaccggttttctgcgggctctgagcggcctgctgtctaactcccctcctccctcagggtctcgggagcaagaagttctccctttgcacgcagctctttaacgccctgggacaggggtgaggagggggcgccggtgggacgggtgggctctaggaccggccgggaatctggggactggccacttggctttttgcagattcgagcagcccggtgtgccctgcgaggctaagggaatacagagccccaccccctgaacgcccattgttgccctccccacccaggagagctttcagaatggcctgcgggcagttttgcccccaggtctcttcagagcgacctggctgtttgtcagtttccagcggtgtgaccttgagtgggttccttaccttcccctagcctcagtttcttcacctgtaaaatggggagaatggtatttgctagaatgaggatgagaggagtgtgtggtatttcagtaaatggtgtcatgcttatattcaacaagtacatttcacgtttactgtgtgttagggcgctggactaattcattgctttacatacattctctcatttaattctcccgcattactattaaccacattttacggaggggcaaactgaggcgcagggttgtaaaggtcacacagatagaaagtggtggagcttggattttacctccctctctcagcctgtgtctcagccacagatctctagagtgtcttgctgtgacagctcacagtttatttctccttttttttttttttttttttttacaactttggccctgtacagtttcattttcaattgaaattatggggacatctgtcctcttccccattttccccaccggcaggtaatgctctcttctgcctggtacttgttccaagtgaggtcttgtgccctggctcttgttagcatgggcagctggagcaggagggaggtc

SEQ ID NO: 118287 - DNA, 2241 bp, Homo sapiens
tgctggtcccctatccctgccccattttcagatgaggaaatagaggctcagaggggtggagtcacttatagagctggaatttgaacccaggcctgaactatttctgccttactgtgttgcttctcaggggtcttttgaccaaagatgggagcaagactggcagagttaagaccaggccagagattgcgctcatcatggtcctgcagaaagctgaccacaggctgactcaggcagcggactgacagggaaggagggggaagctgcaggactttgtagctgtcttggcatttggggtcgtcacaggtggttttaaggtttggggaataacccttaaggggcaatattactgctttcaaatccctgaaaggccctctacaggtagggggcatagtcttgtccttcagggttcctgaggatggagaaagcaacaagggtgacagctccaaggaagctagtccggaagtaagctgcccagaaagaaggcgagaacagcatggctgaaggtatgcaaagagcctgagagctgcagaggcggcaggaggatgcatcagcaggggcaggcctgggtggccactctcagttcccttttcacccaagaatctcagcatttggatggtgcctggcccacctccaccctctgttttctcatagctttggagctgcccttcctgcacgtcctggggagttccatatggcctggcctgcagagctccactgggagagtccttgccgtttggaatacactcagcccagctgactgtcaaggggccccttggggatgtctggagcagtggccagagctgggctaaggactgtactttcacagaggatttgaaccctctgcttccatttctcatctgtgaaatggggtcagtctctttttcctcacctgtgaagaaataaggctaaatcatgaatcaggctgaatcagtagggcttagggcaaaagggctggtgagtttgtggatttgaaagtgaagacgcaggcgggggttgttcccctccttccctgcagtggaggttaaaggaggctctcttggtttctgggggtcaccagcaaagttgctttctctgtctgtggggctcttacaaagctctgcctcacagcttctgtcttggaggtgtggagctcagtggaagaggtggatgtttgggggcagcggtcctggaccctgcggcctcagggctaaagccaatttgccatcaaaatccttatctagatggaggagagtttgtgctaagttgcctcctggcccttttatttctactcaccttgtttcttgaatacagattggattaatctaattttaaaatgtgcatgacgaatgagcatttgtttatttgagggcaatgtatgggaagtgcctgctgtgtgactgcagggccccctctcccactccccctcaactctcaagcagaactggcctctttccctctctctggctgtgctcctggcccctcctacctctacaaatctgctcatggtgaaaatgctgcactccagtcacttccccttgctcaccctaaaatcctccctaccagtacacagctccagggtcacctcttccatgtagccatccctaattctccagagctggcattgcctgctccctcctttacatgtgtagaacctgttacctggacctctcatgggcccttcagctcttagctttgaactctagcttcctaaagacaagtcttatctcctctaggctctgtactctggaggcaggggctgcacatgaccgctttccaatgggggtgggcagtgttgtagagtggaatcaaaagtcctgggttcaaatcaccattctgctactactagctgcatgatctagggtaaattacctaaatttccctggacatcagtttcctcaacttcacaatggggataataatagttctgttttgttagggaggttaaggaaatcagtgctttgacatagtaagtgtgcagtaagtagaagctgttcaaagataacagttgttataattattgtttgtagctagaggggatctgtccttttagagatgagagaaagaatccctggaatttgagtttctgaactttctgcctaatggcctgagatggcatgtgcagatgaggaaactgaggcctggagagatagagcaatttgcatggtatgtgggaacatctggtttcatctaggaagctggacaggatttcttttctttgttatgcctctgtttttcttcttccttcctgtcatcaagcctaag

SEQ ID NO: 118288 - DNA, 1049 bp, Homo sapiens
aggtgctggagggcaaatccaatgggtagatgggccaggagaggctgacttcaactcagtgtaatgaggagacttaaaaaaaaaattagagcaagccaagatggaagggattgtgtctgcagggagcgagctccctgtttctggaggtggaagcagaatcctggagctcatgtgatgaagaagtggtggggatggcctcgttcagacctgaggtctggctccacgagggagggcttggatttttatcatcctaggctgtccaagggatcggcctgtctgggcaggtcccagggtggcattaggtggaggtttgctatagtcatcgctgcacggcagccacctctggtttacaccaccagccttgcaagtatgacctgcccaggcagaggccagatgaggagaaatgagtgttgtcatagcagggcctttactcatgctgcatcctctgcctgcattcattccctccccctctccttatgcccgggcaactcctgctaatgcttctgtgagtgtaagcaccatctattcatggaagctcttcctgatccacctgcaggctaagtcagtggttctgaaagttgggttctggatcagtagcgtcagcgttacctgggaacttgttagaagtgcagattatctagctctatactggacctgctgaattagatatcctggagggtgggattcagcaatctgttttaagaaccttcccgctgattctaatgcatgctgaatttttttttttttttttttttttttttttgaggcaaagttttgttcttgctgcccaggctggagtgcaatggtgtgatctcggctcactgcaacctctgcctcccaggttcaagtgattctcccatctcagcctcccaagtagctgggattacagatgcctgccaccatgcccagctaatttttgtatttttaatagagacagggttccaccatgttggccaggctggtctcgaactcctgacctcaggtgatctgcccacctcgacctcccaaagtgctgggattgcaggcatgagccaccgcacctggccgcg

SEQ ID NO: 118289 - DNA, 1052 bp, Homo sapiens
gtgtccccaagctgctgcccaggagcccaagggtgggcagtctttgtctgacacaggaaccccttcacttcacatttaggggattgaggcctagtggagcagggactcacccacggccacacagggggtcagaattactgttgaggccagaatccagaattgtttcagttccaaccaggaaggggtttgtttcccaaaacctgtccctaccccaccccttctttggcaggcggagtagctgtcgccctcagggtggcccagagcagtgctgggggtagagatgaaggtgccttgtgaagacactgccaagaaggggtggggcaacttccaagaggaagagcaccaagaagcccaaaccccagacggaaaccaaatgtattttctgggccctgagaggatatttggaacaatggaggtgggatgagggaagttaaaaagggcttcttgatatccttagaaaaaaaaaatacaggctttaagtttgacttttgtttctctgaaggatgtttgtgtaactttctgaaggcaggatcccagcactctgtgaagcttgtcagatgctgtttttttgtttttttaaatttttatatttttttgagacagagtctgctctgttgcccaggctggagtgcagtggcgcgatcttggctcactgcagcctccatctcccgggttcaagcgattctcctgcctcggcctcccgaatagctgggattactggtgtgtgccaccatacccagctaaattttttttgtatttttagtagagacggggtttcaccatattgaccaggctggtctcgaactcctgacctcaggtgatctgcctgctttggcctcccaaagtgctgggattgcaggcatgagctaccacgcctggccattaggtgctgtttttatagattcagggctttggagctgggaaggactcgatcaagtagtctcctcactttatagttggtgaaatggaggctgagaggtggggggcctgcttgaggtcacacagtgaggcagccgaggtcttggatcttcctatgtgttgcaagaggctgt

SEQ ID NO: 118290 - DNA, 2022 bp, Homo sapiens
gtaggggctgtgtaagcctaaagttgtgtgttcagatgagggagacaatagtccctcattcagtatatttgtattaaacatctactttggtccaggctcttttctagaactgggatgcagcagtgaacaaaacacatggagaccctgttttggacgtggggctgacatttgagtggtgggatgaaatgaacagcccaacaagctcactgtcaggtggtgagatgtgcctggaagaaaaataaaactggcttgtgggtcaagagtgtgatttgggggagtgacccagccatgtcaggtggtcaggatggtccctggtgaggggcagtagactccgggagggtggcccacgggaaattgagggaagaattttccaggcagagggagctgcagggcaaaggcgctggaactggagggcatgggtggccagaggcagggctgaaagaatgagaggatggtggaggagaggggccagagggcatgtggagacaggtagggcctcttggccatggggaggactttgttgtttgagtctgagtggaggggaagctgctggcgggcccgatgtgaggactgactggtttgggtacacattttagagagactgctgggggtgagggtggacgcaggatgactagctgggaggctgctgcagtcttgccacgagagaggttgggcgagtcagtggtgggtggggacggcgggggagcaaccaggggttggttctggatttattttgcaggatgagctgatgggatttgctgatggattagatgtggggtgtgagaatagagtgttgaccgcaaggtttctggcttgaggaactggaaggacagttggacagtattgctatttaccaagacagagaaggctgtgggacaagcaggtttgggaagagcaattaagatttggggtcagctgtgctggggtggggcctatgctggtgggggaggggcatggtgcacatgggtgctgggtcctgcatgttcctgttgctgtcaggaacagcaacaggggttgtgtgaggggccccaatgctaggagtctgttctgtgagaacaaatgtttcctggtcccttcatgtccttttctctctctgcaaacctccctctgcttttctcttccttttggacgaggaaaaaggcagattctgaagcctcattgtcactgtgatggtcctagcctttctgcctggcatgcctcctgacagggagttccttctggggtaggcaaggttgggggcggaagggtggggtggaggttcaggccttatcctggctctgctaccaacagagctctttgccttggtttcccctcctgtatggagaagggttgaggtggccccagggttctgagggtggcagggagcatttgaggaggccacatggcacagtggttaagaatctgggcttggggtcaggcaggcatgggcatgaatccttgcctgctgcttggctgtgagactgtggacgagtaacataacctctctgagcctcaattttctcatctgtagaaatgggccagtgatagtacctgcctcacagggttactgtgaggttgaatgaggaaatgtccataaagcacttagtgccaggtgcagtgactcgtgcctgtaatcccagcactttgggaggctgaggctggtggatcacctgaggtcaggagttcgagaccagcctgaccaatatggagaaaccccgtctctactaaaaatacaaaattagccagacacggtggcacacacctataatcccagctactcaggaggctggggcaggagaatcatttgtacctgggaggtggaggttgcttgtggtgagccgagattgtgccattgcactccagcctgggcaacaagagtgaaattctgtctcaaaaaaataaacaaacaaaaaaataaagcacttagcaaggccctggcatatagcacacctagtaaaccaaggcctctgctcacagtgacccatgcaggcaggcaggtaaggggcttggcctagtgagtgggaggaaccgtgggaggttatt

SEQ ID NO: 118291 - DNA, 1100 bp, Homo sapiens
gtgaaatgcagagtacaacacctggtaccaagtaaactctcagaaatggtcatcattgtcccaaaggcccatcagttggttgaactggaaagtcgtgagcatggaggagtagacccaagcttggactgggaggcagaggatgtgggctccaagttcatctcaaacattgtgttcctgtgtgcgtgttgggaagccacttatcctctggaaaccccactttccttttctgagaaagggggaagaaatccctgctatactttaataaagttggcatgtgataccgcagcaatgcctgtgaaaatgctttgcatctgtgtaatgatttaaaaatggcacagcggtggctgtggtgtgctgatggcgatgagggcattgtaaccacagtggtgggcagctggccgggctggaggctggttcatctgtggaatgcttagtgcccacacggacttccccatccctgcctacctgctcccggctgtccaccagcctgccttcacattagccccggcattatatgctagaaaatgtgggaggtgcaaagagctgatggcatttccccagccctggtgggttttctgttatctgtggctgatgccatggaatgtggggattaagaaccagacagatgctggttcgaatctcagctaagcacttcccaacagggaccttaagcaagttgcttaatctctgtggacctcaggctccatatttgtaaaatgaggccatgatcaagtagaggccaagcatttaacaaagagcccagaacataatggcatcaggtggttgtataatgtgtattctgcctggaacgtggtcactgacaacgtggtgactgacaggttatcgatggcaggaagctggggccactgtgcccatttcggggatttgctgcagaggtcggttatgctccctacagaataacccagcttagatttaggagggtctatggaatcatatggcatgattcaattttttaaattaactcgttttttaaaattttattttttttagagatggggtcttgctgtatctcccaggctgcagtgccatagtgcagttgtagctcactgcggccttgaatgcccgggcttccagcaatc

SEQ ID NO: 118292 - DNA, 1048 bp, Homo sapiens
ctcactgtaatctccgcctcccaggttcaagcgattctcctgcctcagcctctggagttgctgggattacaggcatgtgccacacacctggctaattttgtattgttagtagagatggggtttcaccgtgttagccaggatggtctcgatctcaggaccttgtgatctacccgcctcagcctcccaaagtgctgggattacaggcaggggccactgccccgagccgccatccccctttcttatattggggtgtctgatgggggcgtgaggaccctctggctgaagtcctgccttgctgggttccatggtgcacctctctgcagtgcaggctttcccaggaggctgaagctcagctagagaagctgggtcagcagccctgggcctggtcacctccaggaagcctctctcctgggctgcagacctggcttgggagtggtgtggaaagtaggactgcagaagggtaacgaacaggggctgtggggtgggctgggaggggcatcctagctccacctctgcccagctgtgtgacttcgagcggttgcttaccctctctgagcctccatttccttgtctgtaaagtgctcatagcagtgacacctctttcagggtgttaggattgagcgtgatggagcaggtaaggctcctggcacagccccacatgttcgcaggagcttaacgttggccgccagtaagggaggttatgatatgtgttgggatatgctgctttgttccttttgagtgtctgtgatctgagcctaaggaaaaaatagttctggatggatttgactctgtcataggcagatttggggatagggtgggcagagagccccattttgggaagatttgtggccactgcataacattctgtgtgatggacctgacagccttggtgtgcgtgaagagcctcagtgggactgtcaggactgtcccgtccttgggacgggagggtggcaggtgacctgccgtgttccccacacagccccacccccaggctgtctggtatgtttgctcggtaagccctttttttcagagctggtacaaaggtaaa

SEQ ID NO: 118293 - DNA, 1049 bp, Homo sapiens
gggacagggttttaatggacaagaaaatggaccaaggtaaatgagagtggggcacaccagacggcacaagccaggaggtcctttcctctctctgggtctcagtgtccccaggggcttactgcagggtagactgtgctctctgtggccctgcgactctgagccagacctccaacagtctctttcccggtggtggtggtcctggactctggggtgactgacaggcggcagcttggctcctggccaggcagcactgtgggggtgatgggggatggggcatgtagcagattccagcagaggaagggatttgcttctggtctcggcctcccagggatgtaatcacgctggagaaactcccgcacagctgggaagcaaatgtggaggattttccttgctgagctggatgtggtgggtggggcaggctgtggtagggtggctggtggagctgggaagctgtggggtgtggctgggtgggggtgatgatgtgactgtgctgggggtgtgactggctgggaggggctggatcagctatggggagtggccctgggtgcatgtggggctacctgttccccaggcctgcagccactgctacgccctcccctgctcaggtccctgcccaagtccaggtacccacccattcacatccttctgaggttgctggcagagctctttctgcactgacctcctctcagcccccaccccatgtgcatgtggcccagatgcctatgatgatgccatttgagcctgtcatgtgcatgtgaatgtggtgtgtgtgttgggggggcagggagcagtgtgtggtccacagagggcattgtcaagagtgacctaggctggaaataaaatgtgggctgggtgagcattcaaggccctgggcaccttcccccattcactgcagccatgtcgtaccagagacataaaaccttgggttccagagacctctagaaacccttgtggaaaggtcatggtcgccactgcattttcagtgcctagtggcatgcttggcacctagtggtgctcagtaaatacaggatgaggaaacaggtcgtttg

SEQ ID NO: 118294 - DNA, 1092 bp, Homo sapiens
ttcatattatttattgtctgccccattttacaagtagggaaactggggctcagagatattaaagagcttgctccaaatcatgcaaccttggttcggcagccgtacttgcatttgggcattcctaggtcagctcctgtgtgtccacagttagctgaaccctgaagcccgcactctgacgctcctgttctctccactctccacagccttagccccgtgggccccacggagtgagcggcatgcagcacccccgggcctgtccagtgtcctctggcctgctgccctgcacccccagaaggccctgacgccctggggcacttctgctctgcacaggaccacgcgggggtttgccatggtgacataaaggggcgcggaggaaggaaggagcgtgaccagcctgtggactgcgcccctggctgggaggaaggactgggggcccagatcctccactcccagtgccccacaagggcgtcgcttcctaagtctctgtgaatttgttggtcagtggacgattctcgtgtctcctcctgtgtggggccttggggtagccagggcaggccgggcctccggtggccaaggtctcggaggccaggatgcctgccctggcatgcctccggaggctgtgtcggcacgtgtccccgcaggctgtccttttcctgctgttcatcttctgcctgttcagcgttttcatctcggcctactacctatatggctggaagcgaggcctggagccctcggcggatgcccccgagcctgactgcggggacccgccgcctgtggcccccagtcgcctgctgccactcaagcctgtgcaggcagccaccccttcccgcacagacccgttggtgctggtctttgtggagagcctctactcgcaactgggccaggaggtggtggccatcctggagtccagccgcttcaaataccgcacagagattgcgccgggcaagggtgacatgcccacgctcactgacaagggccgtggccgcttcgccctcatcatctatgagaacatcctcaagtatgtcaacctggacgcctggaaccgggagctgctggacaagtactgtgtggcctacggcgtgggcatcattg

SEQ ID NO: 118295 - DNA, 1011 bp, Homo sapiens
cttggttttgagcagaggcctgtgattttctgctcaaatgcatgccctctggtggtcaaggcacatctttccactctttctgcaagaccaacttccccgctgtgtgctgggcttgccaagtggggattgtctgtgggctccagggatctgaaaactcattttccagttcccactgatgctggattcccagggcagtgtgagagcagggacttaaaagtccagacaggttcaaatctctctgtcatttagaaacagagtgacttgggtaaaatgctcaactcatctgcaaagtggggctaattacagctgctgcctcactggtctgtgttgaaaacaagacagtgggtggggagcactgagcccattgcctggtaccggagccactcaatagatggtagctatcgtgctttgtcatctccaggttcagtaaacagcagtggtagcactgtgtccgtcttgtggccctgaccaatgtgtgcccctgtgagatcctggagggtggtgggaatagggtcatcctcatctggatccctacttcctggcactgtcgtgcctcaaccttgaaattccaggtgacctggggctaaacacaccctggcaggggtctggcaaggagtacctgacctctttcattgagcacttactgtgtcccagtcactgagctcggtgctttgcaggcatttcatggctaattctcacagctatcctgtgaagtaggcactttattttcagataaggacctgaggttcaaaaagttaaatggcttgtcccgaatgacatagctacaggttgagtgtcccttgtctgaaatgctggggaccgtaagtgtctcagattttggaatgcttgcattctacttaccagttgagcatccctagtctgaaaatctgaaatccagaatgctgcaataagcatttcctttgagcatgacctttagaggtcacattggtgctcaaaaagttttggattttggagcattttggattttcagattagagatgctcaacctgt

SEQ ID NO: 118296 - DNA, 1147 bp, Homo sapiens
tgaggctgcagtgagccatgactgtgcatggcattccagcctgggccacagagcaagaccctgtctcaaaaaaaaaaaaaaaaaaaaaaagtttttactaaacaaaactgtgtaaaagtactttgcagaccacaagattttacacacatgtgaactgtcattgtgagaaacagcctacaaattaagaccattaaacaatctttaaaatacagttttcatctactcactattttatttaaacttattcgcaaaggagatggcatcctagtgtaaataggaaatccggatcagttgccataaatagagggcaaccataacaataaatccaatgaaaacaaaacagggggattaaattctagagacattctgctgcctgctgacagcctgtcctctcttataggagattagcaagtgttagaaacatattagcaccaaacccaggcttgtctttgatgttagcaggaggctttaaaaagagacttgtaagaggaattctgaaatctctggtaggggttggccctggggcctggaaggagggtcctggtggcattcatcgccctgccttggtcaggagtgaactttgctcttccttacacctctagagaagagcagaatggatgacattcgggagcaggcactgtctggggagttaagacctaatttgaatcgagtcctaatttgaccctaatgaactaggtgacttgggcaggtcccctcccatgcctgagcctcagctataaaatgatgaaatggggtgaatgggaagttttcaggctatttcctggtgcccaggggtctcccataggtgcctggatagctggggtgggggttagggggatgttttggtgccaggctcagccctccaggctccaccttagttgctccagcggtgctgctttgcgctgcttttacgcattgtgtttcctcctgaaattccattctcttaaaggctctcctgtttaaagaacgttttagccttccagtctaagtcttcatgcagtgccaccacctgcctctggcaaggtagattgctctgtgttctactcgaggtgttcttccagtggcccaagctcattttctcctgcaggaacccaggttcttgctgtctgtccagtgagttctggagagactgtggtccagggtcagg

SEQ ID NO: 118297 - DNA, 1086 bp, Homo sapiens
gacacacagaacgaactacgcgcacacatcccaaacttcaccttcaacctgggctactcagggaaattcttccacacaggtaagtgggcctgcccctgccctcactagcaacttccaggactcctcagcacccaaaccctcaaagcacccatccatgagggcagcgggtgggtttactggcccacattagaggcagaggtgacccctctgcccccgtggagccaacagcctacaagagcagtcacaacccaggcagaggccatctggggacaacagcagcggcagcaacagcagccgcttgtccctccctgtcctttcgggctgagctggcctgggtggggcatcttctccctcttgcctctccctcctatcttttacaattatgtgtattatttctgcttataaaagaagctggttgagttttaagaacattacagaaacatgtagcatagaaagtgaagatgccctgtaattgtacccaccttggatgaccagtgtcatgggtttattttagagtcctaagggttgagggtgagggctataggttgcttggtgcgcactttccttcctctttggggctctctcacttgctgtcctctcttcatctgctgtccttcagggactgggcagaacccctcagctggtcatctgcagtgaccattccccctagctgccttctgcccaggcctcagtgagacaacctctcttgaattctaagaaaaccatttattcaataattcagcagatggaggggtatatgcaacatagccccaaagccaaataggagtgatcctgggttgtctgtctgtattttttatattctttttaaaattttttatatatttttggctgggcgctgtggctcacgcctgtaatcccagcactttgggagggtgaggtgggcatattatttgaggtcaggagttcaggactaccttggtcaacatggcaaaaccccatctctacaaaaaatagaaaaaatagcccggcgtggtggtgtgctcctgtagtatcagctacttgggaggctaagtcaggaggattgcttgatcccaggagttcaaggctgcagtgagctatgatcgc

SEQ ID NO: 118298 - DNA, 3017 bp, Homo sapiens
cccagctctgccagttgcccacactgagattctgggcacattccttgccctcccaggcctcagcttcccatcttaccatgaagtctcagaccagcagccatgccgacctaacctctgatttctctctcccattctacaaaggggggataaggcccaaaggggaaggacccctatgctcaccctggcctggtcatcctctccctaggagcatggcattcccacagacatggggtatgcagtggcgccccaccactcgggcgtgtaccccgtgcacgtgcagctgtacgaggcttggaagcaggtgtggagcatccgcgtgaccagcacggaggagtacccccacctgaagccagcccgctaccgccgtggcttcatccacaatggcatcatggtgagtgggcccctggaagcccaggaggtgggagaatggagagcacagtctgtcatgtgtgtgcatacgctgtcctggtaagcacggctctggtttgctggcttaggggttgcagatcagcttctgctgcctcctctggcacccgaggctctctgccccagggaaggtgggctgccactccgacccctttcatgagctctttcttagcttttgtgacagaggatcaagcaataatcagcattcttgaaagaggtttctgatgaggatgtgggacagggctctgttacagtctttttgctgattaaaaatttttttcttggctgggcctgatggctcacacctgtaatcctagcactttgggaggccaaggcaggcagattgcttgagcctaggagtttcataccagcctgggcaatgtagtgaaaccccatctctactaaaaaagtactaaaaaaaaaatatgcctggtgattagccaggtgtggtggtgcatgcctgtagtcccagctacttgcagggctgaggcaggaggatcacttgaacctgggagatcgaggctgcagtgagccaagattgcgccactgcactccagcctaggtgacaaagtgagactctgtctcaaaaaaaaaaaaaatttttttttcccctggggcttctaccatgcatctatccctttttttttctttctttcttcttttttgagacagagtttcactcttatctaggctggagtgcaatggcacaatctcagctcactgcaacctctgcctcctgggttcaagcaattctcctgcttcagcctcccgagtagctgggaagacaggcatacaccaccatgcctggataattttgtatttttagttgagacagggtttctccatgttggtcaggctggtctcgaactcccaacctcaggggatctgcccaccttggcctcccaaagtgccaggaattacaggcgtgagccactgtgcccagcctcacatctatccctttccttggcactggggacacagaaatgcacagaacggaggaaagttcctgcccttgtagacctgacattctagtggcaggagacagaccatatgctcatgcatgtgtgttgtgggaagtcagggaccccgaacagagggactggctgaagccatggcagaagaacataaattgtgaagatttcatggacatttatcgcttccccaatcaatactcttgtgatttcctatgcctgtctttactttaatctcttaatcccgtcatcttcataagctgaggatgaatgtcgtctcaggaccctgtgatgattgtgttaactgcacaaattgtttaaacaatatgaaatctgggaaccttgaaaaaagaacaggataacagcgatgttcagggaacaagggagataaccttaaagtctggctgcctgtgggccaggtggaacagagccatatttctcttctttcaaaagcaaataggagaaatatcgctgaattctttttctcagcaagaaacatccctaagaagagaatgcgttcccaagaggaggtctctgaaatggccgctttgggaacgtttgtcttttacagttgttgataagggatgaaataagccccggtctcccatagcgctcccaggcttattaggacaaggaagttcccacctaacaaattttggtcagactggttgtctgctctcaaaccctgtctgctgataagatgttatcaatgacaatgtgtgcccgaaacttcattagcaattttaatttcgccccgtcctgtgatctcgccctgcctccatttgctttgtgatattttattacattgggaagcatgtgatctctgtgacccacaccctattcgtacgctccctcccctttcgaaaatcactaataaaaacttgctggttttgtgacttgggggtcatcacaggacctgccaacatgtgacatctcccctggacacccagctttaaaatttctctcttctgtactctttccctttatttctcagactgacagacacttagggaaaatagaaaaggacccatgctgaatatcgggggttggtttcccccaatacatgtgtaaaatatacagtggtcagatggtgatgagtgccacggacaaagttaagcagggaatggaaggaaggaatgctggcaagagaagctggtttaaataaggtggctaggtgggccttcctggaataagccacgctgccacatgaggaagagcactcaaggcagagaacacaagtgcaaaggccctgaagcgggctgtgctggctgtgtttgaaggccaaataggaggccgggatggctggaggggagtgagggatggtggtagatgaggtcggggtgggtgatggaccagatcgatagggccatgtaaggccagccattggatggccatgggcttttaggctgagatgggaaggttttgaatggagcatgatctgactcatctttgaaagggatttctatcattctggctgttgtgtggagcagagactgtaggggacaaaagtggcagcagggagaccagttaggaggcactgcagtcttccagaccagaggtggcagcagcttggaccagggcccaatgttgggatgtggccatactctgggcttagaatag

SEQ ID NO: 118299 - DNA, 1071 bp, Homo sapiens
ccctctacctgttcctgggcatgcaccctgacctaagcagcaactaccccagctctgagacctttgaggagatccagttttttaatggccacaactatcacaaaggcatcgactggtgagttggcctttctgtccacagcgggacgggaaggccatcctggggcctcccaggagtctgctgtggccacagcaggaagcagctggagcttgctcacacacagctgtcattcctgtaaacagggacaaagtgcagtgacccttgaatcatggtgtgacagcgttgtcatagacaggacactcgatgaggaggccctttgcccctttgctctaccgcctgtagtcagacgctgaggtcgaagtccacccctcccttgcttgcagagaaacatcctgagtcttggggaggagaagggtttgcccagggtcccaaggtcggaaatccaaatgttctggctctcctcactgcgtgtggctgactgtgaagcagaggtgttcttgtgggcccttcagggacaggtcgctggtctttgggcgtcacttggggaagtcattaagattgccacttcccaccagagcctgcagaggttacctttgtagaggttcccagcagagggtcctagtagaggttcccttaagggtgtgggggccagagcagagatggttttactctccaccttttcagttggcatctttctctatttgccttttttctttctttttaaaaaatgtttcatgtcaggtaggtaatgtgctgagatcataacaaggttcgaggtgggtacacctcacacgtgtgtgaacacccaatcatcacgtgcatggactgcaaagtttgcctttttaaaccttgtccatgtattaccattatttattatttttatgtcagtgggttccctgggtggagaggttatgggccttctgtctttcttttttttttttttgagatggaatctcgctctgtcacccaggctgcagtgcagtggcgcgatctcggcttactgcaacctctgcttcccgggttcaagtgattctcctgcttcagcctcccaagtagctgggactacaggtgcc

SEQ ID NO: 118300 - DNA, 1504 bp, Homo sapiens
ttttttttgagacagagtcttgctctgtagcccaggctggagtgcagtggcctgatctcaactcactgcaacatccgccttccagtttgaagtgattctcctgcctcagcctcccaagtagctggtattacaggtgtgcaccaccacgccaggctaatttttgtatttttagtagagacagggtttcaccatgttggccaggctggtctcaaactcctgacctcgtgatcttcccgcctcggcctctcaaagtgctggcattacaggcatgagccactgcgcccagctgaaccagagctctctttaatgcctatggcctgacttaatttcctgcctgccagcccactgagcctgcaggaatgcttttaggccttccctggtggggtaggcggagtccctcccctggctgccagcattcctgtgattatgccacacagccaagcactgtgattcagaagtggcgccccagcagaaagccaccctgttgtccaggccgaggtcctgagcatcctcgttaacccagcagaccaggcctgtgcttggtgttggggagggggtggggccctgggtcttagcccatggttgccagagaagtgtcccctgtcctggctgggacagcctcttcaggcctggccactgtcatagttcccaccctgctttgaggctcttttctcagatgtgacagtggctgtctcccgcctgggaccttgcggtctcccgcagggctggcacctgcctcctctttgctcccatggaagtctctcctcctgccactctctgaggctggtgaggaagccccttcttactcttgttctctagggcttctgtttatgccctgatgtctgctttcctgtggctttttctttaggagaagaaaaccgagaaacacttgtcaagtgtttctgttttctgccgtgctgtgtgcccccgcctcctggcgctgtgcagggaatgggcagtctgctttcatgggggaacgtagggtagagagagagccgccacaggttgggtcagtccctgttctgcactgacactgctgtacatctgcaccttactggagagtcacagctggtttctagaaggcagaggaggggtttcacgtttgtgtccccttctcaaagattagaaaaccaagtttcagcaagtttcatgtggtggcatttgaatccaagtcttctaaatctaagaccctattcctttttctgtccatgatcaagaggggtaagggatagaaggagaagggagactcattctccccaggaggacctgggaagatgttggaggagaggaagggtgggggcctgtctcagaaggaggtcgggacgaggaggacgctgctgtgcaccatattgccccagccctgggctgtgtgtgatcctcaggggagggggttggcggctgggggatagtgcctgtcgcacaggtgcctgagctctggctttctggacttagtgaattctgcagattcggacctcccatggcattattttaagtgattcagacc

SEQ ID NO: 118301 - DNA, 1066 bp, Homo sapiens
attgtcagcttagagggtccctgtgtgggtgcaataagaagattcacagaaaatacttagcacggtgcctgacacgtgaagggtctcgaaaaggaagggctgttatcgttgttgctggtaatgacaataaagaagtgggaagggggcttctaaggagaagaggctggtgcagcatagacttgctgctatacctccccgtcctcagcccagtcctggtctaagaagggactggggccttctctgcaatccagggaattagctccttttctgcccccctcccagcccctacctctaattccaaggctgtcttctgagcctcagggttagagggggtggggaacagatgaggcaaaggtgccaggcctgggatgggggcactaatggtgtctgggccggaaggtctggtaggtgggggaggggtgtctggaggacatggcccgcagccctgactcccggaggcagccagagtggaagtgggggtgggtcttggcaaagctgaaaaggctgggatttgacttggaaacacattgagaagtccctggcggctgcctcctcagtaacagcccctctgaagctgagcccgggacggggaggctgttttgtataaaggggctctggggacctcagtgatggagaatggactgaaacctctcccccagaactgcagcatgcgcagctgagcccccagcacttcctgcaggcctgccccaggggctgcagaattccagccatcaagcctgtgtggacaagggacggggcaggggaggaagggaccctggagttcacagatgggaaagggcagaagcgccgtctcagatagccccaagccctggtctcttggccttcgccttcctgttttttgtcacaactgcattgaacctgtgatgttacttacgtaacagttttctttaaattgattcactttttaaaacctgaatacagttatttcaaagggaatttgatattgctactgtaaagggaagatagtaacactcaccgtacatagtaaccatgtaaataaaatacaataaaaacaaaacaatgttgttaaattttacctagagcc

SEQ ID NO: 118302 - DNA, 1016 bp, Homo sapiens
tcctgtgtcgctgggggctttttcttcaggttttgaaatgctacagaagtcagtactctgatgtgtgtgtttgtcaagcagaatatgggctgtatttattcatcctttagcccaagcccttaaaaatatagacggctaatgtcttcagtatgtatgaaatatcccatatgctcggaaacaaaaggggctctgttattaaagtttcatttccacacgccccctcccctccctcccgcccgcccccctgacaccctgccctcctcccatcccgctcagcctgctccagacagagcgcgagtgaggagcaggcgggcaggcggcgggcagccgggcagccgtggacagaggcccgggcacagccagttgctgtgccagagggtgtggtgtccggctacaggtgagggggcgaccacagggaaagagaacagggccttccaggggagagggggcctcggggtccctgggatggccagtggaggagtgggggtggaggtggcccttcttgcgggtgcctgtagggccagggccctggcagggcctggctgtctgggacggaaatgccagctctcctgttaactgaaaccacatgtgtctcccaggcagcggggcagagacgccgccaagcctggggcttggggctgggggagaaaagatgcagctggccccaccatgtgccccagggtgggtgaggggctgtgcaggagggctcggggtcatttgcatccgtacaagtgagagtgtgtcagagtgtgagtgaatgagttctgtgcgtgtgcttgttgtatgaatgagcgtgtgtgcacacgcgagagcctgtctgcaggtcggtggggtattcctgcttgcagggctgaagtggcctcctgtggcctaagtcctgggcacactcctacctgtcacccagagcttgggagcctgctggctgccccctgggagggtcctctggggtgagaggacactcacctgagtagggggtggtcctcactgtgcagagactcccttgtgaccaccatcct

SEQ ID NO: 118303 - DNA, 1078 bp, Homo sapiens
tatctacacatgatgtatagatgccatgttctcatgcaaaccatcacacatatgcactcacacaactgcacacacatggaggccctcagacacacatccatgcatggggtacacactggcacataccttcctgaaggccccctcacccatgcacagctgccacatgtgaacacgtctcagatttgcttacagagctgcagttgcatctgaaaacatataagcagacataggcacactttctcacacaaacacacatattccctctcatagatacaggtgaaaagcatgttcttttctccatttccttttgctacacacctacactttgaaatctttcacacattctctcctacagacctagccactcttgcacacccactgtcacacacctacgtacagaccgaatcactttctctcctttcttttccacatctctttctctttcataccacccacacagcaatcctagcctctctctctcttttcctctcacccacacacagcttcctggtttcccacaggctgggctgcagccacttccctagagcaggcactctcagggttagcgataccccaacctggtgggggtcccaggatcccacccccacccctcactctcccaacctgccctctaccctgggtacaagatgatgagagcagagcagccacacgatcagaggaattctctgaagcccatgaggccaggaggagaaatgggaactgccagggagggttcctgcattctgagtctccccagtgtgaacaggggacatcccaaacccaggccacctgcaggtctgtgtttcacaggcccttgtgtggggtgggcttacgctagcacattcctaacttcctttagcagaaatctaaacacacaactcttgatgcaaaagacagatgaaagtggaaccaccctggtcaagggggtggggaacccggggaaacttcggtgaaaacctagaccagcatttctccaaccgtggttctgtttcaaaattgctggggctgtggagggtacttgccatcagtcctgtgccaagcccaccagctcgtgccctcaatgggagtggtgctggaa

SEQ ID NO: 118304 - DNA, 1076 bp, Homo sapiens
gtcccagtgtccatatcgtgcccagaaaagtagacattatcctgccccatcccttccccagtgcactctgacctagctagtgcctggtgcccagtgacctgggggagcctggctgcaggccctcactggttccctaaaccttggtggctgtgattcaggtccccaggggggactcagggaggaatatggctgagttctgtagtttccagagttggctggtagagccttctagaggttcagaatattagcttcaggatcagctgggggtatggaattggctgaggatcaaacgtatgtaggtgaaaggataccaggatgttgctaaaggtgagggacagtttgggtttgggacttaccggggtgatgttagatctggaacccccaagtgaggctggagggagttaaggtcagtatggaagatagggttgggacagggtgctttggaatgaaagagtgaccttagagggctccttgggcctcaggaatgctcctgctgctgtgaagatgagaaggtgctcttactcagttaatgatgagtgactatatttaccaaagcccctacctgctgctgggtcccttgtagcacaggagactggggctaagggcccctcccagggaagggacaccatcaggcctctggctgaggcagtagcatagaggatccatttctacctgcatttcccagaggactagcaggaggcagccttgagaaaccggcagttcccaagccagcgcctggctgttctctcattgtcactgccctctccccaacctctcctctaacccactagagattgcctgtgtcctgcctcttgcctcttgtagaatgcagctctggccctcaataaatgcttcctgcattcttctgcctcctgtgtcattttcagctgtgtctgatgtccttcccttctccccaagcatggagcagtccatgggactctgggtggctgggaatatttgagacatatgggatgggagcttgggaagaagcagccatggggagagatgggaacaacggacaacttgaggccatagaagtacctggactgcagtcctggtcctgtcatggacgagcg

SEQ ID NO: 118305 - DNA, 1033 bp, Homo sapiens
aggtaatgtctcagggtggtattgtccaggccctgaccacagagcactatcaccagagtgggcagggccaagctgggtcagggctctgtgctctgaggctgtttcctcatggcaggtgggggtgccagggcaggaaaggcgccactgtaagaggtcccgtctgagccaggcagccccagtgaggcaaggactcgggccatgaggcatcctctcctggcaggagtgtcctttggccagagaaggggattgtgatcctgctcccaggtgaggctaagcttgccctgggaacacacctcactcttcctctctagaagctcaggcccaccgagggccaggaagctaaggtcagggtggtggacagcagaatctaggcttctgatttgagaggtgtcagaaatacaccccaggatagtctgccagcacacagacaccggtggtccccaccctgcacccagcccatccttgctaggcccacccttccccaggagtgtgtgccttggacccaatctttatcttcggctggggcctcactgcagcacagtgtcccattgcctactggtgatctcatcccagtcccccgacacctcaaagttcatccaaaactgacctcagtgtctgcccccacccctcctgctcctccccttccagtcacccaagcatgaaacaggggagtgggactccctttcctcaccttccacatccagttcctcaccaagacccaagggttcttcaaataaccctcaactccctctcctctccatctccttgtcactgccctgatccagccacccctggtgacagtcaggtcctcctgcctccagtctggccccctccaacccatttcccacatggcagcaaagatatctttggaaaatgccaatccgatcactccatttcaccactttaatcttgtcagcaaccctttataaacacagtttccttttgaaagcctgctgggatctggccgctgcccccactgtctgggctaatctctcagcactgcccccagctccggctctacttgccaaccccc

SEQ ID NO: 118306 - DNA, 1014 bp, Homo sapiens
gtaatcatgtgtccctttctggggggcgggagggggtggatcatgtcaagagtatttatttataaggaaagtttggcatcctagatggcctaatggcttttaggaggctagtaattccttccgtgatacagtaaatctcttggtattaggtctattttggtaattatattttggtagaaaccatagtttctagttcaaaaggcacttcagaatatgtatctaggactttaatatgtagctactcttggaagataatcattttttcaccttcgtttcacctttatgccttgtttttttcttgaatcatagacatgagaagcctacagatccagatgacccccttgctgatcagaatattaaagaccgttattacggaatcaatgatcctgtagctgacaagcttctaaagcgggcttcaacaatgcctcggctggacccaccagaggataaaactatcaccacactatatgttggtggtctaggtgataccattactgagacagatttaaggtttgtgggtataagttagagagttatttttgcctttaactgccctggaataatttatttgcaaaaactgcaagaatgatcattctgtacaaaatacatttttctgtagtctctctattgttagtatcatgctgactggaatttttgtaaaattgtcctttatggtgccacagtaataatgtgcttatgtggctgggcacagtgcctcatgcctgtaatctcaacactttgggaggatctcttgaaccgaggagtttgagaccagcctgagcaacatagtgagaccacatctctactaagaaatcaaaaaaattagccgggtgtggtggcatgtgcctgtagtcccagctgtttgggaggctgaggcaggaggattgcttgagcttgggagatcaaggctgcagtgagctgtgattgcaccactgcactccagcctaagcaacagagtgagaccctgtctcagaaccaaagctcaaagagtgcttatccatcctggcatatggt

SEQ ID NO: 118307 - DNA, 1443 bp, Homo sapiens
tgactatccagaggatctgtaagactaacctagaaagaaaccacttttacatttactttaaataaatcatgttgtaataaaaactaggagctaatttacaggttgaatatgaccatgggcacagtttgttcatctaaaaattttcttttataatttttttgttttttgtttttgagacagggtgtcactctgttgcccaggctggagtgcagtggcatggtcatggctcactgcagccttaacctttccaagctcaggtgatccacctcagcctcctgggtagctaggactacaggtgcataccaccacacccagctaatttttgtattttttgtagaaatggggtttcaccacgttgaccaggctggtctcgaactcctggactcaagctatctgtcagctccagccttgcaaagtgctaggattacaggcatgagccaccacacccagcctaaaagattttttctaaagcattaatttcatcaaatttcctgacagttcaggaatttggacaatttcttagcatgctgtgtagcagaagtaacctgatggtgctaaagagtttgaataaaaacatagtaaagtctctggtactaaataggaaagaggagaagggaaagatgatgtattctgtgtgcatggttagtatggatatgttttaaaatacatctgaggtctttttcctctttttttgtaccaggcctgcccatccaggttcgtgacgcaggattgtcttttaaagatgacatgccaaagtcagatgtcaacaaagagtactatacacagaatatggagagagaggtatgctgccactttttggataaaaatcctaatgaattgacacagtctgtataatttatcttttgaatttgtcatccccacttagatttctaactctgatggaacacggccagttggcatgctggggaaagccacatctaccagtgacatgctgctcaaactggcccggaccacaccctactacaaaaggaatcgaccccacatttgctccttctgggtgaaaggagagtgtaagagaggagaggaatgtccatacaggcaagagcgagcctcattttcagtatttgctttcagatgatttctcatctaagaagtgggaggtcctaacttaaactgtttctgctttaaaatctaaaggtcatacaactaatgtggtatacctcatgtcttagaactatgaaatttagaagagcatgaataaattgtagtttttacttacaattgagccttggaaactaaattgctatgccatacaatatagatgctgaccctaaacatttctgcctgagaagtaaatcttcactgccatggtttaaatgagttgactctcaatgtatagttgaagtcaaagtaaggtcagacttctaaagggtgtgtatgttttggttaagactgccaagcatctggattaggagttcttaa

SEQ ID NO: 118308 - DNA, 1690 bp, Homo sapiens
caataataaggttagggctgtattattgtgtagtcgtagaggtgttgatatgttagtatgttcacgatgtttgaatggttcaagatgtttgaatagttctgtttaaacagaacatttactatattccgggcattggcacaggacaagtctacagtagctaccttttgactaaactttgtaaagtgggcgggccacagctgtatcctctctgatttagggattgtggaaagcattaggaatgttagttcttgggagtgaacttgggagccaaaaatgaacctaagagttgtggctgtggaaagacactcacttacctagcattagatgcatatactctatttcttttttctgtagagacagcatctcgctatgttgcccaggctagtctggaactcctgggctcaagcaatccttccaccttggcctctcaaagtgttgggattacaggcgtgagccactgccacccagcccagatccatatactcttgagatgttatcacttataatatgttgttatagtatgttccctaccctcttcccaaaaaaggttgggttttgggttttgttgttgctgtttttctctctctaggatgccagggatttccagacacatttcttgggttatgtttaaggaaagagtagacatctggcttttttctttctgtaactccagttcttttctattttttttctattatagaccaaagaaaagtatgggaaggaatgcaaagtaagtatgtctgttaaagagtaatgatttctgtttcatttttcttttctctaccaaattagccttcagcttactaagttttgaggtcttccagtaaaaatcagtgctatacaactttttatgtattactgatatattcattggctggcaactgtttatgtgggaggtaagaaaatgaaccctctaatgtagagattcttacggtgtcagtggatgggcactggaggagtttgtacaccaggtggtgtatgactgtccactcgagcattttagctgaggaggaaggtcattcttgtcagaagcttctcaaaaaattacatgacactccccactccccctaaaaaagattaaggttcagattattattggtgcttagctctaggatgggaagaactttgaccctttggctatttcatttctgtactctgaatttttgctggagaaggatgctgaaaattgtattgaaacatcaaatcaactagatgattgctaaggtctcttctaaatcctacattcagggatccttttttgaatgccccgttgttatcagatctccagattgcccagatcaggaccattgacattctatggctcttgctttgtgttccagatctgtgccaggccattcacagtgtttcgctggtgccctggagtccgcatgcgtttcaagaagactgaagtgtgccaaacctgcagtaaattgaagaatgtctgtcagacctgcctcttagacctagagtatggtatgtttgacctgtccaataaatctgaaagtgtgcaggtgcctaaaactacaagtcagtcttttgtctcccacttcgcaccctagctctggttctgatttcactttggaatgtctgccgtggtctgcttttcccaggaaaagaaccataattaggccactctagagtcctgaacaatagtaggaacttaaggaaaagttgggaattaatcaaaagt

SEQ ID NO: 118309 - DNA, 2741 bp, Homo sapiens
ggaagctgctgcttcattaggccttgtttataacgatgtacccatgcactacggaattctattgctaagaaagtgggagcataggcaaggcattgggaacacagggtagctgctgttgctcttgctctcacccctgttgacaccagtaagtctgtgtctccctcactgaaccctgcacgttgagtaacagcagcataattccatcctaggaaaggggatgggtgttccttggaatggcattgtatttaccacctgagaaactctgtactgtctcttgatctgatctcactaaggatcacaatgtcacagatgaaacttaaatgataacccaaaggtagacctgctgttaatgatccagcattggtcacaatgtaccaactgctttctgcattccgttaaatatcatctaacagtctaaaacatatcccttcattgccataatggctgccattttgccatagatttccatataactgaaaaactgaattgtcactttatctttagtatcatgatgattggaaaaacctgtgaagttgttaaggcactctcatttgccctctttttctaagtgaatacaggacacgtattagttgttcttaatttttttcccagtaaaatatggatcttttaagaagaatttgagaagcaaacaattacatgtcatgtcaagggggtagcagattccattcgttttcaatattgccacaatacccagggattaatgctgccacaggggggcaatctttatttgtcttacttcctaccccttccctgttctgcctctttaactcagttaagttgttctgtttgggacctggaaaagaacccaaagaaaacctgagtggacaggttcatttctggaatgcagaaaacattttaaaggctagatttttagaatattctcaactagcattctttccattgatttgaaggggaaattaactattataatctcttgaatccaaaactggatattaagaactttcccccttactaagtttaagacttttgtcatgtggtgagtcaaataagaccattttgattgtaaaccataaaatagttcagcaagtagcccacagttctggcctaacagcagacttgctgttttcacttggtatcctggagttgggttgctaaccttaatttctatgatgttttctaaaatgaaacttgataaagtagaccaccagctgcaccgtgttttctgtaaaagtattgttagtaagtggccaagagacttgaggaaaatacagattttttgtttaccttggtcttgttttaagtcttaaaaaattaaagataacattataatgtagaatacagatgggacatagtccttgtaagcttcccttgaaaatgttttaaatatttaggaagcttttaaaagacactaaattgtactctaaaagacactaaattgtactaattgtacaaaggtcaagccaattttatgaaacagtcctacagagtaatatatgtgatgcagtgtaagaaggaaaatactcatctctaacattatggtaataacatttagcctcttaggagttggagcagggggatgggtaattacagatttgcagactatagaaagagtttcatttttttgtgaccccacagagtctcaaatttttatttcactacctgctagagcctactgtgaaatcactgctccatatttgccagtggaggaaatgggcatagagtagagaatagcttcatatgtttacacgtttgcatagactacacacatgtcatgcgtttatggcaggtagctggtatttattccccaaagtaataatgttgaagtatgggtctcatcattcccatacacagaaacacaaaacactttgatcataaacttttttcttcagaagccaaactaacttgcagaataatagagccactggtttaatgtttcctcaagataggttttagtgtaagctagtattctgtgtgttcgtagaaatgattcaatacctgcagctggtgaattaggaattgtatttgttgccttttttatattagatgaggtgcaaaaattttaatgctagtcagtatgcaccaccacaggaaagttagatcccattagcacttgaaactacagctttggaaacttaggctaagttaatttggatttgttacttgattcacctactgaccttttcttttgtttgaagtgcttatcagcataatgagctaagtgtcatgcatatttgtgaagaaacaccctttttggtcccttttgggacagagaggtactccttgatctttatgaatgacaggttactgttttgccttattgcttaacttaatgtagtgaaataaagcagacaaagcttgagcgtgtcttttgtttgctctcatgtagatactaagtagcatggctcagagccaaaagacaagcgtgaagttaagagagttggctaagagagttggtggggcatgctcccttccattccttaaatgaagtaatctaaaatctcttagcaggttagttcaccataatatataagtagatgttgctttgagcttcttatatacatattcacagaaccattatataaatgttgttagacctctaccagtttttatcctgggtcattgcttctaaagatatcctttacaatatacacagtggtctgactccaccagtggccactcatcaccttcatctgtaccttcataactgttccttccctcctcttacttagatgaattattcatactcttcctgttggaac

SEQ ID NO: 118310 - DNA, 1991 bp, Homo sapiens
agtaatacaaataagcacaaactgtaatgtaaagttacatattttacttcattaaaagtaaaacttgtaccctcatgccaaagaaaacccataaagaaatgaaaagataagccacagactgagaaaagtagtttgcaaggtatattattaacaagagattaaaatctattgttaatatcagcaaatcggcaaggaaataaaaataaccagtagatcctaacattcaagttatggcagaggaaatcccaatagccaataaatatgaaagatattcaaatttatacactaatcagggaaatgtacattaaaactgcaatgagaaaatgaaaaattaaaaaaaattaactgcagtggaatatcatttcataatcgtcagattagtcagttatatttcagtatccattaaaatagcaaatgcatacaccctttgatctactcttaggaaattgtcttacagatacttagacacttaggaaatgattcatgtacaagaacactcatcgctgcattacttacagtagcaaaataatggaaacatcctgaatgtccatcaatttctatcttatgtaagttatagaaattgttacagtgggacacagaggcctctctatatgtactgaaatggaattaattccaagatagaataaatgaaaaaagcaagagaataaatataaaatgttcccttttgtgttattgtgaaaaaagcaaggtgatgtatgcttgtacttttatgtgcataggctatctggagaaaacaaggggacagacagataatgggtaatctttacactggacaccttttttgttctgttaaaaaaatttttaaccaggtatatgtagtatgtatttaagaaagtagtaaataattattactgtcctagtgcagtggctcatgcctgtaatcccagcactttgggaggccaaggcaggaagattacttgagcccaggagttggaggctgtagtgagctttgattgtgccactgcactccagcctgggtaacagagtgataccctatctcaaaagtaatcattgttactgtactttaaagcataggatctggaattttactacctagatttaaatcccagtgtccatttttattggctctgtgaagttggacaggttacttacccttcctgtataccattttgatcatctataatatggcaaccttaatgtaatacctatacctagctcataaagttgatgtgatatttaaatccagttaaaccagtgagcacgttgtttagcaaatacagtatgtactcagtatgtgttattttagtagtttttaagtaccacagaggtataataatattggatagtggggttgcacatatcaggaagtgcgaacatcttttataaactttggctgctatacattattcaaaaacatatggtcttatagcagaacaaaacaaaacaaaattctcgtaaatgctgtccttctgaatttagcagctctatggatcaacaaagtgtgttgttgtcttctgatacgtgttatatttgttttctttttagaaatgtgaacataatttgagcaagccagaatttaacccaacgtcaatcaaattcaaaatccagctggtcgctgtgtaagtattttgggattggtgttttcagttactgttttgagttattttggtttattcttcttccccagtatgaagtgtgtttactcttggcctaaaaaaaaaaaaattacatcaaaataatcttgacattctgttcctgtttaggtttttaatttagttacatgccatgaagtttaagataaatagattcaggggtattgggatcagggacacagtgtcccagtatgatctggagcaacaaggtatgttgattatttggtggaaagtcactagtcatcattacaaattataaagtatctgagtttgggaataatccttcaaaaaaaatttaaaaataatgaagtatagctgattgaagagtatccctgtaacagtgttcattttacttac

SEQ ID NO: 118311 - DNA, 1090 bp, Homo sapiens
gaggaaatgggacctagttaagcaacttgtcatactgcatccacatgaaaattagttaagtcattgaaaccctaagggttggtaaagtccatataaaaatacctagattaagctgggtgcagtggctcacgcctgtaatcccagcactttgggaggctgaggcggggggatcacttgaggtcaggatttcaagaccagtctggccaacatggcgaaaccctgtctctactaaaaatacaaaaaattagctgggcatggtggcgcacgcctataatctcagctacttgggaggctgaggcatgagaatcgcttgaacccaggaggcggaggttgcagtgagccaagatagcgccactgcactccagcctgggtgacggagtgagactctgtctcaaaaaaaatctagattagaatttaaaaacattaacacttgcaaagcacctacatttgcaaaaagaagtgaatttttctgaatagtccagtggtatagtcagcatatgcaccaatgtgtgttatatttagaggtagaatttgaattaaatgaattattcttccaattttcccatataacctgcctgctatatgcgtttgcttctatcttatgctgcattttttgtctctgttgcaacctgctgctattttggggctctacagcaacatactattcatgtagtggtaagttctcctttatgattcttgctgaccctgaagaagttagcagatgaccactggtgttccaggaagacgtctgttgtgtatcttagacactccacatagttcttgcctgagccgtagcttagatacttttagattactagcagaagctcacatttggttcatttttactgtattaatatagtttcaatctccatgtttagtgctgttattattttaagaatagaataatgatgtggggctacaaattgctttctttaaaagaagcctttagattagctttttttttgcttatttccctgagcttctcatgctatcctacccaaaattctttcttttgataaatagggtgtgtaaaagtggactttctaataggaatttctgaactttgtttaggacaaatatggtcttggaa

SEQ ID NO: 118312 - DNA, 1050 bp, Homo sapiens
aaagcaaagttggtaagaggcctgcagaatgttactgttttttcttgagagacacttgtccttatatttgttctctcttgaattccttgataaatatttgttgaatgaatggttgtgtttgtcatgtcacagatgtgccaattgttttgactgtcctggctgcatgcacaccctctctactcgggccacgagcatctccacacagcttccagatgacccagccaagaccaccatgaagaaagcctattacctggcatgtggattttgtcgctggacgtctagagatgtgggcatggcagacaaatctgtaggtgagtgagatggacttcaatatgaaattttgtacaattgacagtgctataattgcccatagattattatttctgtaacccgttggggcgataggagctaaattcagaatattttgtcattaactcttctgtgttcccatatgttcacatttgtagaccttagtgttttatctgagatgggataatatttagttttcttagacttgataaaatagcttttataaatctggtactttcttggaatcaaaatattaatgctcttcatgaaaaataaacattcatgttaagacatcatggataaaactaaaagataaggccgggcacggtggctcacgcctgtaatcccagcactttgggaggttgaggcgggcagatcacaaggtcaggagatcgagaccatcctggctaacacagtgaaaccccgtctctactaaaaaatacaaaaattagctgggcgtggtgggggcacctgtagtcccagctactcgggaggctgaggcaggagaatggcgtgaacctgggaggcagagcttgcggtgagccgagatcgggcctctgcactccagcctgggtgacagagcaagactctgtctcaaaaaaaaaaaaaatctttaaagataaaaatgacaaactaagaaaaatagttgggtcttatataacaggctaaagatgaatactcagaaatgaggaacgcttataagtcaataagaaaaagacttagtagaaaaacaggcaaagg

SEQ ID NO: 118313 - DNA, 1050 bp, Homo sapiens
ggcacatgctaccacacctggataatttttgtatttttttggagagataggcttttgccatgttgcccaggctggtcttgaactcctggctcaagcacttcacctgccttggcccaaagtgctgggattacaagcgtgagctgctgtgcccagcctcatcttgtatattttctgtctcagtcttagagttgtttctccaaggagccttggttcactttattggagaatagtcttagaaaccaagatatggctgctaggcttgctcattgctactggatggtgtttagtttttagcttgaagtgaaagtccttttgctgttagtcatacccccatacctttatggatgtgaaccactattatttgtctttcctgccctgagaagtaacccctgataaccagatactgttttgtatactttccacaaattaatttttatcatttaatcctcaaagcttccttgtaaggtgagtactattattatcttcttttgatagtatccagatggcagactataacagataatgcaagttatattatagaacagaacttcaagcaggtacaggactgcaggtgaaatcttgataatctgtgctggtgggagagttaaaagcaagaagacatagggacctcctaaaggagaaatgttggctgagcactaggaaaagtagcatttaaggagagaacagaaagccctgaaaatatgctgcttctgaaccattccagtttgatagcattgtttgctttctgttgaagctctctggcacagcagtcggttattttccaaatccagtttcacagcttcttgtattgttgactctaagttttctatggcacagttggtctgtcctctctaaaggcataagctgtgacagttctcttcctcagaaatctttgtgatcaatataagcataaaaagagtctggaatcataaactccatctgttaacaatggttctctctgtggagtaggattgggttgggctctaattcttactttggcgataactgcatattttttaaactaatgaacatatagtactcttgaactgt

SEQ ID NO: 118314 - DNA, 1101 bp, Homo sapiens
atcgcctcctccctccccaagatggcgtccttgctgcagtcggaccgggttctctatctagtccagggagaaaagaaggttcgggccccgctctcgcaactctacttctgccgctattgtagcgaactgcggtcgctggaatgtgtgtctcacgaggtaacagagtcgccctatagcgagtatgtggggtggggggggcgcggcgttcatgctagtcactgccaccggaaggctggagctattttccttccttactgattggttatgtcttccgtcactcgggtttgcctgcgatttaatttgcttctaatctgtcacttggaaaggaggagcagcctcgggtgggactgagcggatcttctggttctagagcggcctctgattggacaaacttgacttagggaccgtgtctgtctgcgatggggcttggtaattgggtggactacggagaaaggtctgggggtgcttagttcaggccacttaaggggcgaaaaactgcctttccaggatttattgcgaggatggagggaggcgcaggcgttctcattcatagttctcccatcctgaaagttctgttcctcttttgtccagaaactgggccctcgtcagactgccttgccctgttcctgactcaggccaaggcctgcagccgggaagaggttggggcggcgtgagttatgtgaaaagcgctcagaatacagtatgtcatgtaagaagctgaaagtgtatttatggagctagaggacaatgctgtccttccctggcacaagtgggcgtccgaagttggatttttcaaaaagaagaccccggccagtaaaaagtcaccaaataacaaaaccccaaaacttctgcagcgcttggcacatcttgtttattcagtaagctttagggattaaaaggcgagtaagacataaaatgcgctgtttaataagccatagtcttagtgaagaaaaagctgatagtagtaatagttgctgcttattcgatacttgctatatgtcatgtgctttatgtaatcttcaaaccaatttaagtggatactttttttaaaaaattttttttacaggtaaagaaacagatacagagtgttcgctgtaagtc

SEQ ID NO: 118315 - DNA, 1059 bp, Homo sapiens
tcgggcagactgccacctcctggctctccaggcccagcgtcagggttcagcgcccgggcctgagcacctgcttgggcgctgcgctgggtttgggtctttgcacttacctgtcccgcttttctcgaggccccgtgtagaaggcgccaggagtttggagtcaggagtggcgggttccagccctggttctgtcactaactgcttcaccatccttgtttttccatcagtgaaattgggaaaacattttctgcgtgcagaaagcaaaggagaaaggacatgagcaaagtatcttggagagaaggcttccttcaagctccctcctgctggttagctgtccctttcctgaggacgtagttgttccagttgctggttgttttgctccctagtctcccccatgccagtttcttgagggtagggactgcctgtctatcgtcatctctgaggcattctcagctcttggagcagggcctggctaacagtaggtgctccatacatatgtactgagtgaaaggatgaaaggtgtaaccccccccgccccccccacaaattgaaacaaacctcaggggctgttattctgattgagggccaggctgggctcttacttatgcagctgcacttgtttcttctggaccagctggaatcctgctgcacctgggggctgaggagtctccggttcatctgtggtgaatactaaggtcctcaaagctccagggtgtggtggtgaaggctgcgcaatcacacaagtatcagagattccttgaacatctgctatgatgcgtgctgctactgcagtggccacatagtttggaaggattggggatgcctgaattaggtggaggtgggagcgggaagaacaggtactctgggggttaggagaccctctgaattaccctaatggaggcatttcccctctctggcccttgtcttccctatctgtaaaatgaagacatgggagtggaacagatgtttgtctgtggttgagcatgacatgctctttggtttatgcaggccgcacagcagccatctagacacacgcaaagcagcacagctgagctttaggac

SEQ ID NO: 118316 - DNA, 1017 bp, Homo sapiens
ttaggtagttaggaaggggaactgctcagaagtataattgcctggcacattaaacaacagcaagctagattccacgtctaaaccatatactttaaattgcttagttgtgtatagatagagcttccttattttattgatttgcactctgattggctgattggatatgtttcttgctagtgacccactatataggatcatattcaagattctggggaccaggacatagatgtctttggtggtggtggtggtgggcattattctgctttccacacacatgaggctgactttgggagagcgacctgttgaggctcacacattgaggcaaggcactaccaccgcccggtgctcttgcagctctgtcacggagcaccctgccagcacctctcatggacagtctcctttgttagcccgacacacagcaggcacttagtcactggcaaatagcaatgatggatagtagtgccttaaacaggatgctggggatttggcctgggctttctcctctgctagctctctgttggtttctaagactctgtgattggctgggtcagatggtacgtgcggtcttacacagctctggctgtgttccgatctctttgaaatatcttggtgtttttccatttttccagccacagaggagcagatggaaactcaggcaggtctgtagtctgttaggaagtttggagagacaggggccagttggggtgaaatgagaacagagtgctccttagggactttgggtcattggagaaaaggctgtgatttgattcatttcacatttttggtagttgtatgtcctgtccattccttcctctggcccctttatttggaccaaaggtccctggtgaaatgactgtgctgggttggtaaatgtttgaggctgttacacagtgggaggagaaatacttccaagagtaaatgtgaagctggtatgtccttctcatattggacttggcatgggaaacctgcccccacttttatcagcctccctgacctcttctaagaacagaaagattc

SEQ ID NO: 118317 - DNA, 1037 bp, Homo sapiens
tgataggtgctgaggacacagcaatacacaagaggtgaggcttctgctctccctgtgcttgcgtttgagggagcaaatgaacaagtctttagcctgataggaaaaaagccaataaaaacaaacaagcaacaaacaagctaattttagattgtgaaaagcatatgcagaaaataaaacaagataagagtgatagtttaacagagtgggtcgggaaaaactttactaaaacgtaacatttaggttgaggtcatggacattgagacaatggacaggggaggaaaagagcattctgagaaggaacagcaaacacaaagttcttcaagtgggatcagcccctgggacacagttgttaggttccccaggctacaaagtggccagtgtggccccatctaggaacttgaattgccctctctggcttaaatgttccattcttccttgacaacctcagcagcatcttctgagggtggagactttttggaaggggtcctataaggtggacaatgctggcaaaccctctagtcctgtgccctgggaaccatcagccttgttcacattctgcaaaatacttgaagagtcatgtatctttggacgcctcagcatcagtgacttggagctggttatagctgtctgctctctggccaccgtggctggtggaaacaaaacagcagcagcatggtctgcccagagttctggcagtgctgggctaaggccacacctgcaggaagccacctgcctctatctgccttgtctcccactttgagataattaagcttgcctgccagcaggcagtcacttcttttattgccttcttcctcagtgaactctggcagtaaaaccggttggataaccattggcaagctctcaaaagttgactgttagttgcagctcggatgtggagggtgtaagtttccggtgggaggttcaagctggggacagcttaaaatttttttacttaaaaaaacttttcactgtggtttcctacattgggcccagatcagtcacgaagcagtcacggcaccctaactaatggcagaggc

SEQ ID NO: 118318 - DNA, 1122 bp, Homo sapiens
tcatttattcatctacttgttctgttttgttttagttaggggcagcgacacgatcagatctatgtatttgaatgattattcccttaaggagtaagactgcaggagggagaagaccccctggacctcagtttcaccatctgtgaaatggcactcattctagctttaatgttccaggattcttgattgtggatgagccccgaagcctgagttcctgtatcttacaggctttgcttatgaaaatcagccagggtgattacgtcttcctggcatttgaagtcaggaagactgtttgatgttaaagggtttacaggaaaggactcttgtggggttcctttagtctaaggcagctagctgttgatgtagtcaggagaccacaaagaatgatttatcccgcccccggtcctctaacagtttcagtctcctgtgactcatgcttctgtgtcttagaccttggggaaagttactccatttcctaggctgagacagggccagcctgtgcttctgtctcctctgcaagctcggcagataatcctatggccctggggagctttgtcagaggcttctccttcatctgggaacttgcccagatctgcccagcctggctgcagagcacctgggaatcaattcccaaatcttaatgccagaaaaggccttaggggtcttaaagatttgttgagtccagaggttcccaaatctggctgcacgttggaatcacctggacaatgggaaaaaagggctcctcctcatcccctttgagtctaattcagtatgtatggattgagacccagaaatcagtgttcttttatactgtcttaaggtcacttaccatggtatgtggcatttggtgactgctgatctagtctcatctcttaattttatttgattttaaaattgtatatgtgtgtttttactttttaagatggagaattattaagacaaaaacaaaaaaaaagcctctttgcccccttaacccagttggcataaaaaattagaagtaataaatgctcatgttgagaaaattcaaacggcataaaatcatgttttatgaatgaagaatgaaaagcaaaacctcttattcctagtccagctcccgaaaaggtaaccactattaacactttcttg

SEQ ID NO: 118319 - DNA, 1034 bp, Homo sapiens
tccagtgcccacagatacgacagagtgtcccaagtgcccctcacactctattagctgcatccttaacctctttttgccacaccataagcattgggttttgtttgttttgagatggagtcttgctctgttgccaggctggagtgcaatggcgtgatctcagctcactgcaatatctgcgtccagggttcaagcgattcccctgcctcagcctcctgtattagctgggactacaggcgcacaccaccacgcgcagctaatttttttgtattttagtagagaaggtttcacgatgttggccaggatggtctcaatctcctgacctcgtgatctgctcgcctcggccttccaaagtgctgggattacaggcatgagccacggcgcctggccagcattggggtattttattgaagatggaagccatgaatgttgagaaagcctcagcagatgggaacttgccagaggtgatctctaacatcaaggagactctgaagatagtgtccaggacaccagttaacatcactatggcaggggactctggcaatgggatgtccaccttcatcagtgcccttcgaaacacaggacatgagggtaaggcctcacctcctactgagctggtaaaagctacccaaagatgtgcctcctatttctcttcccacttttcaaatgtggtgttgtgggacctgcctggcacagggtctgccaccacaaccctggagaactacctgatggaaatgcagttcaaccggtatgacttcatcatggttgcatctgcacaattcagcatgaatcatgtgatgcttgccaaaaccgctgaggacatgggaaagaagttctacattgtctggaccaagctagacatggacctcagcacaggtgccctcccagaagtgcagctactgcagatcagagaaaatgtcctggaaaatctccagaaggagcgggtatgtgaatactaattcctgtcttcattaaacattttccatctcctcctattgattccttttctcctttatttcactggactcattgaaaca

SEQ ID NO: 118320 - DNA, 1045 bp, Homo sapiens
gaatggggttttcaaaatcccaggacacccactctttgtttcttaagcactaaacctatatatagtaaatgtttctggaagtttaacttcagctcttgctgaaattttaaaccctcaatttccagaggaccatcgccaggtgtttttaaaacctcgataggaataagaaatgcttcccagaatggagacttccatcagttctagggagctattagcccccttgccctggctgtaatggagaccgctgtgtctgcctcctttcgcactttggagccaaaagaggaagggaccgcctcccacgtccacagggacctgacttccacctctctgcccagatttgcttatgtcactgtcgccccgggacggggaggtggggagctgagggcaagtcgcgcccgcccctgaaatcccagccgcctagcgattggctgcaagggtctcggcttggccgcggattggtcacacccgagggcttgaaaggtggctgggagcgccggacacctcagacggacggtggccagggatcaggcagcggctcaggcgaccctgagtgtgcccccaccccgccatggcccggctgctgcaggcgtcctgcctgctttccctgctcctggccggcttcgtctcgcagagccggggacaagagaagtcgaaggtgagtgagcctccgggccgggggccgggagaaaaaacctagcccctcggtgtccagcgctcagtgcaatgcaccccttttcccaggctccccgccagatgggcaatccccaggtgcgagagacctcctgaaccccttttgccgccccctccgccgccgggaccccgcccccgaccgtcgtcgtctcgtagttccatctgttggagagccgagacctggtgcttcaggcgggcagaatgactaagggaggaaggtctctctccccgagctcgcactttctccccactgccacctcgagggtcgccttgctacatctatgtcacctccgtgcctgagctgctccccttcagtagggcctaagagggagggcgtcacagaaaaaaatgccca

SEQ ID NO: 118321 - DNA, 1038 bp, Homo sapiens
ggaaactggggagctgggccagggcctcatctgtgttcctgatttgccaaagattatgggagggttgtaacctcaccccaaagaagttctctgccttgtatccagggatggatagttcttgctccagaaaactcaatcctgagggttctgaatgagtgctctagctggcccaggtggagggccttggcaatgggcaggtgactgacagctgacttgaggaagggtattattcttgtcctccaaacctccaatccatccagattagagtcaagaggataggacctgagtcccagcattgctgtgaactcactggtgatcctgcgcaagtccctccctttctcgggcctcagtagttccagcggcacagcgggtgagccgggggagtggtgtggatgagacagggctcctcgccaggatactcccacatctgctctttctctttggcccagaactgaatgcactacaggaagagcttgcaccattcggtctggtcattctgggctttccctgcaaccaatttggaaaacaggaaccaggagagaactcagagatccttcctaccctcaagtgagtactcactcagcatcctgagaaagctcctctcacatggcccacatcttgttatcaaccccaaatcatggtggacatttatcggccaccaagaactactctcctcttctaggatccccagtggaatgagggaagggaagggacaagagagggagaaggacagggacaactggttgtgatgtgcatccgcagggagcaccaaggttgagggacactgaaaagggaccaggctagaaaggaagaccgtggactcacattatgcctatgcccactgcacattcactggctcctgctgcccactgcagaataaatccagactcccaacaccctctcccctgttctgtcccttcctctcatttctgagccctgtgcccacctccttgggacccacctaagaacatttctcaacaggtatgtccgaccaggtggaggctttgtccctaatttccagctctttgagaaagggga

SEQ ID NO: 118322 - DNA, 1039 bp, Homo sapiens
accagccttctgtgcccatgtcacaaccttccatgcatgtgtacccagccttccatgcccatgcagccttccatgctcatatatccagccttctatgcccatgtatccagatttctgtacccatgtagcagcctttcatgaccacataccagcctttggtacccagcctgctagccttcagagagctaacattctatttagagggtgatgagatgggtgtcctttgcagcctgttgcaggccaaagccagacgtcagcctttcttgcaggcctcaggagagcgttaccatgtggagccccacccagaacatctctgcggggcctacccctacgcctacccgcccatgccagccatggtgccacaccatggcttcgaggactggtcccagatccgctacccccctccccccatggccatggagcacccgcccccactccccaactcgcgcctcttccatctggtgagtctgtgtccctcccttgctccagggcacacacagaggctgccccagacaccttccagagaggaaggttaagtgaggggttcagaaactgcatccttctgaactaaacagcaccgtggtggcaggtgggtgtccagggcctggctctgggctgctacccaggggcagggatctggccacagtcccgcagggctgccccacagctgttcagggtcactggtctaggacggagaaggctgagtaagagtgcagggtgggaaggaggactccctccaggccccaggccatgggtatcagagtttgggtttgctttttcttataacttccacgtgtaactaggttccagagcctcaccatgtttctctctctttcctttcctttcctctcccctcccctcccctccgctcctctcccctcccctcctcttcttctctcctctctttttttattttcttttccttttttttttttttttttgagatggaatttcactcttttttgcccatgctggagtgcagtgatacgatctcggctcattgcaacctctgcctcccaggttcaagctattctcctgc

SEQ ID NO: 118323 - DNA, 1053 bp, Homo sapiens
aacctagccagtgtctcagctgatctgcactaaggatgtgaaactacaggctaagagacagaggcaggccccacccaacccacctctgccagggcaccctggagccctagcggagtttgtagggtctctgccctcagaaccagcagatccaaactctggtctacaccacactctggttctgtgatcactgcccctgtgggtctcagcggagtgaaaggattgcactggttgatggctttcaacgtttttttaaaaccatatatcctttgttcaaataaagtcctagcttgaagcccagaatgtaagatagagggacacagaactactctgtttgaagttaaggtggaggctggaggtgtagctgtcccactccccatggcgacccccagctctgccatctgtgaccccagcaggaggcatgggagtctgggcctgaggagaaatccccactcaggaccatccccctccctctcttcaccctccctccacaccaggtgaagatcttcgaggaggacttccagagggagcgcagtgatcgtgagcgcatgaatgaggagaaggaagagctgaagaagcaagtggagaagctgcaggcccaggtcaccctgtcaaatgcccaggtaagagtgactggacccaggaagggcaactggcctgtcctcgtggggagagggggcatggattggagggccctggtgaggctggatgtcaggaccctcactgcttctctccagctctgcaatcatatttgagctcggcaaggcccttcccctctctgactctttctttgtacaattacgagttttactctaagatatctctacctctgactttccacagtcagttctgggctttactctcccagagtggaactaaaagatgttagcagagaagcagcgaggttcacgtgaaccctcttgacctgtgcacagaccactgtgacaagcaggtggcctgcagcaacagcctgggctgtgctccgccctcagggccctttcccggggctggcccacgcatggtggcccagagggaagcatcagccggtcagtcctc

SEQ ID NO: 118324 - DNA, 1050 bp, Homo sapiens
cttccttctaggtctgggtgctaagaattgagccacacatgttcagggaaggggaggtttccccttctgcatgacaaccccagtttagcctgctgggtaggagcatgtgctgggcttgaatctgtgctctgccacttactagctgtgtgaccttgaccttggacaagccccttcaggtctctgagcctcagttttcacatctgtaaaatgaggatgatgatcatagtcttttcttcatggcactgtgcagaagatccaatgaaatgatatgtgtagaatgcaaataaatagggcagcatttattaaataggactggtagtggtggctattattagtatgattattattaggaaggagttccctgaggatgacccctccaaagggccctgatttccaggggttcctgctgatggtcccatcttttcctgattccaggccctggaggaagcactgagcatccaaaccccgccatcatctccaccaacagcatttgggagcccagaaggagcaggggccctcctaaggaaacaggagctggtcacgcagaatgagttgctgaaacagcaggtgaggcttccgggaggaaatcaggtgggaggtgctctgtgggagctggagctttcctgagggcccagacggcttggaatcacatggaacctgtaattagtaatccactttctggccattggccagggccccccactggctctaggtttatcctttccagcaccataaccctagcttaagtcgttcctctaccacctttatgatttagccatctctatgccccacacgtgctattatttacctagtatttaaaaaataaattctaaataaatgaatttaaaagggagctttatatcactgctgtaattggaaaaaaccatttattatttgtcacaagtagaaagtaactgtacgcaataaacaataaaaacagaacaatgttattaaactctagccggatactcttgccaaatgaagactctgaactggagttcttttctcctttatttaaaggagattggcaggtactaaaatggtattaaa

SEQ ID NO: 118325 - DNA, 1049 bp, Homo sapiens
aatgtttttaaataaacattttatataacttcaacttttgtaaaagttttataaaacatatatgttttatagaatgagtatatctatatctatatctgtctgtatctacatctcaaatgtcttaccttccaggccagagagttttttggctgatgtgtgtagggagtgaggagagtggctggtagtaccttagaggttgtacctaaacagggagaatgaccgtagggaggggagaagggaaggggagagggcctggcagccaccctgagtcagggagggggaatcatcatcttgtagacttctagaaggggacgtagtcatgactgggatggttagtggtgtcctgctgggtgggaggaatagggagacagagggctggggccacttgggtgaggggtcttagaggagcaccgagactgggtgagataatttgtattgaggttttggtgaaggctcctctgtgcttctccccaggctagtgtgacggcaggtaaggtcccagaggtggtggccttgggcgcagccgagaagaaggtgaagatgctggagcagcagcgcagtgaggtaggtggccgaggtggcagtagtgggaggatccctcttacctcccgggaccagcagcacaaaggcttgccctggcctcctggctctggcaggtcccaggtcaccatgaggagttggcatggtgaccactgacctgcctgcccatggatgaggtctgactccttgccctggactgtcctctcttgatcagtccctttgcctacagtggtcactctgaggaggtggcatgtggggcatggcctaaaattgttggggctacagtttaggcaggctcctatggtagaccttggatggtggaaagaggttgtgataagttaggcaagttttagcatcaccgatgaggagtggagggacccttgagagatgctttagggaggacccatcatggaaggaagggattaaggccgcttcccactagcctggaggctccataaatttactgtcaaaatttttaacgttaaaagctaccttggctgggtgcggtg

SEQ ID NO: 118326 - DNA, 2330 bp, Homo sapiens
gcaggcgtgcttccccccgagctcttcccaccttcctgctcctgggaatccactggtaccatggggacttctgaaggctgtgttgtgggcagacttcgggctttttgttcagggtgatgaacaggataaggaagttgtggggagggatgaggaagaggaaggaaatggggaaatacgggatgggcaatgcgagtgtcatggttggggatacccccagcagccctgcctttatttctcatgtgcagggttgggggatgggaagggagggaacaaaggtcaactcctttcataatgcctctttccccccagggtaggcaccctcattatcaccacttcacaggtggggaagcagccctttttttgcccaaggtcacccagctggtaaatggtgaagtagggattggaacctcgatctctcgcattccaaagcccatactcttgaccaccatcccaacctgcctcccctattgaattccttttgaaagcctccctgtgctgtggggaatggacagatttccttgctaggccaggccagaccttggagttatatggtccttggttccagtagtgaccctttattgctgtatgaccttggacaagtcacttatcctctctatcccccaatgttcctatcagtaacatgagctagaagtgcctccatggttagattgctgcattaaatgaggccatgtacatgaagcacccagtgcagtccagaacctagtccatgctggaagagaggtccccattcggagttcatgacgggcatccacactgggcagggggtcttagccttgtgggctttagcagcggggaagtgttcagttataattggtgaccattctaaagatggcaaaacggaggcttctgagggactgctcgtgatctgagtgcccgccaccttagtgacagagccatgacttgaagcctccttactccctgcagactctcctcccaggccattctctgatctgtggtctcattcatgtcagcaggcactcaagtgccccgctgatggcagaagggggagtcccccttgcgtgaccttggttgccgagggcatgaagggcaatcaggttggagatgcagtatgaggagaggtgtgggggtagaggagcacggaggatgcccatcccacctggaggggaggggtgtgttgggaggtgaggctgaacgagaggcagaggcctggagagccaggctgagagaagggaacccctttaagatgtcagtgaggcttcaaggtatccaggctgaaccctggcaaggtgagcctggcacagtgcctaggctgtgggcagggtaggaaggtgcctggggtgagagcactttgcgcatccacttttcagctttgagatggggatagatcctaggccccttaaaaggggtcctgccaacctctgttattttttatttcagtcccctccttgtttatttccttcttagctcttatcatagtttgtaataattttatttaatacattttttcttatactcttttttttcttatactctctgctagaaggtaagcttgaggggggcaggcaccatgtctgttgtattcactgttgcgtcccagttcgtggcacttcatacacacttggtgaatgaatgaaaggacaaaataataaatgatcaaatgaactcatagctctcgtagcaccttggatggaaggtgatgatctttgtgacctctgatgattctatccattggccggtttgcacccagggcattggcccagagactccaaggaaacagctctctagactgcaagggtaggacagcaagtgaggccttgtcctggccttcccttagggactaggagcaggccattctgttccctggaggcctcgcccagagacatggcatcttgggtatttttactgcctgggtggaggtgtattgatccagttcctcctcattcattcactgatgtgtttcttggttcactaaacaaacatattcaaggtcaggtatagcataaggctctctgctaggcattgaatggactcataacaataattttttgatttcttttttttaaggggtgttgggggacagggtcttgctccgccacccaggctggagtgcagtggtgcgaccacagctcactacagccttgacctcctgggctcagttctcccacctcagttccctgaatagctgagactacatgcatgcgcccttatgcctggccaattttttggtatttttagtagagacagggttttgccatgttgcccagactggtgttgaactcctgggctcaagtgatcctcctgcctcagcctcccaaagtgctgggattactggtgtgagccaccatgcc

SEQ ID NO: 118327 - DNA, 1049 bp, Homo sapiens
ggaggcaagatcccctgctcagaaagtgtttcactctgactttggaccgataactttaactgacgtagtaagttcctcattagctctacagtgtgcctgtctctgctgagccacttgagccaagacaacacagcctccctgtgctctgaagcttgtagtctggagaagtcgcaggcatgggaagcatcgcatgagccttaaatagagcagcatctgccacctcagctcctttgtggaaagaggcagtgggggaatggatgcagagttgaaacagcagcatttcctcttgttagaatgcggcacactgacgccattacacaggtgttcagggaatgccaagttggggttatagtcattgccattcctccagagttcagagaagtgggaggtcagtgcagcagagcactggatggcgagtcaggaaacctcagttctcgttatacctctgccactgacttacagggcaactttgggcaagttcctcctccccatagcttggtttcccggcctgatctctgaggctccctgtagctctgctgtcctgtgattcccataactgtttccgggaggctgctggaggagctgagccgtggacagggtgggaaggatgagcagaacttgcagaggcagagaggacacagagaggacacatgcagagacaccagacctggtgtgtgtgggttcaggcagggtaaagtggggagcccaactggatgctgctgtggatgggacctgcggctgtagggccttagatgcccagcaggggagctgggcccagtgccgtctgcagtagggtaacactgcaggtccttgggagtggaattggtgtaacaaaggcaatgtctttggtaggagtattccagatagactagagagaaagagtcaactatctggcccacggtgtgctttatttcttacatactgtactagtttgggactttctgaaatagctaaagctgtggttccttaaactgttttgagtcttgggtcctcagaagctgatgaatgcttgggccattccccagaagacacatgtgtaggccaggcat

SEQ ID NO: 118328 - DNA, 1764 bp, Homo sapiens
tggagaagttttgcttggtatcctacaagggattgcatagttcagcatccttatcctacagatcaggtgcagggaaagaaggacctgttctgaggttacacgggtaatggggaaaatgtagatggaggagggagactttctagggcagggccaagagccagaggtgagttcttggtggccatgagggtcagctggaagctgagcactgactcctctcatctatcctgcccctttctgggatgaagggaggctgcagaccaggtttaacgggacatggaaatcccagatcccagagctaatggctggttcaggtgggccattggcttcttggttggttgaatgaccagtaattctactaggaatgacggaaagatgtgaaaaaatctgggatttcttggccaccgtggatttggttgaatcctgaaatagtctccaaatttggtgaatcatctctgggacttttctcagatcagttcactcctctgggatctccaggactggcttgggaaggccagcacaggacatgcttggtggtggccgtaacagctgccatctgtgttctgggaaaccgatcagagacgtctgggcctaagagacagctctggggccgtggcaggaatgctggatctgcagtcttgggttcaatccctgcttttgcattaaccaactgtatactgtagtttcctcatctttccaaagaggatataaccttctgacccactccatgggtcaccctgagaaataatggagctcatgaaagcatttaaaaagtacacggccttaaaaaatgcaatcctacagtgctgctggttcaaggtcagctagtcccacatctcccttctacaaaagaggattggccatcgaggggatatgacctcacattatgcagagggctatgacaggcttgtcgagaatcctgctttgtgatctcatgtgagatgatatgtaacggtccctgtgtactcaaaatgggaagagattttgtcccccttgctgctctcagccacagggccgcagaggaggggtgagctgtttttctctcgggcagcacctaacttcctttctgcacagggcacctcctctgaatttgaagtggtcactcctgaggagcagaattcaccagagagcagcagccatgccaatgcgatggtgagtggacgggcaggaccccgggcttgacctgctgccctctttgtgtcctgtcacttgctaccatgtgagaggcacagaacctgttcagatcccttaggtaccctggagtcacttggggatacacgaggggcaggagcaaagggtgcttctcgctcacatatgcaaattcctgggctagtgacttccccgacttggagcacacgggcacccgaccgttgtgaaagcctgggctctttgccagccctgttgccttctgccaggggccaggcacctccgcacactatgactcagccctttgggtctgtgggcttccaaccccgggggagaaagaagggtcaggaaggcccagggccctgtaagacaggtgatttgctctttgtgcagactcttggagcacacaggaaggaggttcaactttccacttacacgcatgcgcgcgcgcgcgcgcacacacacacacacacacacacacacacacacacacactctctctctctctctctctctctctctctctctctctctctctctctctgtctctcgtacagctctggagcgtctgcccagcatcctcattccacaccttacaacactggctgcctttttcctaac

SEQ ID NO: 118329 - DNA, 1026 bp, Homo sapiens
acacggtgtattcatcttgtatctgtcagtctttgggagaaggggtccttctcatcagaactttgtttttctttctggcccattccatcctatggacgctcttggacaagtccttattggttcttatgctgcagggcaagggaaactgcccagaggtgacctgatagcatggtgctgccctacaaagagatttgaactccctgtctgcccctctggctctgtgtcctggctgtgtgagtatggtgggggtcagagtcacagcaggcagggctgactttgcatcttggctcttattgcggccgggtcatcgtggctgagttacttaaccgccctgagcctcagtttctcccttgtaaaatgcagatgagattagtatgcatgttagagttactgtgcagctcctccaagattgtatatctgaaacatttaatgcagtgcctgacaaggaggcgattcaagcatggtggtgttgctgttaatcctttctcactctgatctttcatttacattctgggagcagggtggtatggtcgtagtcacctggcagcgccaaggacccacggagcatggtgtgtggacttgggagggtctttgaggattcctgatgaaacagtttttgtcttgggggtggtgaccttgggaggaaggtgccgagcccccaaacccttctgaggtccccagtgaaggccttggccctttcatgctggagagctatttggagggctggaggctggctcggtgtttcagccttagggcctctgcccttactgttctctctgcaaagaatgttcttccttcagatgtcttcatggctagttccctcacctctttcaggtcttggctaaaatagctccttatgcttggggccttttgtgcatagactttttgattacctgaaatattgtgttccccaccatcctcctctgctttcacccctagactataagctccatgaaggatttttgtctgttttatttgctgataattcctcagcacccagactggtgcctagcacggagtcgatgc

SEQ ID NO: 118330 - DNA, 1034 bp, Homo sapiens
atctccagagagggttttcccacaataggatatttctcctgcgtctcctctgcccactgcctttctttctccccaagctctgccccctgaggctaaagtaggggagcatagctctgtctgcccactttttgtttcccatgaacccctttcccgttgactccccagcgccaagagaaactgagtgttgcgtgttttggaggacgtggggtgggtttcagttcccacatcctgcatcctgctttgtcccttcgccttacatctgggcctctctgagggagcatggctggcccagcctggattctagaagtgtctgggcgtccaagtgcgtctggtcagtgggtcagggttaggctttctctgggatgttggacatggccttgcaggaggcggggtcggggtcaagggcttgttcccttcagtctgacttctctgaattcaaggtttaccgaggccctactctgggccactctgaagataccctggcacacaggatggacttgctccctgtcctcatgcagcctctaatctacaggacaaggcagacattgagtaagaaattccccatgccttcatgtggtgttgactgtgagttccatttagggtgaatgcataatggtggacaagaaccaggacactgctgcctttgtcatgcaaggtggctccaggccccttgtagccctctgtttcactgttcttgaactccaagcagctctcaaggaaggcccaccctcctgtgctcccgacaggaatacaaagatgtgcaaagtacgctcctgcctcaggaagttcccagccagatgggcaatgcccgcaccagtcagacacatgctgtaccaggtggcaagcctcgtgaggacagaggcaagcagaggggaaggacccccaatgtctgccaacatttttgagtactttactatgtgccagttccagtgctaagtgcagcccccacactgtttcttagttcggtggaaacatctgcactttgtgctatgctgtagaacactgacctttcaggttaaaaacaagtcacccct

SEQ ID NO: 118331 - DNA, 1051 bp, Homo sapiens
ggtacttggagcttgaggtcacacagctgtgagttgcaaagtcagatatgaactcaggcatttggctccagagttcctactatactatttctgttgaacatattttgtatgcacattgttggaggcatttgtgtgcatgtgcaggatggatgagtttccaggagtgcttctggggatggagtatgaaggctgagctttccactgtaggacatttgtgtgcacgtgtgcattgtacattcattgtgcgtacaggagcagatgggaattttgtgcgactgggtgagagattgtgttttggtagggggagggagggacttttgtggatgatgcagaagaatcagcaacgtccttccccacccccttgcagaatgacagtgcagggaaatgtgtagattcctaatgcatcatttttttctcacagtacggtcaaaatgggatttaatcagcacttactcattttccaaacaatggggtgtgatagaggggaattcggcatctgatgagaggtcagaaaaggggactcagaatgttttaaaaaaatccttgacaaaggagggtagaattgtattaggagggtagaatattagtacaaactcagcatccccgtggtggtctctgttttgcaacagaagaaactgaggcagtgaaaaaactgataatgctaatagcttactatgtgccaggcacagtgcttacattccgtatctcatttaatcttttttttttttttgagacagagtctcactctgttacccaggctggagtgcagtggcacgatctcggctcacggcaacttgcctcccaggttcaagcgattctcctacctcagcctcccgagtagctgggattacaggcactcgccaccatccccggctaatttttttgtattttgagtagagacagtttcaccatgttggccaggctggtctcaaactcctgacctcaagtgatccgcccgtctcagcctcctaaagtgctgggatcacaggtgtgagccgccccgcccggcctcacttaatctttctaacaactcttaattttcagatgagga

SEQ ID NO: 118332 - DNA, 1010 bp, Homo sapiens
atgtatgaatcacaaactcaacgtaagacctcccgcaagtccctgccgctctctggcccttggtgtggctccagccctacaatgaaaagactgggttgatcatttctttctttctttttttttttttttgagacgaagtcttgctcttgtccccaggctggagtgcaatggcgcgatcttggctcattgcaacctccacctcctgggttcaagtgattctcctgcctcagcctcctgagtagctgggattacaggcgcccaccaccacacctggctaatatttgtatttttagtagagacggggtttcaccatgttggccaggctggtcttgaactcctgacctcaggtgatccacccgcctcagcctcccagagtgttgggattacaggcgtgagccacggcatgccctgcctgggttgatcatttctaaagacccttcaagcctggcactctgagttctatgtcttgctagctggcaagactttggagcatgatgcttaagagtgttaagcgtttaagagcctggatcttcaagctccggttacttgctgtgctgtaagaccttgggcaagtcatctaatacctcaaagcttcagtttcatctgtgaaatgtggatgataatggtgccgacctcataagctggttgggaggcaaattatgaataaaagcgcggagatagcacacagcaaatactccatacatgttaccttttaatgcttttattatgcagcctccacccctcttctggaacttgctctagagttaagttggttatagatggatttttcatatgttttttattaccttcaaatgtgtatttgggtctgactctgtagctacctcagtaggggtggtggaggagggagtagcagaaaggagatcgagaagttgcgtgctttaaaacaaaaccaaataaaacaaaacaaaacaaaggcagtttgattctccttctgggtgtggctttgtgcgagtgcttgtcattactctggaagaacaagaggttgcacc

SEQ ID NO: 118333 - DNA, 1050 bp, Homo sapiens
tatgcctccgattcattcccttgacactttttatttctaaggaagaaataaaaagagatacacaaacacataaacacatttccagtgagggcctctgtcttctacctagagcctgcagcctggattttcctcattagagcttgaggttgtaaagtctgtccaggagcgagttacgtctttaaattcttgcaaggtgtttcccgggaagcgcacaggagaatctgagtttgcagcaagcctgggaaggctggcccagccctgctccgggcctcaggttccccctcatcccctctcgctgtctggacatttctgtatgctcttcatccatttcaaccaagcccaaacttcctcttttgaactatgcaagggtgcccgatgtgatcttgatctggagaggtgcatggaaagtttccttcatgcaggtcactgataagcaagtaggcgcaactgcagttcctctgccttccctcccccgctgccctacttctggtctgtggctttggtctaagattgtccagtgaccatggcatggggctggctgctggccaaagggcacttctccctaccctggctgaccagactagtttattgcaggttagcgcgtgtttgttttcttttctttcttttctttttcttctttttttttttttttgagatggactttcgctcttgttgcccaggctggagtgcaatggcatgaatttggctcactgccacctctgcctcccgggttcaagcgattctcctgcctcagcttcccgagtagctgggattacagacatgtgctaccacacctggctaattttgtatttttaatagagatggagtttctccatgttggtcaggctggtctcgaactcctgatctcaggtgatccacccgccttggcctcccaaagtgctgggattacaggcgtgagccaccgtgcgcggcgcatgtgtttgttttcatagctgtgaagacagcaacaggcaggtgagagagtctggtctcgtccctccctcacttgtgacctcagaccagccattgccctcactgggcctcagttac

SEQ ID NO: 118334 - DNA, 1899 bp, Homo sapiens
ggcaggtcagctccccttaaggcctcagctggccagtctttcctgtctgtaacatgaaggctaaaattacatgtctcttgccttggaactctgaatatgctaaagggtgcagagaactttgcactgctcacatttacatctcagtggttctgtaaggaagtggcagggattatttccactttcagacaaagaaacaggcctggaatctcctctgggttttggggtgcgaagggcagagttccccatttctgtgtctttctcttacccttcaagtgaacacgtttttagttattgccaggcctatccgcattctgagctccagcccaaaaggtcataggaaggtatttttatcttgtccctaccccccttcctttcgcatcccgggttctctcaggtctcttgggacctctcccactcccagccaggcccctcaccctgcaccccagggccccagcaccagcctccccaacctcctctgactcttgcctcccttctctccctcctctctcccctccctgctctcaggtggctgctgagatcttggtgagtgtcctgttcttcatttgggttttaacggcctctgagtaaagtccgcctttactgggccgagcggggcagtatcgagcagtgatttgggagcttgctgtgcggcttctctctctccccttccgggccctgcttggtaaaagataggccaggcaagtgtttcccaaacttcagctaatcatctctggcacgatttgtgctgtgtaaccaccagctattaatactgatctttaaatcgactcactcttaaacccaaaatgagttaaggggaatttactatcagtataaatagaactagtagctagctagaagacaatcatggaaacactaatgtgcagtgtgatcgggtgtgtttgcccttgaccccgcttggggaaacactggccaggccatcttctctgcatatgaccccatacacccttcccagaggggcttgcagaaaggttgagggatggaaggggaactcccagttgctatgctcagagtctatgtgggtcctcctaggagccccagccccacggtcctgaggctaggatggaagtacccagtgctaaggccatctttgtcagttcacagggtccttgtgaactggagaggggagtatagaagccattgtgcttgaggaaggaagaggggaccagtctcggcccccttggatggctgggtgagcccagcttctgactgccctcagcccaggcaaagacatgaaagtgaataataaccaaggctttctcatgtctcccctcccaaatccttgctccaactggggctctgcaggaaatagcagacacacctagtggagacaaaacttccttggagacacgtttcatgacgatcctgtgtacccggagctatccgcacctccggagaggtgaggcctgacctcctcccttcccagctcagcaggaagatcccagaatctgatgagagcctctcagctctctgtggcaagaggagcccgttgcccacccacctcctccttaacccagcagtagcgtgtcatgggtgacggcgactctggagccctgggttctagtcctggctctaccacttatacctcaccttctttctcctccttagggaagcaggtgggatgcccgggattaggtatagcaactggatttcacctcaaaggccaactctgattggtagtagctgcctagagtgctgtgttaaggattctggggtcccgcgtcatgattcactggcgatgcctgccaggagcaaggcagcgagaggtggtggtggcacaagacccacatagacatctttgaaccacaggctgccgcatgctcagggcacacctgtatgcagtggccctggcactcggtaatcatgaagtgtcctgcactg

SEQ ID NO: 118335 - DNA, 1175 bp, Homo sapiens
gggctgtggaccctggaacccaagagccctccctcattctgtggtgggagtgtgccctgctgggcaggtctttcagacctatatttggcaccagtgggaagagtactgcacccacaggttcagatcagctgggcctgtgctcagaaagtccagcctgggacaggccatctagggtttggctttctttgcctttctgccccatctgtctgacagcaactcccaggaggctttaggttaagtccatcaccctcctgagcctcctttccatgtgtctcatgggaatgatgatacctgccaagctcgcctgggactgtaggatgctagaggtaaaaatgccatgaaagacccctgtgctgggtctgtggttgatggcattaatctgagaagcaggaagtgatattctaatgccttccagagtcaacctgctgtggttagagggactcagggtccagcttccagagagctgaagagaaaggacatagagttgctaacaggacttggactgtcagggttggaaggatcccttggtgactactccagcctcttcatgttacagatgtggaaaccaagtcccatcaagggaaggggacttgcccagggtgggcagccattgccagagccagaactagaactcagaggcactgactcccaacccagtgctctctacctcccagctgtcctttttcctcagcgtgtcaaaaggaaagggagggaggagtccagcagaaatcagtggcctgagccataggcaagcggactgcagggactcaggagcacatggccgcttagccaggcttctaccctgacaaagatcgatgaggggccatcagtgggcggtgcatggggaaagccgagagccacaggccttcttctgaggcatgtggctttggtgactcagggactgacgaagacacaatcatcgatatcatcacgcaccgcagcaatgtccagcggcagcagatccggcagaccttcaagtctcactttggccgggtaaggacctcctcctgggctctctgtgcaacatgcatgcaccttgcctgattgagctcagcctgtccccatcggttctgcacagttgggcaccagggtcttcatggcagagggaccctgtgtggtcatatgatctcagagtgtctccagcactgggtttgggcagacatatctttccatgc

SEQ ID NO: 118336 - DNA, 1070 bp, Homo sapiens
aaagtcatattggtaacttgaaattgtccattgctagaagtatttacaccacagaaataggcaaatgctataaattagggcttcctccaacctgcccgctgagaaccagttattcaatattaaccagcacaggagggccagggctgctatgaataagtgttcattcagccttcccctctttcaggctgtgcagaaccttcacctccttgtctgagaggagcccagggctgggtgagaggtaacctttctttctttctcttcagaatgacacctctggcgagtacaagaagactctgctgaagctgtctgggggagatgatgagtaagtggcttcttggcccctggctggagggcatggccttggggtgccaggcggggactctcctggctcgcatcctgatgggtggattggatgagctggggattcccctgagccaggagcgtcgcacaagtgaaaggcggcttttgctggtagctgctgtgcttgtgggtctgtgtgtctgagagtgtgggggtctgaacgtgagcgtggtctcctgtatatggagatgtctgctcttgtgaacttggaaagtcagtctggggttgtggactaggaaccagaatatgagcatccaatccctgctatttcatagccatttctcggtttcatcacctgttaaatgggaaaaggacacattcctgctctgcctactcatttatgcagcatatttgtgttaagtgccttctgggtgcagaccctgtgaggaagcccctgatgaaggccacagcgcagaagggtatagaccagtttccagaagggagcagtcctgtgctggggagaactggctgtgccacatagaaagcatatataaaagcacacagagatgccctagcccagaccaaggggagactctttggagatacacggtgagacccaaggaggaaggggaagagccaggtgaagagggtctggggacagtgtttgggtggaggaaatcacctatagaaaagccgaggagtgagaaggagtggcctgattcattcatatgtccgaagtcatgcatttatggagtactagagagagaaat

SEQ ID NO: 118337 - DNA, 1048 bp, Homo sapiens
agggccctttatcctagatccctgaggtctctggggatgagactagagcttgcgttcctttctgcagcctacgagcgggacctggaggctgacatcatcggcgacacctctggccacttccagaagatgcttgtggtcctgctccaggttggttcacagcctatttttttcctctggagcttgggatagcttttgtctggctcatctgggtgtagatctgaatgtccagggtctggtcagcttcccctggtttgcacaggcaggtgtatttggctaatcctctttctctttggcacacagtcctctcgtgcccaggagtgtcttctgctgtgattttcttcctctctccacactcgctcctcccgctcctctctgggcctccttcctgccattgcttctgcagctgcacatgcagcatttctggaccccagcattcctgtggctactgtgtggagtctcccacatccgagccttattgcctcctcaccgcccgcccaaagtatatcacaaagagactattaggaggctacaaattggtgtctgtggctgaattcaacctgccaagttggattttttgtttgttttcccataaaatgtgttttaagaaagaaagcaaaacaagtttgagttagttgctaacatttaaaaattgtgagattttgctcaaaaaccagatttctggattattttaatgtattgaaagttgcggtagcagcagacctgcattctgcacgactgcagtgggctggagagcatatgcgtcctgcccgtttcaccgtgaatgttatctacctggctctgtaggtatctctgtgaccacaggcacgatgggaacaggcattgagatgtctcaagctcagctccaaggaccaaatggttatgaaactttatatataaattaagccaccactatgtttcctcgttcccccatttcccttttataccagctcctcccaactctgttcctctcattgccataacaatcccatattaaccagctggggaatgatcaggagaaacctcaggagtgggacagtgtgacctgtgc

SEQ ID NO: 118338 - DNA, 1020 bp, Homo sapiens
atccttgttgacttgaaaagggggcatgcatggtgcagatagtatagactctgggatctagaaattgttgaattcagttctaagctgtgtgatcttggctcatttattgcgatgctccagcctcagtttcctctctataaaaaaggagaatctgatgtgtggaaggatttctgagagtagtaactgagacggtgctgagacaggtaccctgcctagtgtggaggagtcaaggggtcagtggtgggtcagtgccatgcccgccctcccttggggatccgcgtccctttcccatactgctgtgaatgtctggacaccatctagtctgtccattgtcttctgaaaaaaatgtgattggccttgagctgggtcattgggtctgatttaacctgaagggctgggggcagctggaaaacagcagagggaggaaatgtaagggaaagaaaggggatggttagagttggggggaatctcacatgctgtctttcttctctacagtggattctgctgcgaaccggagaccatggccaaaccagcacaggtaaggggcctctctttcctgaaggtggtactcagccttctctgggcctgggatcctcctggagccactaggcctgctacagagacccctggtaccttcagcttgaaaaaaggaggaaaggttcttaggctttgcttgctcctgttacaagtcatggctcttcagatgcaggtcaccataatgtaatataacccacaatatcctaagcagaaaaggatgtgtattggcttatctgacagagaggcccagggcttcaggtctggttgaatccaggggtttccaaatgatagtgtcaagattctgcctgtgtgagctgggcttcttccggtggcttcattcttgggtaggttcttccttgcattggcatggtagtcatcagcagctccaggcttccattctgctgtcttggcagcccagggagaaaacaacataactcatgcccagtgattccaggggaaggcccaggtctggttctcattggc

SEQ ID NO: 118339 - DNA, 1014 bp, Homo sapiens
gtcctggtggtccttaaataatagcaataaaatggtaaccactattacctctcgaacccttaaatttgccaggccccggctgaagccttgctatgttagacgctgttattaatgcctattttgcagacatggaaactccagcccttaacagtttaaggaagaaataataatgacaaatgcttataaaatatagtgcttcctgtgtgccaggtcctcttctaagctctagacttgtcttaattttttttatcctcatcataactcctatgagggaggtgctatttttatcccttttttttttttttaatatgaaacaggcacagagaggctcaatacttgcacaacaccacacagctactaaatatcaccctcaggcttcaatctcaggcagtctggctccagcatctatactgtgagacactactttgctgcctctcacaaaagtgacccaagctggggttcaaacctaggctagactagttccaatcctgaggcagagagatgatctcctgaggccttgtccagtcctaggatcaatggttctgggtcaggagaggaaaagacactgctccctaagaaaccccagtcgtcaagctggggggtgtgcccacgcacagagccagggaaggcatttaccccagcttcatcagaatcaaggctcctggagggttatggagcgggtcctgggtgtcttcctgcagaccgggggagaagccagcaagaaagggcaaagagggaaggatctagattttataggccaggggccttctaagtgggatggatataccccaggacgcactgaagatgatcttttgggggtacaggaagaaactattggactccttattaaatgtacttttaatgtcatattttaaaggtatatttctgtttatcatggtaaatactcaatttttctttggttatgggttgtgtatgggatcaatatatatatatatatatatatatatatatatatatactgcaaactgccatatgacatcaccttatcaccag

SEQ ID NO: 118340 - DNA, 1114 bp, Homo sapiens
cccagagagggaaggccttgacacctacgctagagagacaggctccaatgaaaagagcgagggggcggagccgggaggaatcggtccaattctcggccgggaagtctctggccgggacggggcagggcgaacctgccagtgactggactcagcttctttgcgtaaccaatactggaaggcatttaaaggcacctctgccgccacagaccttgcagttaactccgccctgacccacccttcccgatgcagtccctgatgcaggctcccctcctgatcgccctgggcttgcttctcgcggcccctgcgcaagcccacctgaaaaaggtgagtgcaccctcttttaagagtctgtttgcagcctcctggcccagctacgggtgtgcgggtctggctgagatatgggggtggccactccgttctctagaattggttctctgcactagagccttccaaagtaactaattatgggattctggtctgtacaatgagggtggcctctaaagacttgttctgctccaggccctttttggagagattaatctcacgtctgcactctcctgccctccctccaagcgccggagtgaaaatgcagacagccttaaaactaaggcattgcccccagagattcagtcctgttaaccctgcaccttactcctgacccccactccttatgtcccccatgataaggcctgctgcctcatctcttcccctgctcgaatgccctgaggtcttcctgagagttgggagggtttgagagcttttccaggccagaggatccagatttgcccatctggtgacaaatacccaggcctgtgaccccgctgcccttggttatgagccactgagacaacagtccccgtaccctccaagcttcctccttcacttctcattgacaccgcttcttccttcacttctcattcacaccgtgctgcagatccctgggaaagggaagttctgtaatcccttcacctgaaaaagcctcgttcctggcttattgcagctagcccaatgtctttcagattcaatctatgttgttgcaaatgacaagatgttcccccttttaaaggctgaatagtattctgttgtgtatatatgccacattttctttatgcat

SEQ ID NO: 118341 - DNA, 1179 bp, Homo sapiens
gttcctggctctgggttgggcacggggtgtgacatgaacaaggtcctgggtgtgggctgcagaggtgaatcctccaggagcttgccctctgctgggattccaaggctggctggagaggagtgggcagcagggaggtgggaagtcagagaaggtgcccaccaaaggccaattaggtcagtctcctgtttggaagttccaggtctatcatatcctgccttatagtttacaatacacttttgggagattatgtcttttgagtcttttagtttagtcctgcctataaaatgagtaggataagtgttatcccagcttcataggtatggagtctcatagatgaggctcagggacgggggtgcctcacccaaggtcactctgccaggagctcatttttcctgtgatctgtgatagtttcttttgtcaacctttttcttcttctccttccttgctgcctgattgtccccagccatcccagctcagtagcttttcctgggataactgtgatgaagggaaggaccctgcggtgatcagaagcctgactctggagcctgaccccatcatcgttcctggaaatgtgaccctcagtgtcatgggcagcaccagtgtccccctgagttctcctctgaaggtgagcctgggggtgggtggagaaggggaggtgcgagggtctggccagcaggggtactggggcatgtatgcttggggaactgtgaagaatttcagaatcctggattcccagagaatagtacaggacatgtagattcagacactctttcacaggttcatggaatctcaggatcataagattgaaaggaatctctgatgtcagcgccagcaacttcctggtgagggcaggagtgacggataccttgcacctggcagaagcgtcctggccttctctgggcctggtggccaactgctcattattgtctgacagctctggttggccaatttggttttgttgttaattataaaattgatataccaattagccagtaatatatagtcactttagaaaacacaagtggtcaaaaaataaataaaataggccaggtgtggtggctcatgcctgtaatcccaacactttgggaggctgaggtgggtggatcttttgaggtcaggagtttgagaccagcctggccaacatagtgaaaccccatctctactaaaagtacaaaaatt

SEQ ID NO: 118342 - DNA, 2254 bp, Homo sapiens
gtggcatgtgcctgtctgtgtttcccacctacatgggaggctgaggcaggaggatcgtctgagcccaggagtttgaggctgcagtgagtgcagtgagccatgatacaaaaaaaaaaaaaaagaattctaagtctatgtatagttcagtgtagggggaaaattcacatttgattattaatgtctgccatgggcacaataatacactatactcacacatgggccacaatgttgccattcctagaacagactatctctaagatctcatccagttaaaaattctatgattaaaatatattgctgcttttttgaagacagaagagctggtatgtttgccctggaatttacacttataacctttttcaaacctttgttttatttttttttaccaggtggatttagttttggagaaggaggtggctggcctctggatcaagatcccatgcacagactacattggcagctgtacctttgaacacttctgtgatgtgcttgacatgttaattcctactggggagccctgcccagagcccctgcgtacctatgggcttccttgccactgtcccttcaaagaagtaagtacttagggaggagagagcgttacccctgtggctaaagagatggggtttggagagaagggtctttgcattctccttctgcagatctgcatgtctctggatttgtaagccagtgtgacctatcaggaatcacttatcttccgggagcctcagttatccatctacgaaatgggagacttgaacttagatgtgatcttcagggccctttatccataataatccatgctctacagtgctatggccgtctctcatcttgtgcggctgttttgagaatgggaagaggggtggtagttcatggctgcaatcctagcagtggctctaggagaaagaccccatcagtaggctcccactgactggcggtccactggctttcccgcagggaacctactcactgcccaagagcgaattcgttgtgcctgacctggagctgcccagttggctcaccaccgggaactaccgcatagagagcgtcctgagcagcagtgggaagcgtctgggctgcatcaagatcgctgcctctctaaagggcatataacatggcatctgccacagcagaatggagcggtgtgaggaaggtcccttttcctctgttttgtgtttgccaaggccaaactcccactctctgcccccctttaatcccctttctacagtgagtccactaccctcactgaaaatcattttgtaccacttacattttaggctggggcaagcagccctgacctaagggagaatgagttggacagttcttgatagcccagggcatctgctgggctgaccacgttactcatccccgttaacattctctctaaagagcctcgttcatttccaaagcagttaaggaatgggaaccagagtgttttaggacctgaagaatctttatgactctctctctttcactcttttttttttttgtcactaagttaaaagcgaagtgagagtattaacgtttttgttctcctccggccccctgttacaatgaaggggcaaaagtatttgctcttagtctattcctcccttaacttctgtgactaatttttatttcctttctagatttgcccaattaatactagggtgcagtgtatcctggagaggtagggtgtgtgggggaggaatcccttgggggagatattaggagtgctctgttgtttacaaactcaggtacccgcagggcctagcaagagacttaaatgactgataagaaccgtgagaaacatgttgcttccaggcttgatttcgatttttcgctttttttttttttgagacagaatctcactttgtcaccaggctggagtgcagtggtgcaatctcacctcactgcaacctccgcctcctgggttcaagcaattctcctgcctcagcctcccaagtagcttggactacaggccctgccaccacgcccggctaatttgtgtatttttagtagagatggggtttcaccatgttggccaggatggtctcgatctcttgacctcgtgatctgtccaccttggccttgcaaagcgctggattacaggcatgagccactacacccagccgatttttcctttttgattaaagatgctattacaatgtaaatatttcttacacagaaagtcacagcacatgtgcccattgatacaaggctgctgaggcctggtctccagttggaaatataattaagggtggcaaggactggagtc

SEQ ID NO: 118343 - DNA, 1170 bp, Homo sapiens
aatcagtattcatttgactgaagaagtgggaagagagaagaattaacttctgcacttaaaaaattcagggttggtaggaaaggaaagatagactttgcattctccaaagagggcttaatctcttgtctccagaaactgggaccccagactcatttgggctgagtttggcccgcttcaggtctcactttccccaaatgtaaagaaaaattgaggactccaccacaaagctatgctggctgtgtggggctcaccacttgaattagaaaattcagaggaagttttgctactccattgagttagtttcccagctactcctgatttcagcagacctctgacttttctctgtgtcccagcatctcagcttttgcagtcctgtttattcctcaagcttagctattaccttttctgtgttttcttgtggactgagtgtgacttactgagagatccttcatgtcctagacttatgccattcctgatgactgcccaagcggaccatggaagcttctgggctcatcactggagaagctccctctgcctgcactgtctgctggtacagggcattttctcttgcgaactggggtggaactagaagaatgtctgtccacattcctggcccgtcaccaccactagctgatttctatgcctcaggctggaagtactcaaccagtcctctaagattctgtttctgtagcttatttctcaggggtatgcttttgtagattccccattagcctgcagtgggagttagctggtggtagattgcttagagcacagctggcagcagtgtggatcaccctgcccctctttcctccaaccttatcagcattggcagcccccatgcagaagcatctccacacacagccaatggcatgtgatggcttcccttcagaggtcatgcttgttatcgtaagatacttctaagcttccttctctgtagtttcctttgcagtttttgctcctttttgatctcagatatcaacttgtctaagcaatatttagcagatgaggtctggatttttatgtttatagagacatctctgaagctcaaaacctaccaactagcaactttaggatagtagctcataggttttggacaaaattatgtccttgtttcttggaaatcgaacaaatcagaagataccttcctcaggcttgtattgtgacattttc

SEQ ID NO: 118344 - DNA, 1101 bp, Homo sapiens
acttcttcctgattgtcacccagctgggattctgctgtgtctattttgtgtttctggctgacaactttaaacaggtaggcacctggttaaaaaagaaaaaaaaaaaaaaaaccagagcgagaatggcaaaagatgattgaagtttttgtttaggattttttccaaatcagcttttgtcaacaaaagagttaaagttttcatattttacatagatctacgtcttctatttgattcccatggaaagagctcgggcatagagaaaccgccacatgtcttgtcgaccctcctgtcctaggtacatatgatcaaacctagctcagacaattgggttgctgatgatagtcgtgaagttctctaaagatggctcactggccacagattctaaaaggccttgttcacacacctgagcctttcctcaggaacctcttccagcagaggatccaccggcctctgttgtttgagaggtgtttccgttttcttccttcccctcattctaggtgatagaagcggccaatgggaccaccaataactgccacaacaatgagacggtgattctgacgcctaccatggactcgcgactctacatgctctccttcctgcccttcctggtgctgctggttttcatcaggaacctccgagccctgtccatcttctccctgttggccaacatcaccatgctggtcagcttggtcatgatctaccagttcattgttcaggtacatgcctaggccctctcctatcatcttggttcaatattttaaaaaagccaggcgtggtagctcatgcctgtaatcccagcactttgggaggtgggggcgggtggatcacctgagatcaggagtttgagaccagcctggccgtcatggtgaaacctgtctctactagtaaaaatagaaaaattaggcatgggggtgtgggcctaatctcagctatttgggaggctgaggcaggagaatcgcttgaacctgggaggcgaaggttgcagtgagctgagatcatgctactgcactccgacctgggcaacagagcaagactctgtctcaaaaaaaaaaaaaaaatatatatatatatatatatatatatattttatatatatatatt

SEQ ID NO: 118345 - DNA, 1183 bp, Homo sapiens
tcctcagagcctcaggtatggtccaggctctgaggaaagtcagggttgctgtgtgggaacccctctgcctggcacctggataccctgggccaggtaacctgagggcaggggagaggtggggtggcagacacgcagaagtgctactagtgacagggctgccatcgctcacctgtacctatttacacccagaactttccagctccccctcatcatgcctcctccttcctacctgcctcccctctgctggtgcacctcgcccaactcattcttactgcacagttcactttatttaacaattttcatgtcccccacctcatgttttcaccttttctgggccaggcatagattaagtaactgggaacgccccctctttataaagctgggcttctttctcatctctctcccaaatgttgtatctcagtattcttcctattcgagtctccagggggtggctggacctacctggtcatttgaaacaggcccccaagctggagtttttaatctggactctctggcttgctgtgacccctaaggcaatgcttctcttccctggattccttagtgtgggtcacagtactgtgttcttagttgctttagctcttaaaacatacgaagtgttgcctaaactgaaaatatttatcttttatttaaaatcagatttttgtttttagactgtcttagatctggggctattacgaatcacttcttcttcagtaaactttgactcaacttctcctgctgaaaagaagctcgctccagatgtctgcatgggtcctcggcactcttggctgaggactcaaaggttttaatcaggatcgtctaaaaatgtacctcggtgaggaggcacagattttgcctcctgttgaccagcctggtttcataccgaaaagacattgaaggactgcagaaatgtatgggtgcaccgggccgagggaagggtggctgagtgagaggcgtataaaatggggctgtgtgcatgcaggcccatgtttcagcctcagcccacgccaggtgaaaggatcagcaatgctctgttgccatcgtgctgggacgacaccagctctattgccaccgatgagtagctgaggtcagtgtgcacagagtttgaaattaagttaatagactttacagcagctggtctgacactacgcgcagtgctcggttgtttacaatcagtggggaa

SEQ ID NO: 118346 - DNA, 1018 bp, Homo sapiens
gcacaatgctgcttcctcgaagagaagacacagagtccaagtggcaggacttgaggttggcttccactctgccttagaagttaattttccaaagtacattacaaatctctgaggccattaggggaaaaggaaggggtgtggtttgtctttgaaattacggttaatacttttagacagtaagtccggctggttgcagggctatttgccccgacagcatcagcctgtaacatttcttctctttcctttgtgccactgagtcgttccctggccagaggacataaatggtgctggtaggaggttatcagagtaaggaaggtagcagatataggtgcagggtgcctgtcattcactgtgttatttggtttaaatcaaagtgattctgggggaagctatgctctttcagtggataataaaattggtaactctattgtaaaacatgtcaatggtgtgtgaagaaaaatcaaccaatctgtaggtgttgataactagacagtactgtgtatgttacgtgcctgtgtggatgtgcacttccagcatggtatgtgtagcgatgtggatcatgccagagttcgtagatcctgttttggggtttgcacatggatcgtatgttaagctttttcttttcaataaatgaattttatttttatttttgagaggttgctatctgtgtcttttttttttttctttttatatcactcagatccctttactagatactgggttaaatgtttccggcttatgccacagagttcatatggcaaagtggcacaagcagtagacccatccatggaattaagagtcgcccaagaagaaagggactaggaatggttttttatttttttttctgttagacaatcctcccctccctaaacctcctcctgcttctctcgaaaacttgagtaagaattttcagccctctccttgcatagcagatgagcccacatgacagccagttttatatgtgtcaacttataattcagtcaaacactaatccaggtgttgctgcgaaggtattttg

SEQ ID NO: 118347 - DNA, 1080 bp, Homo sapiens
tttgtcaagtgtctgctccacgtcaggcactgtgctttgcaccggggagaaaatggtgatggagggcaacaaggactccgaggagcaccaccaggcctcgggccccagaggtcccactcctcagcctacacgcagaggaacgggcccacctcagagtcacaccactggctgccagtcagggcctgccaggagtctacacagctctgaaccttctttgttaaagaattcagacctcatggaactctgggttcttcatcccaagtttcccaggcacttttggccaaaggaaggaaggaactaattcttcattttaaaaattcttaggcactttttgaccttgctgtctggatgagtttcctcaatgggatttttcttccctagacacaaggaagtctgaactcctatttagggccggttggaagcagggagctggaccgcagtgtccaggctggacacctgccattgcctcctctccattgcagacgcctgcccatcaagtattacctgcggcgactcaaccctatgcatggagggtcaatgtgggcacatgtctacacatgtgggtgcccatggatagtacgtgtgtacacatgtgtagagtgtatgtagccaggagtggtggggaccagaagcctctgtggcctttggtgacctcaccactccctcccacccagtccctccctctggtccactgccttttcatatgtgttgtttctggagacagaagtcaaaaggaagagcagtggagccttgcccacagggctgctgcttcatgcgagagggagatgtgtgggcgagagccaatttgtgtgagtggtttgtggctgtgtgtgtgactgtgagtgtgagtgacagatacatagtttcattggtcattttttttttaacaataaagtatctttttttactgttattttctgtgtcctttagcctgtttggggtcaggggaacgatgcaagggtccacaggccgttccaagattcatggattttgggagctggaagggatcctagagattgtcaagcaacagagattcccaacctggcaacattacctatcccagacacaaaaccagaactt

SEQ ID NO: 118348 - DNA, 1043 bp, Homo sapiens
tgtttagtgtttttgattgcttcctatctctccactgttgtatagctatgcatcttagacatttatatagaattgaaatttgtttccctttaacttcctcccatgccttctgggccacaaaacaaaaaaccctgccttcagccacatattttgaagtgatgcttcttgcattgacaatttcattcaacaggaggcatttgaagtagaagtagcttcataacaccaaaaagtggactcagtgtagaatcgtgggttcctagttaaggaaggaaatgtttgctttcccaacaattctaaaaaatgcatccaatgggcagccacctgtgacacaaagcctagttcattcctattgcttggcttctgaaagctctgccccatctgtttagagggagaccccctgggccagtttggcatcagccaagttggagatgagtggaggatttcctcaaggaagaccctggaccgcgagcatacagccaagtacttgctcagagtcacagcatctgatggcaagttccaggcttcggtcactgtggagatctttgtcctggacgtcaatgataacagcccacagtgttcacaggtgagagcctggcgaggggtggagtgggtagtgaaggcaaggaagataagagtgaggggtgggagaacagagagtgaggagcaggagaagggagattgaggggcaggagaacagagagtgaggggcaggagaagggagattgaggggcaggagaacagagagtgaggggcaggagaagggagattgaggggcaggagaacagagagtgaggggcaggagaaaggaggaccgagggacccatctctgaggctggccatcactgacctcacctctcttgcttctccccagcaagcctcagactagctcccaggggcagggaccattctaggtaattccttggcccccatagggatataccaagctgttcaagactcatggcccacatctctccccctacattcccaacaaaggtctatttctctgcagaacatatccagaaggaaagtaacataagcattct

SEQ ID NO: 118349 - DNA, 1017 bp, Homo sapiens
ggtggctcagggtttggtcagagtctctattgaggatgtcaatgacaatccccccaaatttaagcatctgccctattacacaatcatccaagatggcacagagccaggggatgtcctctttcaggtatctgccactgatgaggacttggggacaaatggggctgttacatatgaatttgcagaagattacacatatttccgaattgacccctatcttggggacatatcactcaagaaaccctttgattatcaagctttaaataaatatcacctcaaagtcattgctcgggatggaggaacgccatccctccagagtgaggaagaggtacttgtcactgtgagaaataaatccaacccactgtttcagagtccttattacaaagtcagagtacctgaaaatatcaccctctataccccaattctccacacccaggcccggagtccagagggactccggctcatctacaacattgtggaggaagaacccttgatgctgttcaccactgacttcaagactggtgtcctaacagtaacagggcctttggactatgagtccaagaccaaacatgtgttcacagtcagagccacggatacagctctggggtcattttctgaagccacagtggaagtcctagtggaggatgtcaatgataaccctcccactttttcccaattggtctataccacttccatctcagaaggcttgcctgctcagacccctgtgatccaactgttggcttctgaccaggactcagggcggaaccgtgacgtctcttatcagattgtggaggatggctcagatgtttccaagttcttccagatcaatgggagcacaggggagatgtccacagttcaagaactggattatgaagcccaacaacactttcatgtgaaagtcagggccatggataaaggagatcccccactcactggtgaaacccttgtggttgtcaatgtgtctgatatcaatgacaaccccccagagttcagacaacctcaatatgaagccaatgtcag

SEQ ID NO: 118350 - DNA, 1089 bp, Homo sapiens
gcacttcacacactcccattacaatgccaccatctatgaaaattcttctcccaagacctatgtggagagcttcgagaaaatgggcatctacctcgcggagccacagtgggcagtgaggtaccggatcatctctggggatgtggccaatgtatttaaaactgaggagtatgtggtgggcaacttctgcttcctaagaataaggacaaagagcagcaacacagctcttctgaacagagaggtgcgagacagctacaccctcatcatccaagccacagagaagaccttggagttggaagctttgacccgtgtggtggtccacatcctggaccagaatgacctgaagcctctcttctctccaccttcgtacagagtcaccatctctgaggacatgcccctgaagagccccatctgcaaggtgactgccacagatgctgatctaggccagaatgctgagttctattatgcctttaacacaaggtcagagatgtttgccatccatcccaccagcggtgtggtcactgtggctgggaagcttaacgtcacctggcgaggaaagcatgagctccaggtgctagctgtggaccgcatgcggaaaatctctgagggcaatgggtttggcagcctggctgcacttgtggttcatgtggagcctgccctcaggaagcccccagccattgcttcggtggtggtgactccaccagacagcaatgatggtaccacctatgccactgtactggtcgatgcaaatagctcaggagctgaagtggagtcagtggaagttgttggtggtgaccctggaaagcacttcaaagccatcaagtcttatgcccggagcaatgagttcagtttggtgtctgtcaaagacatcaactggatggagtaccttcatgggttcaacctcagcctccaggccaggagtgggagcggcccttatttttattcccagatcaggggctttcacctaccaccttccaaactgtcttccctcaaattcgagaaggctgtttacagagtgcagcttagtgagttttcccctcctggcagccgcgtggtgatggtgagagtcaccccagccttccccaacctgca

SEQ ID NO: 118351 - DNA, 2592 bp, Homo sapiens
tgtgtccatagacaatatacagtgctgtgtcatgctagattttgatctacccatagcagaagtgctgaattttgattttaagtttctgtgtccccagttctcagccaattaggaaacaatcaaatacaccaaacagacctttgtttttgagaccctgaaaccttagagctggaagggccgttagtaattatggccatctcctcctctttgctggaaggagaaactgaggttccgaatggtgcactgctgttctctgagtctcagagcagtcagtggcagagctaggggtagacctgggattctggctttttgtcctgctttaaatatcctttcctccatgctctggggcaggctaactccccggttgcctcccaaggctgggtgtggagcttttccatgcctcaggccctcccctgcctccttccctgcaggtacctctcccacaccgagctggctccactgcgtgctcccctcatccccatggagcattgcaccacccgctttttcgagacctgtgacctggacaatgacaagtacatcgccctggatgagtgggccggctgcttcggcatcaagcagagtgagtgtctgaacaaagaagcaaggggcatgggcagaaacactgctcccagggtgctgggttgtcatccccccactctccgctctcttggtctgtctgttgtctgtcctctctgcctgtctctgctctctctgcctatttgactcctgtctcttgggcgtcttcctgatccttctctgtccatccaactgtccctctctctttcccttcctcaagcgttagcactcacccgtgctaaacactattttgggaactggcaggcacacagagaggaaacaggaagtgtaacttggcagcgtgtgtaagagacagggacaggccagagacagagagagcgagattcctccgtcactgacttcctgggtgaccttgcatggccacctagacccctgcccctggggatgggtgggagtccactgactccttgggaagtgcgttatcatcgacacagccttatttttaaccgtgctcttttcttgctttgcagaggatatcgacaaggatcttgtgatctaaatccactccttccacagtaccggattctctctttaaccctccccttcgtgtttcccccaatgtttaaaatgtttggatggtttgttgttctgcctggagacaaggtgctaacatagatttaagtgaatacattaacggtgctaaaaatgaaaattctaacccaagacatgacattcttagctgtaacttaactattaaggccttttccacacgcattaatagtcccatttttctcttgccatttgtagctttgcccattgtcttattggcacatgggtggacacggatctgctgggctctgccttaaacacacattgcagcttcaacttttctctttagtgttctgtttgaaactaatacttaccgagtcagactttgtgttcatttcatttcagggtcttggctgcctgtgggcttccccaggtggcctggaggtgggcaaagggaagtaacagacacacgatgttgtcaaggatggttttgggactagaggctcagtggtgggagagatccctgcagaacccaccaaccagaacgtggtttgcctgaggctgtaactgagagaaagattctggggctgtgttatgaaaatatagacattctcacataagcccagttcatcaccatttcctcctttacctttcagtgcagtttcttttcacattaggctgttggttcaaacttttgggagcacggactgtcagttctctgggaagtggtcagcgcatcctgcagggcttctcctcctctgtcttttggagaaccagggctcttctcaggggctctagggactgccaggctgtttcagccaggaaggccaaaatcaagagtgagatgtagaaagttgtaaaatagaaaaagtggagttggtgaatcggttgttctttcctcacatttggatgattgtcataaggtttttagcatgttcctccttttcttcaccctccccttttttcttctattaatcaagagaaacttcaaagttaatgggatggtcggatctcacaggctgagaactcgttcacctccaagcatttcatgaaaaagctgcttcttattaatcatacaaactctcaccatgatgtgaagagtttcacaaatccttcaaaataaaaagtaatgacttagaaactgccttcctgggtgatttgcatgtgtcttagtcttagtcaccttattatcctgacacaaaaacacatgagcatacatgtctacacatgactacacaaatgcaaacctttgcaaacacattatgcttttgcacacacacacctgtacacacacaccggcatgtttatacacagggagtgtatggttcctgtaagcactaagttagctgttttcatttaatgacctgtggtttaacccttttgatcactaccaccattatcagcaccagactgagcagctatatccttttattaatcatggtcattcattcattcattcattcacaaaatatttatgatgtatttactctgcaccaggtcccatgc

SEQ ID NO: 118352 - DNA, 1026 bp, Homo sapiens
ttcaagtgattcccctgcctcagcctcctgagtagctgggactgcaggcatgctaccacacctggctaatttttgtatttttagtagagatggagtttcactgtgttggccaggctggtctcaaaactcctggcctcaggtgatctgcctgcctcagcctcccaaagcgctgggattacaggtgtgagtgtgtgcccggccttcgccaggtgattttgatgtgggtagctatatggagaattctttgaggtcatcccaggcttctatttttgtgaatgagatgctagtacccatctatgacacctccctcccctcgctgtgagctttggtctggctagtctctgcctgctctggccttctgggaggggtgggagggcccgactggtccagacaatctccatggacctcttgtcacacacagtctctactccctcaggtgaagaagatccatgagaatgagaagcgcctggaggcaggagaccaccccgtggagctgctggcccgggacttcgagaagaactataacatgtacatcttccctgtacactggcagttcggccagctggaccagcaccccattgacgggtaagaccccagaccctagagtgaacagagctcaaggctggcaggtgcactagctatggccagaaagcctctcagcagcctatactgctccaagccctggcatccacagtttgcctggggattggagcagaaggatgaggcatctggagaaaagatgtggacctgggacaaagaaaccgataagacactctcatgctgaggtgaaagtcagtaggagctcaaaatagctccataatcctgcaagtactaggcgtggatatctggataatgaaggagtgtgaattaagaaggagtaccaggctccaaggggtggcaggggacaaggttgggtcagccacacgccccctgtccttcagcagaacatccaggggcagagcagccacctggcactgtctaagccccctcctaaggctcagccccaatagggcccaactgaccctg

SEQ ID NO: 118353 - DNA, 1114 bp, Homo sapiens
ttcaggtccaacatttgggattctaagttccaaagaccaggttggaatcatttctaagaaggttctggtggttacacattcctgagtcctctactccccactccctgccaagctgggcctgtggatagatgtgatccctcagcctcccagcttcaaacacctgccagtggttgacgtgaacaacatgggctcagtctcagctaggatcacacccaaagcccagcacccagtaaggtgcaggagccatccatttccctgagcagagcagattaggctgaggaaagcagcagccatgcctttgcacaatgcatttctagggcattcttcccacacataatctcctctgctcattgtcctgtgaagaaactgtggcctggagaggttgagccactgtgccaaggccaccaatgcaggtggtatgtgggtgggtgggggcctggggtggggagcacggcccaggcagggtctgtgctgaccgcccttgtgtttggaacctagacatccccccttgcctggactctgagctgaccgaattccccctgcgcatgcgggactggctcaagaacgtcctggtcaccctgtatgagagggatgaggacaacaaccttctgactgagaagcagaagctgcgggtaagtggtctctctggccttgctggccccgtgctggtgaagatccagtcccattcctagaactgggcccccagctgcagggcggcatcctgctccggagcgtgcatttacccctgagcaccaggacacgtacttctcttcctgcctttggaggctgtggtgcacattaacatcttagaggctctgagaagtcctgcagcagagacctgctccctttgcttaacctaacgttaaacaaaagagacacaaacagccctattcctttttcctttggagtctgtggatcttaagctttaatgagcatattaactaccccaagaagctgataaaatgcagattccttggccccatctcaggccactgaaacagtgtctctagaaagcaaggcccaggaagctgcattctaaatactccccaggtgatttatgtttattttatttttttgaggcaaagtctcactctgttgccaggctggagtgcag

SEQ ID NO: 118354 - DNA, 1010 bp, Homo sapiens
ttcctttactgccacttaagtctgttttgttgggcctcagctccctggctcagtgtcaacagctgactttctaagccattctagaaagcttattctggaatccagaaatgccccactgtgattgttcaatggagacccaggaacacaatggttgcttcaatcttcaggaaagccatatggtatctagtgtttctgggtcccagactgagcctccagccccccagaagtgcctgacctctatctcaagctaaacctctaatccccaggctgaaccagctgctgccctaaatgttgactgtgaggctcagtgcaagagcaggcaggactcagggctgtccaaagcccagagtgggggccacagtcaaggactgtcagccctgagatctgtccaggtaggatgggggtggatgtgctagtccaggtgatgctaactcccttgtctttctgccctacagatccctgccagaaccaccactgcaaacacggcaaggtgtgcgagctggatgagaacaacacccccatgtgcgtgtgccaggaccccaccagctgcccagcccccattggcgagtttgagaaggtgagggctgagagacaggggcagggggaagggattgggcacttcggaatacaggatgtctgctcaggaaactgttggcttggtggttctatggggcagtgccagtctcagaagtccccttgctagacctagtcccagcaggaaagaggggatgagtcagagtgctctgcctggcactggatcttttcagcaaccagcaagactttaaacagcaccatcaggttccaagccctgtgccagactcttagagctaagagtataacagcatcagcaaagaatcaggtccaaaaatacgggttctggggccaaactgaaggttgacttcaaacctcatctccatcacttattaggtgtgagatttaagctaagttgccgaaccttttcaggtctcagttttctcacatccaaagagaggataaaaatagtccttaac

SEQ ID NO: 118355 - DNA, 1216 bp, Homo sapiens
gagacaaatggttgcattcctttgagtccttgatcagccttcccctgaatacacaatttaatctggctcagtgaatctgcatttttacataaacaataggggagaggaagcaatcagataagcgtttgtctcaggtgagcctcagagggatgactgcatagaataggaggcaggtttgtcctatgcagttctcagcttgacttttccccttagcttagtgattttggggtccaaggtatattttcctttcacactctctttccctaacacccctggtgacctctaaggcagctcaacagaatcccaggcatactgcaaaacacagcaggcctatagattaaatctggattcccaaccctgcgtttgtgctttctgtgacctggaacccttcagctacccttatgggtctgggatgggagtggggccatttcacccattcttctccctcaattccaggtatctgtgggagctaatcctgtccaggtggaagtaggagaatttgatgatggtgcagaggaaaccgaagaggaggtggtggcggaaagtatgtcccttccctgtaacttggcacatccaagctgcccttggctgcctgggcctggggcacgaggacagcctacatgaggctccttccagcagaaatgcagggtggggtcctcagtgggctatgaaggaaacacggctttgacttaacaagtgggaaactgtggcactcagtcccctgggatctgggcaagatcggtttccaggccatccatgtgtgtggtaggaaggagagttctccagctggaaatgggcttctcccctcatagctctttgccctgagtccaaagctgagtttcccagtcccacggaggtcgctgatcacatctggtcaccgaaatctcccattgcttctgtatcagcccgtgccccacagagaagtagaactgagagaagagatcaggaacttgcacactcataagctcattctatttcacacagtccaaggaaacgaggtcctgaggaaatgcaacctgacataatccgtaccatgctatccatgcgttagtgccctgggagagaaatgacctaggggctctggctccagccctaggtgcaaagcatttgtactcaaggggttaagagcaaggactttggaagcggtccaaccaagctttgaacctaggcttctccacgccagcttgcttagcatctcggagcctcagtttctcat

SEQ ID NO: 118356 - DNA, 1147 bp, Homo sapiens
ttatttagaaatgtttgcttttttgaaaaaaaaaaaaaaagtgtctatattacttttgcaattaaaaaaaaaaggtggctgggcacggtggctcatgcctatactcccagcactttgggaggccaaggcgggcagatcacttgagattaggagtttgagaccagcctgggcaacatgacaaaaccctgtctctactaaaaatacaaaaattaaccaggtgtggtggcatacgcctgtaatcccagctgctccaaaggctgaggcatgacaatcacttgaacccaggaggtggaggttgcagtgagctgagatcatgccactgcactccagcctgggcaacagagtgcgtctctgtctcagaaagccctagtatagaacagagatcagcacatgggccaaatcctgctcacagcctgtttttgtatgttcaggaatagagttataaaaaaaatacacagaatatacaacagagtctatatgtgacccacaatgcctaaaacatttgctttctggcctgttacagaagaagtttgccgatccctgctctagaggaaagggcaagggtggttgtgagtagtaatttagagcctgaactctttcttgctgtaactgggagggtctgtgcttcctctccccataccccatttcctcttcctgcaggagttaagtatgacattgacctgcccaacaagaaggtctgcattgaatctgagcacagcatggacactctgcttgcaaccctgaagaaaacaggaaagactgtttcctaccttggccttgagtagcaggggcctggtccccacagcccacaggatggaccaaagggggcaggtgggtaaggccccagcacttgctgaacaaacctacagctcacacctctcatcagagcgaacaccttggcctttgagagcttgagtggagcgggagagccctctgggttcttttcaatccactgtccaccttctttggagtggttacaaatattttattattgtctaatgcaaatcacaagttcagggaattcttacagaccctgtgagtggacagagcactgtgtaatgtctcccagagtcctctttcagacttgagggttgcagttcatggttagcagggtttaagtttacagtatgtgaccctaagcagtgca

SEQ ID NO: 118357 - DNA, 1138 bp, Homo sapiens
actttgagaccagcctggccaacatggtgaaaccccgtctctactaaatatacaaaaaaattagccgggcatggtggcggacgcctgtagtcccagctactcgggagtctgaggcaggagaatcgcttgaacccaggaggcggaggttgcagtgagctgagatcgtgccactgcactgcagcctgggtgacactgtgagactcagtctcaaaaaaaaaaaaaaaaaaaaagaatcatcccacttactgactttaaaaacctactttaaacctactggcttttaaaatctacccattttataagtctttataaaagaccccagaggccatgaggaaccagaactacccagttatgcatctggtggtagagccaatcttgagattctcctataaagaagtgattactctgtccatgaaatagattttccatcaccctcaaatttatttttgcccctcagaggtggaggaggagagcactgaactgtaatgtttatacccagaagctggtttctggcttctgacctttatactgtgggggatgggacctactccctgtagtcagcgacagaaagtttcaggtatctgttgactttaggtccttgggcagcaaaaaactgtgctccctaaaaatgtgtttctagtttcagagcttctgctgagagtcagggttatgagggctggcggtgtactttgcttttccagaaccagcaagatttccctggagcgaagaaagcctaggttcatattccatactcagtagttatttgccacatgactgcaagctacctagtgaactcttgggaacttcactttcctcctgagtgaaataagataaatagctctctttccaggctcagtgaggactaacttagatactgtacaaagataatttgacatgtaatagacaatcagtagatttagctcttatgttgatcttgcaaacccttcaaagctttggctcagtatataagtacaaaccatagatgaattgattttctgctggttatcctagagcaagactcagcaaacttttttttttacacggcaccgatagtaaacattttagtcttcacaaaccatagggtctctggtacaactactcaactctgccattctagtgcaaaagtaaacaaatgagt

SEQ ID NO: 118358 - DNA, 1018 bp, Homo sapiens
actgacatctcaggtgtcatttcctgtgggtcttgccaggtgccttgagacaaatcctccaacaacaaagtatggataaggaatctgatagaatcagccctaccagttgggcaagtcagcctgtggcaatggtagaagacagtattaattgccctggggcttggggagtgaaggccaccaggattttttgtggggggtggcaatgaggaaaaggctagcttgatcatcactgtattctgtatcttctggggattttgacaaaaaaccctctggagcagatgatgggaatgaggagggcacttggcaccatgtaccacaagataacagctgaaggaaagagggtgttagtcaagggatttcctcaaaactggaaagggaagaaaaaaatatatctatatacacatactggaaggggaagagtgtgttacctgagagttttctcagacaaatgcccgagagcacagggtttggaatcccagaaacctctgaaaatctgtgccccagcttgccaactgggtgacctcaggcaagttgctttatctcactgccttgatttcctcatctgtaagatagggacaaaaactttgacctcacaggactgttgttagtattaactggaaaaatgccagtaaaatatgtcacacagccactgatatatctagtccccaagaaatggtagctcctgtgtagacgtaggacaggtgggctagagctataggcaggtgaggccgggcatggtggctcacgcctgtaatcccagcactttgggaggcccaggcgggcagatcactttaatgcaggagcttgagaccaactttggcaacatgatgaaaccctggctctacaaaaaatacaaaaaattagccagacgtggtggcccgtgcctatagtcccagctacttgggaggctgaagtgggaggattgctggagcctgggaggttgaggctgcagtgagccgtgatcgtgccactgcattccagcttgggtgacagagtgaaagtgaaaccctgtctcaaa

SEQ ID NO: 118359 - DNA, 1579 bp, Homo sapiens
aggggtttgtactatcctcggtgctgtggtgcagagctagttcctctccagctcagccgcgtaggtacgccggggtgtgggcggggcagggaggccagaggactaagccgagccgcagcacttgtgagagggagaagtctgagtggcgctcgcggcggccgcgccagtcgcgtcccccaccccaacccccaccccaacggccgcaggcgcgcgcggcggacggacgggcgcgcggcggctcctcgctcccgctcccgtcccggctggggcgcgtggccgtgtccgccgcgtgcgcgtgctgcgtccaacggcctcgcggggcaggagtaagccgcggccgccgcctgggccccagggcggtctctggggccaggggtcccgcgcccagcgtttcccgcccgccaccctctccgccacgcgcccgcggcaccttttcctcccctggccaagggatccagtcggttcggaccagaaggaggctttcgtttagggtgggggcagcactaaagtctgattggagtcttgcggtccgcgcgtcgcagaagcgccttcggttttgcagagagcaaagagggagcagcgagtgcacggagtggtagtaacaaccaatgttctttccacgccctcactgtgtgtccggcactgtgcggagccacttttctgcctttcatttgattcttgcagtgagctggcgaggtgggtacggctatcctccttccttagcggcccaaggcacgggtttggagagcggggtcacaggcacgcacgggaagggcggggatttgttgacgccgggccctctgactccgagctccccgcttcccaagcctgtttttagtctttgcccccagagcacttgtccctcggggcagcatcagcctcaaaaggccacctgccgagaaggctgcagcggcatttgtacttgggctagttctgggcttccagggagacaagggttggaagtgggaatgtgacaaaggaaaagggtttgggcttcctttctacgtgtacttgtacaggccctgggtagatgtgccgccaccgtagcttctggaaaaaagtagggaaaacgatgagtaagtgcaaatgaacatggactgtgttcctcatcgggtttgaatctcagattgctgatgggaaattcccgccagcgggaagttaggctccggttttagacgttgaatttttttttctctactttttttttaattggaggagacttttgcagaaagaccttgagaagattcactttatagttgaagggaatgaggtgcaaagcgacgaatttaagatctcactagcatctgtgggttaaaatacggaattggaatagaaaggttggcgcccagttacagtatactatttggacctctgtggagcgtgtcatgctggatgaattactggtgttggagatgtgttggaaaaaacaactgtgacagtcgagatctgtggatgaaagtttgtgtacactccgtttatttagcatttactctgctgggttcttgtgtatatgcagaaacaagatgcttttcttcagggactggagcttatatttttctagtagttaccatcttttaga

SEQ ID NO: 118360 - DNA, 1028 bp, Homo sapiens
gcattttaacttagacttaaagttgagcaatttaagttgtcaaatggaaaaacactagaatgacctacatttaaactgtttaagcttgagtccagctaattttattactgcttgaggcaaaatagaatgaaattaccttacacattattgagggaaaatttcgttagtttctacttaaaatattaaaaaaatacagttcttggcctcaggcaaatggttatcacttgggcaggaacatgaaaattacgtgattatttcacaaactggtgctctaactgattacttgtgcatttatcaggaacaagtgaattgaagcaaattgtggtaatgtaaggcttggcaaggctgccctacatccctaccaagtcatacgtcagttttgttggagctgcttaccggtacaaaagtctaagcttttgtacctcttacaggtagaaaagtagacagttctttgtttaactcagtttgctgttcctgagctgacactgcaccaggggaacattaggagattttggtaatgtttgtttgtgacctacttagagcagtttttcttttgtaacttatggtttttttttttcccactcgttctagtattttgcatagaaagtgaacggcagaaggcagttttaagtttttgtaaaagtttgtgaattttatatcgtccttaggactgatggggctagtgttaaaagataaaatttaacataaagcttacatttgtgactaaagccaattttatattttttttctttatttttgtcagtctgataaaactgcccacttggtcttttaacattttgcaaattgattttttttttaactttcagaatttaaataggcattgtatgtttgtttaattatattgtgctttggcttccttggacgaaactattactgactttacaaagaagaatggataattgtggaagtaggtaggtcaaaaaaaaaaaggaaagcctcgcccgccccccagtaatttgtcaaaagcaagtgggaaaaatctctggtagtgcagtactgcccttcca

SEQ ID NO: 118361 - DNA, 1338 bp, Homo sapiens
aagccataggctgtgccttaagtacacccttgtttctgcactgaggttgcctagatttccctggagtgtatccacctgtcttgatctgtttaagaattttgcggatgagcattagtattaactgtaacatatcttttcacgtgatgagaaagaacaaagatttttttaaattgtgaacctgagtaggttttaactttggagtggggaagggatacactaagataaaagatagttgttaagtattctgattcctgaagttttttttctttcaggaaaacagtatttttgagataaagtaagatttgtggaagagttgcaatagagaggtcttgaatacccattatccactgttaacatcttatgtaatccaagtacatttaacagaactgagaaattaacatcgataaaatactgttaatgaaagactttatttggatttccttagtttttctactaatgtcctttttctgttctaggatccagtccaagatgccacattgtatgtagtctcctgatctgtgtcagtttctgtctttccttttgtctttcgtgaccatgacacttgatctcatttggatttgatgttaaggattagactgaagttacagatttttgggggaagaataccacagaaattacccttatcacatcagattgggggtccataatatataactggttgaatttaacctgatgatttggttcaggtggtatctgtcaggttagtgtttttttcccctttagatactattccttagatgctagtcaccaagtccagctcacactcaaggagagaggggaattaggctctactttctagagggaggagaatgtgaatttgtggaagtatattaaagctactgttattattttgggggagatgcttcgaagccatggaaataaagttcccctccttaattttagcattttaatggatctcgtctgcagctattattacttcggggttctaatggtgattttttttattttcctcattccttctacagtataaattttctgtgaggaagatttgtgtattcttcatgttttttctttttttcatttatatcactatagaccacggatattaattttattctttgggttgtaatccacaattatccttgctgatgtttacttatttttgattattatttattttatatttttataaaatatcgtccaggctgtctcacactcctgggctcaagcaatcctcttgtcttggcctctcaaagtgctgggattacaggtgtgagccactgtgctggccacagtttattttgttgttcatgttgttccagcttttttttttttttttggctcctttgtcctttt

SEQ ID NO: 118362 - DNA, 1209 bp, Homo sapiens
tgaagggaggtgacaggtggtaaatgcgaagagtttggaaaaatagattgacagtaggcccagtgatgttgatacttttcttgctctgagcacagatgttggcttctgtattcatgttactccagttctgggaaaagattttgtttctaaattcccacgatttagagaaccagatatcaaatgtttgaatacatgacataatcctgaaacaaaatttacaaaaatttaatatattctcaagttagtacacacaaacacttgctgtttttccttggtgtttttgacaacttttttaaagtaaaaagaccacttaaatactatcgtactcagaattaacatttgacattttgcattgccctctaagactcctttttttctatacgggcttccattcccttccttccagggatctttttcacatctttccaggctgttttattgatggggaatttttaaaaatagctttattgaggtataattgacaataaactgcatgtttttaaaatgtactgcctgataatttcagacaccttttgtaatcccagcttctcaaaagactgaggcagcagagaggattacttgagcccagatgtttgaggctgcagtgacctatggtcatgctactgcactccagcctgggcgacacaggagactcttaaaagaaggtatacccatgaaaccatcaccacaatcaagattgtgaacctatccattacccccaaaagttttctcatgtcccttttccctctttcttgcttgttccttccacccttctccctgcaggaaatccttgatctttttatcactgtagattactttgcgttttttagaatttttttgtaaatacattatgttctttttttaattgctcagtgctagtctgttgtgtaggcatatcacaattttttggtttacctgttggtgggcattgaaaaacggcagaagctgtgtgtttccagctttttgactgttacaaataaagcttctgaactttgtgtacaagtctttgtatgggtatacgcctttatttctcttgggtaaatgcttaataggggaatgtttagatcatgtagtagatgtatgcctaacttttaaagaaactccctgttttccacagtggttgtaccattttacattgccaccagcgatgtttggggggttccagttctgccagtatgttggctaacagtgtgtatggtcagtcttttt

SEQ ID NO: 118363 - DNA, 1232 bp, Homo sapiens
tctagcctgtgtatctatgtacggtatctggtatttgtgtatactaaaaacacttttaaatatatgtaacgttatcacacagtacatatttggcaactgatttttctttttaataatgtttttgagttatgtgctcgctttctggcaggcataaatagggtgacatatgtcttggtttgccagggacagtcctgattcacttcagttaacctgacactattaatagtagttgttttcaatcttaaaagtgctctcatatggttgtcttaggtatagaagtttccctaatgtgaataaaccacaacttaatatccattccttatttgatggacatgtagattgttatcaatgttatactttacagatagggtggcagttatttgtttttgtcttgtgtgagtttgttttgtcttgggtgagtttcttttgtatatgtacctagaagagaactgctagattttcatcagagtgtttttgattttattagatagtgcaaaattgttctccactgtggttgtaccagttgagacttcatcttcagcagtcctgtaggctcttttttttacttggttgccaatgtttggtgttgactgagattttaatactttggcgcatctcttgtaaggtatctcctgtgagaagtgattttattaattgcattttcctggttacttactctgttttgtttgctgtccatttagtactttcctgagaattggctgctccatttcatttgcctgtttttctcttgggttactcttttagtgatttgtatgcaggtttatatacattctactaatcttttattatatgatattatattttcttactataaaactggcactgaaaatgggctatgaaggcatttggctactttttattttgttggagtgagctttgccattaaaaatgcaggtggagtatgggctgcctttatgtttccctgcccgtctgttaaaaattggaggataatgctcatagttatttccccctccgccgctagctgatggagtcttgctcattcgcctaggctggagtgcggtggtgcgatcttggctcattgcaagagctccgcctcccgggttcactctgttctcctgcctcagcctcctgagttgctgggactacaggcgcccaccaccatgcctggccagtttttttgtatttttagtagagacggggttttaccgcattagccaggatggtctctatctcctggcctcatgatcgcc

SEQ ID NO: 118364 - DNA, 1826 bp, Homo sapiens
agtaaatatatcttcacaaattgcttgtttagaaatggatcaaccagagtcaatctattttgtctacccctgtttaaaaaaaaacagctaaaatttttctttcttttctgcggtagttaaatctgtatatattctctgtttgcctgtatgtttaagtttgggataattttatctcttcccccgtgaatgaaatgctgggatgatctcattgcaggttttttattcagaaagtgttttttggtaatagcttacaataattggacttcttatgggacaggtgcctttcttggcattcaaaggtgttaattttacatgatcacaattttgatacagtaggaattattttgagtataaacatcttgtttgttaacttccccattttattttgaaattttttaattacatgatagaatgaagtagtaagcatatttagaatttttagtcttgtagtttctttttaaaagatgctatactaaaagtttatctgatttagatgggccagaaaatgtgatagtttgtccccggatgtcaaaactatgttgtttaagattattgcctttgaatctaatattgcctcaaataagaatgtgcttgtaactttacaactggaacactcttaattgggcttaataacttaagaaaattaccaggtgctgtggctcacgcctgtaatcccagcactttgggaggctgaggcgggcagatcatgaggtcaggagtttgagaccagcctggataacatagtgaaatcccgtgctaaaaaatacaaaaattagccgggcatgatggcgcttgccagtagtcccagctactatggaggctgaggcaggagaatcgcttgaacctgggaggtggaggttgtggtgagccgagatcgcaccactgcactccagcctgggcaacagagagactctgtctcaaaaacaaaacaagaaaattatggtgggaagtatgttggaaatatatacctttgaggttcttacgtcttgaatattggggataatgatgaattcttcataatgatttcccccttttgtattcatatgattgcaatacatttgtataaaatctcaactggtctgtatgggctctgtttgtttttatgatgtttgttcatgttttaaacgacttgctgaaatgatcttgtctctgagttggtttcagctaaatgattcggtcttttcccctgtgtttgatccttcaggtttggacatatttgactcttttccccccaggttgaattgaccaaagcaatggtgatggagaagcctagtcccctgctggtcgggcgggaatttgtgagacagtattacacactgctgaaccaggccccagacatgctgcataggtaagacatttttctcctgcatcatctaatgctgtcttttagtatgtggtacttatctttgagattctcccactcatcatcttatgctttgtagggttgttgcataatacttatttacatataaatatcccccaattttttatttgagacagagtctcgccctgttgtccagactggagtgcagtggtgcgatctggactgactgcaacgtccacctccccagtttaagtgattcttctgccccagcctcctgagtagctgggaccacaggtgcccacaaccatgcccggctaatttttgtattttttttttttttttttttaagtagagacggggtttcaccatgttggccaggctggtctcaaactcctaacctcaggtgattgatccgccttggcctcccaaagtcctgggattacaggcgtgagccactgcgcctagccccaaaaaataatttttgaaagttaaactaagttat

SEQ ID NO: 118365 - DNA, 1948 bp, Homo sapiens
tagttccagctactttgggaagctgaggtgccattgcactccagcctggtcagcaagagcaaaaaaaaaaaaaaaaaaaatgtgcacatcaaagatcatagccccggcacatcgaagctgcaatgagctatgattgcatcactgcactccagcctgggtgacagaatgagaccccgttgcaaaaaaaaaaaaaaaagtttgccagtatcagacgtgaaaaataaacttaagatacttgaagatgacaagtaaatcatcttcccattttacagattttatggaaagaactcttcttatgtccatgggggattggattcaaatggaaagccagcagatgcagtctacggacagaaagtaagcatttcaagccttatttaggctgttaagcaggtagaaaataactcataaaattgaagtggatcatacttaatagatttgctgataaagatccagtttctcaactttttagtaaaagttgatgtgttttattactatttgattaatatatttgttgaaatacttatgtgatgtcagatttgttaattttgtatgatatattctaaagcttttgtgtgttggaagataattggctttagcatggggatcatcttttctaaactttgaaaagtgtgttaattcaggacagttatttaaaaaactcaagcgcggtcactgggaatagagtatacaaagaaacatcaaaattcagtctgcatatcctgtaatttaaatatacacattctctttgtgttgtgttggaaggttttttttagttggaggttatttaaattttaaggcattctcagttgattattattattattattatttttttaaggaaatccacaggaaagtgatgtcacaaaacttcaccaactgccacaccaagattcgccatgttgatgctcatgccacgctaaatgatggtgtggtagtccaggtgatggggcttctctctaacaacaaccaggctttgaggagattcatgcaaacgtttgtccttgctcctgaggtatgtgtaggaatgattattttgtagtgatccaatacatgaaaaaagaaacaatgaactgttgtgcatatctttaaaaacacttgaaatttcagacttacagaaaacttggaataatagtacactaactcctatatactccttacctagagcagctgtcaccacttgcccacatgtgtataattctttctctaaaatagtttagtgggcatttcctaagaataattctcttccattctgtagtacagttatcaaattcaggaaatgttgatgcaatataatctataatccatttttaaaatttggaaattatctcaataatgtcttaacagtaattttttttccttgtccaacatggaatctataattacacattgcatttagctatcatgtctctagtctcttctaatctgcacttgttccttaatcttttgtttttttttattgcattgacatttttgaagagcacactttttttgtaggatgctttatgggtgtcattcagtgcttcacattaggcatattatgtcatttagttgtgatatgaattttgattagttaggttttgccactgtaaagttaaatatcttttctctctctctctttttttttgagacggagtctcactgtatcgtccaggctggagtgcagtggctccatctctgcccactgcaacctccgcctcctggtttcaggctgtcctcctgactcagcctcccgagtagctgggactataggcgtgtgctaccgtactcggctgattttagtatttttagtagtgatggggtttcaccatattcgtcaggctggtctctaactcctgacctcaagtgatctgcctgcctcagcctccgaaagtgggattacaggtgtgagccaccatgcccagccttattttttctctttttgatttgtaaatgaaggatgggagattct

SEQ ID NO: 118366 - DNA, 1129 bp, Homo sapiens
ggagtatgattgtgaattacaggtttaattacagtttttttcttttaaaggaagtatctaacttcttagtataatacactattatataaactgtctcatttaatacagagagtattgaggtatatgttgatatctttcttttttgttttttgagagaagagtctccctgtgttacccaggctggagtgcagtggtaggatcatgacttactgcagccttgactgcctgggctgaaatgataatcccacctgagcctcctaagtagctgggaccacaagtgcaggccaccattcctggctgatttttgtttctgcttttgtggagactcactctacaaaaaactcactgttgcccaggctagtctcaaactcctgggcttaagcagttctcctacctcagctctccaaagtgttgggatttcaggagtgagccactgtgcctagctggtacctttctttttacagaggagtaacagccttagaaactgaataactcataatatataattggatctgcactcaggtgtgtcttatacctactgcgagcaatctttttcaggctgcactacccttgagtgtttatatcaatatttttggagacagacttggggaattttaaatatctgctgaagttaggaatatgattgcctttttttttgagacaaggtcttactctgtcgcccaggctggagtgcagaggtgcagtctgggcttactgcaccctccacctcccgggttcaagcaatcctcccgcctcagcctccctagcagctgggactacaggtgtgggccattatgcctgtctcatttttgtatttttagtagagatggggtttcaccatattggccaggctggtcttgaactcctgaccttaggtgatctgcctgcctcggcctcccaaagtgctgggattgcaggcatgagccactgtgcccatccgggatatgattgccttataatgttttgaggtgtgggctgtggcatttacatgcttagggctttgtcagtttttggatatttatcttgtggtgaggtaaagtgttctgagcaaacaaaatgtatgtgagtgtagtctttttaccggctattgtagagtgggcattttcagtcttggcactgttgacatttt

SEQ ID NO: 118367 - DNA, 1661 bp, Homo sapiens
cacgaggtcaggagatcgaggccatcctggctaacatggtgaaaccccatctctactaaaaatacaaaaaattagccaggcgtggtggcaggcgccttagtcctagctattcgggagactgaggcaggagaatggcgtgaacccaggaggtggggctttcaatgagccgagatcgcgccactgcactctctagcctgggcgagagagcgagactccgtctcaaaaaacaaaaaacaaaaaaaagtctgttcttcaaagccttagttctgtccttaaagtcagtgccatgattttaccaaattgtcctactttgtttatttatatatgtttttcttcactgttgttttgtgaacattgcgaaagttaatgtatatgtgaattcagtaagtacaaattactttaaatatctttttctcacttagagtctgaagaagaagtagaggaacctgaagaaagacagcaaacacctgaggtggtacctgatgattctggaactttctatgatcaggcagttgtcaggtaagaagattttgttcacatgtccggggctgcataagaacttgcattgtctagtctttccctttgttggagggcatttacatattctgagaattacctcaaaataataatttctcagaagaatggttttgtttctggtaattttgactaaacaaaaatatgtaacttgtttgttaatagtaaattgtactatgaaggcaatctactattgcttagtttaaatagtatcagtttctttttggtttagttttttcttggtgttaagtgaaaacttgcatattgtttatcaagagttgaatgtattgaggtattaaatgctttgagggaatatgaagtggacagagacctatttaattagagatcgggcataaattgatataaataccaatatgtgagttaagtagcaataaagaatttcattacgttagtaagtgcatcattatacctttgggttttttcccccttgtgattagaacagaaatgtgtttgatagcaatagaaatccatatttacttgttaccatgtgatactgaatgttaatattcagtgcctgaagggtgttttcaagtgtttcttaaggtgtgatgaactaatcaggttactcacttgggttgctggttgaaaatgaagattcatggtcccactgcaaacctaccgaattagactttcaggaggcaaaacatctgcagttttgtttgtttttgttctattgagacagagtcttgctctgttacccaggctggagtgcagtggcgcgatcttggctgactgcaacctccgcttcctggattcaagcaatccccctgcctcagcctcctgagtagctgggactacaggcgcacgccaccatgcccggctaagttttgtgtttttgtagagatggggtttcgccatattggccaggctggtctggaactcctaatctcaggtgatctgcccaccttggcctcgcaaagtgctgggattacaggtgtgtgcccagccccctctgcagttttaacagcatttctggttgatttatgtggaattttaagaattgtattctgaatcataactattttctcccccaaattccttatgtgcttgaaagagtttttgtgtgtttgtgttaaaagccacatatcataaaatttgccatctta

SEQ ID NO: 118368 - DNA, 1055 bp, Homo sapiens
cttttattgaagataactttatataccttataaacagactatacccattgaatggcaactttctttcccgccccccccgccccagcctattttgagagtttttctgatgttgtatgctaaatgaattgtaatagttgtgggattccagccataaagtggtttggttcattttgatgtcctgattcatttgcttatcagaatttgccaaacaaatggattccagttaagttattgagtggcattttaaaaattactttttaaaaactcagatagatatacaattcttagatttttgttttggatagaaggagctaactctgtgttctggtttctgattaataaatgatggaggaattttttgtgaaataaatggtggcagaatgatatttctcaaattttcctgtcaaagtaatgacatggaagaacatttagaggagcctgttgctgaaccagagcctgatcctgaaccagaaccagaacaagaacctgtatctgaaatccaagaggaaaagcctgagccagtattagaagaaactgcccctgaggatgctcagaagagttcttctccagcacctgcagacatagctcagacagtacaggaagacttgagggtatgaaacgtgtcttcatttttattctattcctagttattttttttaaaaaaagtttctgttcttttgtattgctgtttggttgacttgtagatacattttcatattggtggttcatttcagggaaatttcttagatattgagccatatgtttgataagagagaggtaagatgtgtattagtttatttcatcaaaagaaaccactcccttccccgaggtaacttgaatgcctgttagaccagaaattttaggtgccactgtagcaccctatcagtgattccttttctatttaatatttaatcttttacactataaattattacatacttgttactacaagtgcataacatcttttcaagaaaaataacatggcagaatatactttttctatgaaattttattgaagataactttatagtggaagtagaaatgaactgctgaag

SEQ ID NO: 118369 - DNA, 2116 bp, Homo sapiens
ctttgggaggctgaggccaggaggattgcttgagtttaggagttcaagaccagcctggtcaatatagtgagacttcatctctactaaaaagaaaaaatagctggacatggtggcacatgcctgtagtttcagctgcttgggaaacaggtgggaggatcacttgagcacaggagatgtaggctgcaatgagctgtgtgcatgccactgcattccagcctgggcaacagagcaagattctgtctcaaaaaaaaaagtgagtagtttcttgaacctaagcctctcggatttgcttggtacttgatcatcagtcccaaggaatttcagtactaaattttgaatagctgaaagagaagaatcttaatatatatatataaactccatcctgcctatgagaatgtgttaccgtttgttctgtacaggaaatcaagagttagtagcttttatattgttttgatacctggtataattatgtaatgttggtattgctcccttagacattttcttgggcatctgtgaccagtaagaatcttccacccagtggagctgttccagttactgggataccacctcatgttgttaaagtaccagcttcacaggtaaggtcctaataaaacttgtacattaggcaaatttacttctattgtggtaatttgattcaacagaggtttagagaatgtgaaaactggtcaggtgcagtgtggctcatgcctgtaatcccagcactttaggaggctgaagccagctgatcactggagcctaggagtttgaaaccagtctgggcaacatagtgagaccctgtctctacaaaaaataagaaattagctgggccttgtggcatgcatctgtagtcctagctacttaggaagctgaggtgggaggattgcttgagtcccggaggttgaggctgcagtgagtcatgattgtgccactgcactgcatcatgggcgacatactgagactctggctcaaaaaaaaaaaaccaacccaaatcaatgtagaaacagaactgacatataggacggaagagaagggtataagatggtttttaatgatttttcttgtgagggaattgtccattttgtagtttaaaacttgttagctaagaaacttcattaagaaaaaggataagcctgctttgttttaacacaaaagttaacttaaaatttttcagccccgtccagagtctaagcctgaatctcagattccaccacaaagacctcagcgggatcaaagagtgcgagaacaacgaataaatattcctccccaaaggggacccagaccaagtaagagctcagaagggcgatttctcgtttgggggattttgaggtgagagcttattttgggagggcagttgatatttatatactttaaaataaaaatattgtagggttgatggaattacctgtttttagtgtagagggaaaactattgaatgtgagcagtcattgaaagatgtcttctttctcttgtctttcattgatgtttttgtctccttttaagtccgtgaggctggtgagcaaggtgacattgaaccccgaagaatggtgagacaccctgacagtcaccaactcttcattggcaacctgcctcatgaagtggacaaatcagagcttaaagatttctttcaaagtaggttattgagttttgaacactaaattcatctagtgtctctctagcactgtccagtagcaatagaaaatgagccacatatgtaattataaattttctagtagtcatggttaaaaaaaaaaaggtaaaaagaaactggataattttaataacatttaacttaaggcattgtcatttcaacatgtaagaatattgtgagagatattttacactttttcataatctttgaaatccaaatgtgcctcccataattttacacttatgagaggcacatctcaattcagactagctatatttataattcaagtgctcagtagtcacatgcatctagtggctactgtattggactgtgtacatgtaatgtttaaagataatggtctaagtagttatctgagaatgtgtttcacttgcaggttatggaaacgtggtggagttgcgcattaacagtggtgggaaattacccaattttggttttgttgtgtttgat

SEQ ID NO: 118370 - DNA, 3860 bp, Homo sapiens
ctcctgggttcaagcaattctcctgcctcagcctccttgaatagctggaactacaggcgtgtgtcaccatgtctggctaatttttgtgtttttttagtagagacggggtttcaccatgttggtcaggctggtcttgaactcctgacctcgtaatccacccgtctcggcctcccaaagtgctgggattacaggcatgagtcaccgtgcccagcctctgctggttcattattacagctttctttatctttgatagtgatagccagctcatcagtactcttaagtctggtcaccttgattcttacagcccatcatgttcagaggtgaggtccgtctgaatgtcgaagagaagaagactcgagctgccagggaaggcgaccgacgagataatcgccttcggggacctggaggccctcgaggtgggctgggtggtggaatgagaggccctccccgtggaggcatggtgcagaaaccaggatttggagtgggaagggggcttgcgccacggcagtgaatcttcatggatcttcatgcagccatacaaaccctggttccaacagaatggtgaattttcgacagcctttggtatcttggagtatgaccccagtctgttataaactgcttaagtttgtataattttactttttttgtgtgttaatggtgtgtgctccctctccctctcttccctttcctgacctttagtctttcacttccaattttgtggaatgatattttaggaataacggacttttaaagaagcaaaaaaaaagactgaatttccttgcttactttgcatatacagactggattttttttttttttttacagccatttccccaaaggaatgtcttgcatattactgacatttggtatgtttcattcattggaatatttcttattttctacgtgtttgaaaagcctgtaagaaatacaggatttgataatattttgaaggcaggaaaaacccaaattgtttcttctttgagagtcatgactaccttctggtgtggagaaattgccattggaaaatttgacaattttgattctcactggtatgtttaaaaactgaataaaaggaatagaatttttttttgataaaggatcacaaaacaattctaaaacctaactgtttttaccattgaaatttaaattgtgataataggttttaaatgtctagaatgcaactgataggcttttcttgaactgttagtttttttgaagtagttttttcatgtttaatttgtatttgtaaaaaaacaaaaagcaaaaaaattcccaaaacccagataacaaccagagcaaaactgttgtgccttctatttatctttgatttcagtcttggcaattgtttaaaaaaaaaatctagatttgttttattaggttcagagtatgtggggaattatagaatccctctttcatcactttgtgtatgtcttttgttaacatatttgttatgccttattctaaaattgagtctcaaactggaatgcctttgaagacagatgcttctatagaggttctttgacctaaatagttcagcatttgtatttttattctggtatctaatcagattcctaatcatagcccgtaagaaggaatgttactttaatattggactttgctcatgtgctcgtgtccgcatttttttttttcttaaaatcatagccatatggtaaattttctattttgttatggttctcttttattgatgggcatgcagtgggtgttacttggaaatggccaatttttattaaaatatttctggaagaaaatttaatctggcaatatagactaatactcgtttcacatatgtgttatttgttgagtgctgtgtgtgagatgggtgaaggttttgtttacacgtgtgaaacaaacttttgtgtgattgtcattactaattgaagggcaaccaggttgtaaaattcagcgtatttattttcttaacagtattcatctttaggactgtcgtttgaggatagcataggaatatttggtttgcattactgagaaactctaggtttgctgtgatggttaagaccacagtgaagttggtattaccagtttggttccagttcctcaaatatttgaaaattggcagcatctcctttacataaacttaatgtaactgaatcacatggcttttttgtagggttaaagtaactttggtaaccacttttggcccagatcactgataataggaagaaatacaacttatacttttgtagcttatattaagcatgtggtgggtggaaagaaaagtttagtctgagtcactttggaaaaaaaaattactttgtggtaacttcaaggtcataaattatggatagcctagaaattatccttcatgagtgaatactaaattatacatttcaaaacagaagttcttcctacttggagacttaagggcattaactagatgcagcaatcctcagcttggtgttatcacatactagaggacatttggaaatgtgtgaaatttggaagggttgttggagagacatgcatctggcatttattgggtggggtctaaggataccaaatgttgtgtaaaaatgaagcaaccccattgagaacactgatagtccctattcctgtgggtgggtggagctgtgggattaggaaaactggaatgaagactcattcttttgaaactcagcctcagataaataacaaactaggaaatggaaatctgtttcaagaattgcagtaacatctactctaaggaattagtaatttcactttttattatttgtaccaaatgtatgtgtgtgttgtgtatgttggtgtaaatgtggagaggtggtagcaatacatactgatgctgcttgtaatttgttgcagggaattactgcacaatctcagaaaatagaaagcttccccagtgctttctgtcatcagagttgggatgattgtgaggttttgaatgatagtattggacctaagaaataggattagcatcatgatcagaactgttgagaatccttgtacaattatgtacattattgcatgtagagtaaacctgagagcttagagatgtatacgtttccactgctggaaaatcattataagttagggcaacattttctataggtggcagcagtaggagctcatcacattgaacattttcagattttaaaatgaaaattttcatccgtaggaatggcccaatgtatagttattagctactgagcttagaactcttgacccatgagattttttttttaaatttttatttttatagaggcaaggtcttgctatgttgtcaggctggtctcaagctcctggcctcatcagttctcctgccttccaagtagccggaactacaggtgtgcaccattgcacctggcctcatgagtattttagttagataagatttgtttggttcagtgggtcttagttttttaagacctgttaatttgtaattagacatcttgggccttaaactgtatttttgttttagtggtgaggttgggttttactttgtgtattccagcgttctcaactttgtcagatattgctagggaccagtgagatagataatccaaaaataataatttgactttggttgagtatgtcattaccacagtgttagttgaattgcactttaggttagaaaagttaattttcacatctgtgctgcgggttaggtgatattgtcctcagcacaatagatgaggaagaaactgaatcagaacagttaaatgacaggcttccaagtcatccatgtagcaaggagcacatttgcctcccaaactgatgctttttctctagaaccataatgcccccctaattacatttcagtagcatagaccgcaatgaacttcctactgtagggagacttgagtctggaatacattcagaac

SEQ ID NO: 118371 - DNA, 1988 bp, Homo sapiens
agttttcatacccctgttttctcaattttcttagaactgtctttaatggcccagctctaccagggcttgttgtctaaggacattaacttgtgctcccctcagggatgggtttactactagctgtcagaaagctattgggtatcctaatgtgttaatagctgaaactcagctgtaatttctcctaaatacttcagcattttgcattctgtacattgtggtgctttttccaccttgtattgttgtaactgtaagctcctagggggcagcaatttggtcttaggcgtgtaccctgtttagtgcctggcaatgccatgtttatatcaaggtcttaatattacttttgagttatttctcccactcttcatggaagtgatgctccagccttgctaaaacactgagggtcctcccgataagccaggcattgtgattccttggcttcaagtgccttctgtcttccccgaaggtccactgagatctacaatcccccctttcctctgatctcttgccatgtaagtaattttttaaaagatcagtacaagagctatattttttcctaagaaaaaatttcaacaggaatggggagtagccccgttttggggctgatctgtccagaatttggagtgaggaacaaatccattctcatctactttccacattttccctcttgtttgaggtcctgttccaaccttcatttctgaaactgttctagagcactttgtctttctcgtagttcataacttaccccttcagtctagaattagaattacattatctgttttactactttactagactgtaagctcctagaagataaggactagggagttcatctctgtattccaccagaaggtacagtgactcataactagagtctttagatgaaacttactgagttgaataacttaatatatttctgttttcattcccaagggaggccatgtctggagatagaccttgaatttaataaattttaggcactataccatttcagtggagaaaattgttgggaaatttggggggatggatatataagggggaggaagtcactggccagtttgaggtgcttccattggtctgggtaactagccatttcttcctgattgtgcctagtatatcccagacagtttgtttctatgcagaagaattttatatgaaattttcatttctttgcaaaaacttgttccttctttcagttcatgacatcatccatgctaaagtctgagtcatctgcttccatttttgttattccccacatccagtcttcagctaagtcctgtcagttctacctcaagtctttcccgtctttcttcctcacctatgtaatttcagtagtctctcagcttcacttaacctcttactccagcctactttatacacaatgttagattcatcttactgaaacatagttctgaccatgtattccatgtatgtgttctctctcccctattagactgtaagctccttatgggcaggatctgtgtctgagtcatctttgtatcttgcctagcacctatcaataaatacttcttgaatgaacaaatgaattctcatttctcgacataaagccttgtctaaagtgagatgttttccaggtcatacataggtttctccctggggtaattggaagttcttgcatataaagttggttaaatagtaataattatgagttaaccacagaaaatttcagaaaactttaatttttttccattggaatcagcatggatatgtgtatatggatggttcaataaatatacttttatatacatgtttcacagaaattttacattccatcttcaaactgcagaaatagattttttttttttacaagccaaaaaataactgccataacttttgtgacttcatgcaaaaaaaggggggaagagtaaggggcaaaagggaattagttgttcaaggttgagtgtccagtaagaagtaaaaatgttacattaaggaagcgattgcttaacacgctgcttaaggtggtagcc

SEQ ID NO: 118372 - DNA, 1051 bp, Homo sapiens
tacaaacaccatgcaacaaagaattattaaaaggaaatcaccttggttatgcaaaagcctcgttttaagaaatgagaagggcctcagaatgagccagaaaaaaactaccagaaaatgcacttgtccacggacaaggccacaggcaccggatggtgttcacaggactgacggcctctcagccttgaactccagctgtctccctgaaccaactccctgtaaagcctaacacacaaaatgaaaacactatacagccagccagcaaattcattcagaaagcacattagaagggaacaatgcccagagatgctggggagaggggcttatccacacagtgcctatgctttgtaatgcaagctcttatgaggggtactgaggccccaaagcttttgaaactccttacaaaggatccctttgtgattttctaaagttggtattgtccaagtctcctgaggctaattcaatgcaattagattaccactctctgcctttgaattgggctgtttttcagtgtccgttgctctaaattagtttaccatcttaacagggagctgccgacaatcattaatcccagccatgaaatgggcagcagccctgagcagcatgctctcttgcctcatattctgggcaacccacaggcacatggagaacaagcctctgctccctttctcacaagtacattcccaactcttccacctgttcacccccagagaattgcactttccttcagagtgtcttgagtatcaacagaatcatggaatcttgcggtaggaaggactcttagctctagaattcaatggctgtcaaagttagctgtgaggggcttgtcaaaaagacagattcccaaacatttgttaagaggacagatcttatattaagtattcttactgcaaataacaacaataataataacaaatatataaaagagcaagaggaaacttttgggggtgattgatagtttatggcatagattatggtgatggtttcatgagtatatacttgtctctaaactcatcaagtcctaaatatgtacagcttttgtatgtcaatcaca

SEQ ID NO: 118373 - DNA, 1078 bp, Homo sapiens
aatgccaccttattctggctactcctgcagaaatgaaggagtggggttattttagtatataaaaattcaggcaggagagatggtttaaagaggaagattgttgccttcagtgtttgattgaagtattcaggttctcacagtattctttccagttgttgtaattcataaattatttgaaaagaaacttttgtagaaagtccaagaataataactctagataaagattagtgggacactcaggcaaaaatgttggtctttctttgacatgttgcaaaatgttatcaattttgtcatggatataatttgcagcccatggatataactggttgataagccagagaaaaataatttagtgttctaaaattcatggcatgtgtggtttattaatgccatgtactttctcctttctggaataaaatctatggctttaagaaaactgagcatatgtaaactctgtgatgattaccctttatcacatgaattcttggaaatagaaagtttcatctgcttttttaaattcttagtagatatttggcattgaggagaaacttgtagactattatagccatgtgaattaactgtagcaaagtgccctttttcttcaaattgctccccctccccaggatgacacacttcatgtcatagctgaaccctactctactggattcaaggccagtaaatgcaatttagagaagcagttttatgtttgcagatattctgagtctcttcaggatgtgtttcgtgtctaccatatatgcaggataaattctttaacagcaaactccaaaggaatgttgaagctgttttagcaatgaggatttttttgtttgagtgttgaagtgggccatagtcctttagaaatgatgttcatttatgataggatttaacttctaaggcatagtttattttttcctctttcctttttgtttgttttaatgtattctttagcatgtttttgatataacttttatcctccagatcttaagctttcttttgctctcttcagcaatttaagagactattaagctgtcgtcttcctaaaagctattttggtatccactctttttaaaaaaattct

SEQ ID NO: 118374 - DNA, 1034 bp, Homo sapiens
tgtttgtattattagtcaactgttatgattctttccagcctcatctctcagtgttctcttctgtaaacctcactactccaacctaattttctgtcacactcctcatcctctatattcttccttactggcctttattctgtttctcaggtgtaccaagctgatttccctgtgcttacaactctctttgcctaactatttgtatggccaattccttcagatttcagctgaaacataacttttcagagacccttcctgaccacccaaactcaagccaccttctacccatacccaccgttactccattttattttctttatgtatgtttttgtttgtttgcttgctaattgccttattaggagagagaagagcagactcctagtttgtattattcaccattgaatccccagcactggcacagtgttagtatatatttgcaataaatgaatgagtaaaatgccagtatcctatattttggtcttgctagatatctcactgtttgcctacacactttgcatttttctgtttccaagcctttatatagttcatgctgtttggtgttttgaatttgagaggttaatgcttaagtaatgggaaggtatagatcagagctagattgttcctgaatgtttttgtgggaggatatagggaaagaaccctacagtgaaattctgggaacacaggtctgctttagctcattcgggtagccttgggtgtagccccacttgctgatccttcaaggcctaactccagtactgtatgtgtaataaaacctgttttctcagttagaatgactctcaaagtcttctctggattcctattacctcatgacagctttgaacacattctgtgtatgtaaagttaataaactaggtggtaataaacagtttctgagaaaccaggactctttcacttgcaaatgacagaaactcaagttaagaaacttaaaaaataacagaaactaatttaaaagaggggaattcagtagctcaagaaaatagaaaatcaaggagcagaactggcttcaggcatggctc

SEQ ID NO: 118375 - DNA, 1308 bp, Homo sapiens
tacttgtcctgattggaaaacggttcttgaatacaagtttctaaagctgccttgagatattgagaaggcagtatagcatggtgaataaaaggatgggttttggaattagacttggattcaaaatcaagatctgccatttactaagccatgtgactttgagaagttacttaacattgagcttctgtttcctaacctgtaagaagagtatgctaattcctctcaagtaataaggattaaatgaaatactatatttaatatgtggcatatagtaagcactcaataaatgtagctgttattactttcattattaggagggcataaataaataggtaaaaatatgcattttaaaagtcttagcaggaaaccaagaaattaattttgattttcttaagttgctccattgttcctaatttcctaatcaagccttgacatgacagtcctcagttatttataaacttatttgtttgtagtgccattaacagtatttgttcaatttactcaacatctggctttgcatagtaatcagaaatctcagtctttaaataccattcagagaactccaagtagttttctaaacagatggatttgtgtctatgatatttttttctcctacttgttcaccagagatcagaactctgaaaagatagcactggattccccccaccactcactgtgccccagccttccccagtgattttggttgagaatgcaatagtgaccttagtatttaattatgtctctatgaagctgttttttaaaaaagtggtggtatcagaggggagagaataccatagaaactggttctggttatgatgttggttatcttcattttccatgagcatcctgggctcttgcccctctaccatatgtacctgactccttttttcagaaggagtcttccagcccctctccagagtccctccaaagcactaaaccagtctcttttccatccttacacatttttattctaatgcaataactactttttctactcaattctaaacagtagatgacagtaatcttcaaaatttttttatcacaactctaagcagtgtttcacattcagacataatatgtgggtatttggatgtttataaattatataatctgtaaattcatataaattatatgtgaatataaataatttatatgtaaattatataaattatatgtactaccataataatgtataattaacattctaaaatataccctaaaatagaatttttaatagaatgagataaatctctataaataaaaaagtccattttttttcctgccctccattgaattattttgtgaacctct

SEQ ID NO: 118376 - DNA, 1049 bp, Homo sapiens
agctgaactatgtgcttttttcgtggaataccatttttacttgaaaggataacagtcacagagactattcagaataggataattggtacacattttcctgaaaatgaatgaagtgaaccttttcttcaaggagagcaactaatttatttgtgagtcatgataaaaatttaagtgaaggttgaaactttgtaaaacatatttgctgctgtggtgagcttgacagcttcccagtgcttatagactcttcttatgaaattggtggtgatcatatttgttaaaatatcactttttgatattttaacaaggaaatgtgtcagcatttggaaagtctgcataactcagagaaccaatattttctaaatgtcaaatcaccatgggtaaaagacctaatggattttaatttagtgtacaaaattttatgatatggtttcaggtatactgcaatatggttcattgcaactaatttttaagaaacgaccacttgttgagttttaatgtggtattaaagaatattaataatgatctgaaaaggctattaaaatacttcttccctttccaactatgtatctttgtaaagttggattttcttcatatacttaaagcaacataacagactgaatataaaagtagataagagaatttagctgtcatctgttaaactagatattaaagagattcaaccctgatggcactgttctcactaaactttttcttttttgaaaaatatagttttttaaaataaaaagtaggtttatgttaataagtggtatgggtttactgttttgaatgaattaataaacactttgttttagctttatataaatatttataactttttatatgtatatgtataaaacttacactaaaaaagctctttaatgttctcagaaagttttacaagaacaaggtcctgagaccaacaagtttgagaattaccagattaaatgacctaaactgcaatgctttttagaaatgtctctgattgctttttagaattgtacatctttatttctttctgttcatttatctgttcatcttttacttcactg

SEQ ID NO: 118377 - DNA, 1054 bp, Homo sapiens
ttcttgtatccattcaggtgaaatctatccttaattctctgagtggagaagaattagagactctaaaagttgaattagagcaactcaaagaaacattttctctagcagaattttgtgaagaagaggaagaagagaaaaaaggtaatatgaaaatttagtatctgagtggagaggatgcagtgtgtttgtatgcagtgcattgcccttgaaataaattatttactcttattacactggcttgattttacttttttggtgaaaatttttatgcaaattctctgtgtaaaattctctgcagccttgcacctgactaggcattgatgggggcagttggccttatgcccatgtctccctgcctccttccaaccaaaccctttgtggcttctcaaggtctaatcttgcaactcacatctttgcctatttttgcagttagaaagctgttctcatcagattcttgcctcagtttgactggtcattcatatgagctttcatattcctaggtactttacctctgcctctctgactcttgtaacccctgattctgtcttgaattgaagcatgcaggatggcagttatctaaaatgtgggtgatagtttgtctttttttattttgaaaactcttataccatattttaatatcttcatttctcagaaaatgtaaatgtagatactatgtatatttgcaaaattatcaggaaatgagatgggtcaggaaatgagatggctgacgtaaagtataattgccaggcaactgaatattaagttctaagggttgttttattgacattttagctggaaatatttctaagatatacactaactgaccttttttttttaaaaaagtggaatctaatgaatacagttttgccttttcttcatgaaataatcagttataaacattaaaagtgaatggaaaaattctctcaggtttcattaagacatagggccaatcacccatgtagtaggttaaatcagtgatgaacaaagtgtggtctgtagacccttgaattcccagaaccctttcagggagtctatgagtcagaactctgcatca

SEQ ID NO: 118378 - DNA, 1001 bp, Homo sapiens
atgctaaaccctgtcagggttttttgtttgtttgtttgtttgttttaatgtttaaatcactttcagagaaacacctggttccttgggtgtgatttgcactgtctaggatcaaattatgtggtcaggcacggtggctcacggctgtaataccagcactttgggaggccgaggtaggtgaatcagttgaggtcaggagtacaagatcaacctgaccaacatgatgaaaccccgtctcttctaaaaataccaaaattagctggacgtggtggcgtatgcctataatcccagctacttgggaggctgaaacacgagaatagcttaaacccgagaggcagaggttgcagtgagcagagatcgtgccactgcactccagcctgggtgacagagtgaaactccgtctcaaattatgtgtgatcgtttttctttctgcagctcctgagcccaccagatttgaatagcagtgccaagaatgaaagggcaatcctctgtactctaacctgtctaagctttgcttccttcaattctcagaactcacccttgagctctcattgtttgctacagtgtaatgcctccatctctttttaggttttacgagaggcgaaggagaaagaagagatacggacctccaatgaggttaccgtggaaacagacaagaaaactcattatgggctactctttgatgaatttcaaggcctttcacatctagaagctctggagatgctttcccaagaaagtgaaataaaggtaattccaagccaaaatctcaactggaaaaagtcttcaagtaaaagaatgctgcatggtttcctttctctttgtacatttggaagatgaagtgtatgttttgttagaggcttgagatgccttcgaaatactaccacaaaataaatttaaaaactaatgtttgattgaactaattgctaaaagcagaattagtcaagtattatttctttaaatttaaacaaaaaaggttaacaaagaggtcttaataggacatgtgt

SEQ ID NO: 118379 - DNA, 1055 bp, Homo sapiens
acacatcccctccctcttgtaggagagacaaatgccaaagagaatgaaaactcctccccagtggctggggcatttggtgtattctctaccatctctactgctgttcagagcacagtaagtaaaaaagtgcaaggtggtctgttcctttccattattataatgggtttgcatatctttctctctcttttctttgaacagccatgtggactgattacttttaaaggagtccaagccactgaagatcggtcactttggtcttatgggtggagtgaatgctacttgaaaactttcattaaagcaataaggaagaaagtaggaaataaaggagtagcaataaataagggagtaggagttacagagaggcaatatacgtattattttatggattaggaattcttaatttggtggccctaaaaaatgtctactttacaaaaatatttttctcatagttgcatcttttaggcaaaggggaaatgtgatctttatgacagatatttgcaaaactatgtatgattaaaaacatttgtaagaggattatctaggaagctaaatatctttgctacatgaggatagatagctagttttttttaaattttaactttttattgaaatatacatacagaagaatgtaacaagtgttgtttgaattttcagtgtgaaacacccagagtaagaaacagtattaccgtaatcagatctccccaccatcttgtgtcctctcccagttttctgtgtcttctgctctccccctctcctgcaccaagataaccataatcctgacttccaccatcataggttaattttgcctgcatttcagctttacataagtggaatcatatatagtatctaacttctttcatgcaacattatatttgtataatttacctatgctgcagtttgtgtggtagatttgattttctttgttgtatttcattgtgaagctttgtcacgttttatttattcattccacagttggtgagcattggggtagttttcagtttgtagctattacaagcagagctgttatgaacatttttgtgcatgtcttctgatga

SEQ ID NO: 118380 - DNA, 1069 bp, Homo sapiens
tcctaaatgattttaaaaatcttcaagtttgatttttgtttcttcagttttggtgacaaatagcaaaaaaaaaagttatttttctcattaggacaaggcatttcaaatgtcatcgagaaggcagagacttcccttggaatccctggtcccagtgaaatttcaactgaagtcaagtatgtagcaggtcagtatatggaaacataaagacctagaattatgaattgaaatggaacagttgaactaatttttcagtaggtatttattggacatctgatactcagggcatcgtgggactgtagtgagaaagagtatttagaatctttagttcccaattagacatctatgtcctttaactgcttatgtgtccctttacttcactttccacatctgaaatagaatgatattttatatctcaagtgactgttataaacatttaacaaataaggccatgaatatacaatataaaaattgcttagcattttgcttggcataattgaataagagactaataagagttagctgaatctgagtctgttgtgacatgataaaaatattttaatgtattgttttgggggtgtattccttttgtgttcagatttttatgaagactacgtttaattctagaggctagccttgatcagacagaaacctactctcaaactatgaaggctagaattataaccagaaatcgagagggcctgggaccagaaaataggaatcttttcaaggcctggtttgcattcttcatctctcatgggctttattgtctctcactcttgtttctttttgctgatctgtctcagtttttttcttgaagcagactgactttcgctgcttattttcctcagctccagctttatattgaatcctggcatcagttatttccacttctgaattcctaggtaaaagaatcagtctaaacttgggtcatatgtccatggatcacttatggcctggagacaagtcacatgtataaacatggctgcaaaggactatggatgtgaactggaggcactgttcttagtgatgcctgcatcagttaaactattttagctgcaagtaacagcat

SEQ ID NO: 118381 - DNA, 1273 bp, Homo sapiens
tgggtaaattgtgatacatctatactatggaatactactcagaaataaaaaggaaggaatactaatacaacttaaatggatcttgaggggcttatgctgagtgaaaaaagtcaatgtcaataggtaatatgctgtatgatttcatttatataacatcttgaaatgacagaattacagagatggaggacacctgtccatcagagagatcagtaattgctttgggttggaaggagtgtcggaagtggttatggctaaaaaaggatagcacaagggatccttgtgattgaactgttctgtatcttgattgtggtgatagtcacacaaaggtatacatgcgataaaattttatagaactaaatacaaatgagtgcgtttaaaactgataaagtctgaatgagatcagtggattgcattgatatcagtttcctggttgtgatattatatttgtgtaagttttaccattgggggaaactggatgaaggtatatgggatctctgtattattccttatacttgtatgtgaatctatgataatctcaaactaaaaagtttaaacaaatactttataccaaagaagcctatataaattttttttgggctttcattttaccagctgatgttctaatcatgtcagataaagatgatattgagactccactgctaactgaagcagcccccatccttgaagatggaaactgtgagccagccaagaattctgagtctgttgaccaaggtgccaaaccagagagtaaatcagaacctgtagtttccactcggaaaagaccagagaccaaaccttccagtgaccttgagacttcaaaagttctccctattcaggtatcacagaccacagaaaaagtagggtatctattaaaatattaggattaaaaaatgttggggctaaaagaaatttggcataaataccaatttagaattgctcttatttctttctctttacaaccctaaaatacagtcttttcagttctataaatgcctttatgaataattgcttttgctatgtggtacttacatgctgatagcatatatctgccagtcaagcaatacatttctttagctaaataatatgtatttgttcacccatgcttttggctaataattagataccttgtctgtacattctgattttcctctaattttttcatttttctttgccttttgtttttctgcctactgggaaattaggataatgtttccaaagatgtaccccagaccagatggggttattgggggagctggggcaagtccatactctc

SEQ ID NO: 118382 - DNA, 1646 bp, Homo sapiens
attctctagagtgttctgcctactaaaactcaagataggtgtctttcttatcttcacctctctccatcaatagtttccagagcctgaagctctggaaagttaataagtttgtagcagacacctttcacactaccaagtcgatgagtgtctgaactcaaaattttgagcacttgccacaggcagtggccctgtgctaaggacagaaggtttttagactctatcattcataagcttacagtcttttgaacggataactaactgctaagaggaaaactgataagtcttataatggcgtactcttaatgtgctaggggactgacagagcaaaaaaaaaaaaaactcatctgacaagagggtgggcatgagagggtttcctgaataagatgaaattagagttgaatattatagagagggtacagtttcccccagaaagatattgacgggaaggggcagaaagatttttaagcaaaaggaacaactagtaaggtgaaaagttatttagagagaataaagtaaaacaagcgtagtttaggctttcagccatggcaggaaagctgggtagattataggatttaagcaaagaaacgaatgataatgataatcagcctctaggtgaggaaactaaaaccactggagcacatcatagctaatttgtgatagaggtaaaactaaagaccagacttaatgtttaaatccattcattcctcctgcaagcaattatcgtacatagaggcacctctgggcttctcatgactttctgttctgctgcctgaatctattcttggagaattacaatgccaaattggaattttaagcttatctcatgggcagtgagaaatcaccagtagattgtaaaattaccctgaattgctcagatttgtgtttaggaccaattctgagtgtcacagtgtttggatacatcatagaggtaaaaggagttaaggagatccattctgaaattaaggggatagtgtggtatacccaggtgagataaaaggatatgagttaggacagagacaacaggacttaattgaaaaatgtgtaggaggtggaataataacaatagcatatatttataatttacccacattagttcatcttatcctcaaaactaccctatgatgcagttactgttaatattattttatttaataaatgtgaaaactaaggccttgcaagcctatggcttcacccaggggtaggatcaggcaccttaactctagagcccattctcctaaccactgagccatgattgtcttacaattttgatactgcaaaactggaagaattgtctggctattatctaagctgttcataagctgaacaagtagatctgagggtaagaggagttctgttttaactagactgagtttcaaatagagatgtttcagactatagagggggaaaaatggcctgggaagatcataaatctaagcctgtttcattgatgtttttgtcatttgcatccagtagctattcagcaaatatacctatggcaaaaaggatataagttatgggtataactgaaataatcctgggtttaaagcaaagctctgataaatacagacgatgtttctccaggtgccagaagatatgttgaagtttgagctcagactgaccaaatgctagttatggggtatgtgata

SEQ ID NO: 118383 - DNA, 1732 bp, Homo sapiens
tggaaatgaaagtaaaataactatagtataaaggatcatatgttcaaagcatgcaggcctaatattataggaagtcccaaacatataagtgaattgcattcctagaactgacacatttgtcttttctctgttgcattcacaatataattacatttcagtcacattgtcttagatacagttggctgtttctgggctgtctttcaagctggtttgtaaattcctgagggtctaggacagtgtcctaattctccttagcaactcttgcaccacctactgtacttcatcttccacgatggatccttgacctagctgagctgtagttttaaagtcattagtctagaatgagcagaatggtcatagtcaatgcagtttgtgctgcaagtagcagaaacccattcaagctgacttagcaaaaaggagacttagtgtgaggaaataatagtaccctgataccaaggatgatttgttcttccctcactatttttttctgctttgtcaccttcttggacacgtatctttgccagtgttttctctcacagctgctgaacagcctgttacctgcaaatgggttatatccgttagtctttcaaatcagaagtcctctgtgttcaggatgtacatggtatgagtgaagtgcccagtattaactggatgtgtaaggctattgtgcagcctctttctcttgtggctcaaaatcagtgtgccaggtttcttctgccatgtttggcctaagagcagtttaagggagtttatagtgttttcctaaatcctgtctggtaggtagaggcaaatggctatgtctgtacaacacaagaaccacaaatcttggccacatgggcagtttgcttgccacactccactgtgtaaggaagagactagagatctatgatgaagattgcctggcagccacagacacagttcaataactttttgtgaacttaatcttttttctcctgcctaaccatttccgcatttattacgtgtttgcacattcatcttcacttttgtggttttaattttgagtaaaatttaataaagttgtttctttttttaaaaaaaaaaaagggtcacaggagtgccaggaagtagaattctatcaggcaccaaagcaccatgtatgagtctctctttgtctttctcctgctcctcttcctgtcttcccactctctcccttccccatccctcttgtcctttcttacagcttctccttgtatgtggcccaaacctgactgcctcagcccccacatgcctccttttcctcaaatgaccctgacccacaagggtctcaattccaagttccaagaacaaagattctattagcttactttgccaataggttgtcttcctcctagacccaagaagatagggatagggctcaaagaggggagccgttgggtaagtagatcacgacaaatcttctctaccacaaactgaggacacatacaatgtcatatcatggttgggatccaagctcagtttacaatgcctatatgctccataatattgcaaaatatttgcaatgagaaaaagaaaaatgtgaaattttaaatttaagattaaaactgcataatggtgtccccttccccccaacccccaagatttttaaatggttgcatggtattctgagtgttttataatgatgtaactatcaaatgtaaattttagttcaatatctgaaagaaccatgaacaataataatagagcttattcagtgattaccattgccagactc

SEQ ID NO: 118384 - DNA, 2333 bp, Homo sapiens
aggccgagacaatgtctatggggcagtaggtaggcacatggtaggtgctcaatagatactgttcagtatatgaaaatgtatccctccgatctcaaactcagtggtggggaagagtagaaaggaaggagatggcaggttaagaaatgaggtggcattaaaataaactggagttgtggggggctttttgttttggttttggttttactacagagagagcaagcctccagctcaaagcctttcagcaggcagtagtatctctggaagctaataacacttctttgttttcattatgtttatgtgtacggttacatttgtccacagaactgatgtagagtttcctttttaaataaatgtgaaagtaaaaataaaatgagttgatttaaaagaaaagcagaaatgacgataatttggttcatggatatagtaaaaacaacaacaacaaaaaagacaggagaaggaatgaatgaagtttgggaagtgctgccctggatgaagctataggaactcctaatcaaagttctggagaaagcctggagcattttttcagcacactcatagcctgtcaccgttgagaaccactaatctagaataaagtacaaaattatgtcctccaattgctgtatatcttgcagtgaaaaagagcttggaaacttacatgtcaagcccctagcacagtgcttggctgatggcagtcattcaataaatgttatttccattgtttctacccatcaccccctcttaaaaaagagactgtattccaaactagattctcctactaacttgtagcatgtcgtaagaagcaaatcactgtgcactgaatcaattagattatattacttccaaaatcccctctctgcctaagtctttgtttcctttagtgtcctttttgtgcggttttaggaggaaatggaaataaacacgtttagtgtgtcatgtattgccaaagtctgaaggttttttattttactctgtataccccatccttaaattgtaaagatttagaaaagtatttgtcaccattcaaccatcctttcaagggttaattaatgaaaattaaatgacatttgcaccgtattgtaatttagactttgagatatttaatggcaaaatacagtgattcattgttttttatgttctgtgatcaagcagccttcatataaatataaaggagagtaaatgtcatttccaaaactaattatcttggtgctttataagacataaagctaggcatttcatcccatattttatagaaataaaagttgaattttttctttgagagttggtggcttaaagggggagtcaaattaccaggaaggtgatcataaatacatagacttttggactaggatgttattttgccttttattcaagatattttgctcttcttttaaatgtgtctaacaatctgtccctgtagttttatatttgcatttctactaactagacacttaagatgtcagttcctcccttagctagtttacagagtttgagctagaaatttggtatgcttacaaactattaaatacactgtactttgtctcttcgtattggagaaactattaaaagaaaattctgttgtctaatgttcttgcccatgaaggaggttccatagctttagaagtcaataactctatttatgtgtatgcagtaagtgcagctttctttccagtgttaaaacaacccacctcaggtgtccctgcattatttatatgtaacatatcttcatacttgaattactcaaattttgagctccatggttatgattatgatatgccagttgatttacattataacaacagatggtaatggtgcaggttgaaataaaagatcattaagataaatattttagccttcattggctccctgttgcataaaatttgtcagaatgaaatagaatcatggcatttcagaattggaagagtccttagagattatctcatccagtcccttatttgacagaggagaaaacagaaacccagagagaatgctgcttgccaaggtcgtacagctagttagtggcaaagctaggaccaaaatctaggtctgctatttaccaattcattgctttttctgctgtctctgtgtgagatttttaggtactgttccatctaattactccccaatgtcagcaccaattattctaattaacatctattcattctggaacatacgcactttcaccccattatgaatctcagttggttaaactttgtatctggctttcttttaggttctctactcacatcttttaatcttgaagactagaaaatataactggatctaccacttgtttggaaaatttctctaccaagcaataaattacccgctgtgct

SEQ ID NO: 118385 - DNA, 2490 bp, Homo sapiens
gatgacctgggtgaaagaattaaagagagacctgccttgaatgctcaaggtggcatctatgtcattaacccagagatgggacggagtaattcaccaggaggagattcagatgatggctctctgaatgaacaaggccaggaaatagcagttcaggtttctgtccaccttcagtcagaaaccaaaagtattgatacagagtctcaaggcagcagtcatttcagtccacctgatgatataggatctgcagaatctaactgtaactacaaagatggggcatatgaaaactgtcagctgtaacctacaatgctgtaacccagtacctacaaaatcagctcgctctcagaaaaggaacctgtttcttagaagaagtaacatttttgccaaaagatgactggggttttccgtttgttaatattaagcacatcagaacgtgaattgccaaagtcttcattagaaggcagcatttttcctctctgatacttttcagtcattttccttagagctttattaaattatgcatgctaagatttaaaggagccccagataaacatgatggggaaaagcactgaactaagagtcccatggtttctcttctggtcacagttcttccattggttggatctgatacttatcttgggacttcagtttttccgtcaataagatgagggattaggtgagatctgaagttgtttctagctctatagcttcttaacccatcacctttaaattaccagaatcttcactcatctctaagtaaacctttcccgggacttttactcgcttcttttggaaaggattaagctgagatctaaatttccacaccaatgtcataatgcacagaggtttttgaaaaacatctgagtgtttttcagatgttttgccatgtggagcatataatgatatgtgcaagattgaatcttttcaatgtagcacatgtctgtagggttatacagatgtcagagagctaactgctctgtaaactactttccatgagtaaattggtccttggtgggggtgtatcatatttttaacttactgagatatcattttagttcattgaggttggcagggattgcctaactgatcttccaaagtgagcagtttatttctaaggtataacgtctttgatgcttttagaataagaacagtgtcaaatcatctgtcttctggaaaatcatggattttcatatttctgttaacagaatttctcaggctttccctttttaaaagtattggactctacaaataggttctatatttgggatctcatcctaggagaaaacccaaaactggattcctcttaagacctctgtcaaccctcctgccctttgtggtcttaggtatggtgctataggttgcatgcgtctttatcttgtttgtttggttaatattttgttgttgaggtttttatttttgtttacttcagatacataattctgagctatggctgcttttgtagcctttccaagaagcactaacctgaaataagattagataattgtgagggtgtgttactatattaaaatacacacacaactgatctagacatcaagaggaagaaaaatgatggatgatgccacctgcttcaactgtatataataaacacttatgatgacatttcttgcctggctgagatctgatataatggaattgtaaatactcttcagaacaatttcttcagctacaggaagcgtggtgccatataattttaagaacttggcagtggagctccatttggggcttcacgtttcttcatatgacttctgattattgaagcattacttcagctagaggctcctgagggaaatgttcagaggaggttttatcaggattttaatttaaggtttcaaacaggggaagacaggaaattcaaagcgtgacgggataaaactcatgcctccctttgtccaggcttatcagaagtaatacatctgctctgaatagcatgaatgaatcaatgtgcagttttatcagatggcatcatggataaagatgataatgctgccttttctgtctctcaggctgtttccatggaaacctctagagccaaataaaagctaaccaatcatttagccaaagcttgccttggctcatagactggtatttctttaaggaaaattgtttttatatatttgactataagagcaaaggctcttgaacatatcctagattatggaacactttttcccttcccttttctctggaaaaattaaattttttttctgtccactgagactggagtgcagtggcaagatcatagctcactgcagcctccaactcctggggtcaagcgatcgtcctgcttcagcctcccaagcagctaggactacaggtgtgcaccacctttcctggctaatttttttttattttttgtagagatgggggtctcactttgttgcccaggctgaccttgtacttgtggcttcaaatgatcctcctgccttacctcccaaagtgttgagattacaggcatgagccactgtgcctggc

SEQ ID NO: 118386 - DNA, 1700 bp, Homo sapiens
attatttagaaccctaaggtagacatgtttaaaatcaaagtcctaagaaacagaactttggaaaaatggaggaaatgtttttaaagtctgtaagtttgcacgatactgtatagtaactaaatgcatgctactccgttgtatcctagttattttagaaacagaggtggcctaatttggtggccaaagtaactggtttactttgagtgtaccagcttatggtgccattgatgaggaattaaagtaggtcaaaatttaattggagttggtattacttcgtaaagctagttttcaagaggaagaaaaccacacttactaatgttttctgtatctaatcaaatactcttcatatataattaagcctcatgttatcttttttttaaatcaaccttttgaacttcaactacagtctaaaagtcttgatggtaactatagtgtaattatctttttgtctcactggattttatagttagtggaaaatgcctttacaaaatgtatttaaaatagctgtcatctcatttgtaaattttgtcgtgtattgtgatatagtgaaccttattgtccttatgaaatggtagctttgtgaaatacattcaccaaaaatcaaaatttgaacatctttatgattccttaccagctgaagccagatagacaggtattaattgagctgatgccccacttgagtttatagactgtttgataactgcctgtcctccaaattgtgtatgtatatgttacgatggtttaattcttgagtcagggccagcacgcatttatattttctaccaattaccttgatagaaatatcttagaaattgctgacctggaacggttgtgagaagactcctggcttctttcttgcctcacttaacaaatattttaaggtcaaagcaatatctgtgcacggctttccttttgctcctccagacaagtgaggctgttggtatagtcctcttcaccctctgcatgtagcttcaccctagatcagacttttgtctcttgggtcccagatggcacaggagcactgcatgcttgttttctagagcccagccagtcatgggtgctagcctagtctccacacaccagcaagtagaacccaagtgtattgtataaatatttcctgagtaccagtaagagaatgcattcttttctcatctaggccaggaatgttgaaaatgctcagccttacatagaaactcctagattttcactaacgcatttcacaaaagtaaataagtatttcatataattcagaggatgtttaaattgtcagcattttaataaatacttgcattataattttgtctcttttttaaagaaagtcatacttgaatataatttattaaacgttcaatggagtatatagtctatttgaaattttctatagtgtatgtttcatttgtatgtttgacgaaatttgtatgtttgatggaacttgacgttaatgattttaaatgggtaattttttggggagagggtagtctcactctgtcgcccaggccagagtatgatggcatgatcatggctcactgcagtctcaacctgggctcagcagttctgcctcagcctcctgagtagctaggattataggtgcacgctaacgcacgtggctaattttatgtgtgtgtgtgtgtgtagagatgggtctcgttatgttgcccagactggtttctatctcctgatctcaagtaatcctcctgcct

SEQ ID NO: 118387 - DNA, 1352 bp, Homo sapiens
gatttggcgggcaggaggtttagctctggtagaagcaaaagtctgcagtcccatcagggtgaagagtggtgatggttaacaggcatggaaaagcacaaggtgttaggagaacgcaaaggcaacagatgggaggtgtgactcattacttaaatgccacagactccttagaatgaaaatctagcctttatatccctatggcaaaagattgctggactttaaatcctgatttcacccctagccttgtaaccatggacaagggcttcagcctttctcggcttcagtaaaatagaattgataatgcctacctcacagaattaacacaaggattaaatatagcaaccgataagcaaacactgatagctctgatctaccacactgtaaggggctagtcatgagccggcgtcagctttgttagtagccttgtccaactgatgactatatttgcatttgtggtcaactaaaaattcctccacacctctgagaattgcatttggctgcatgccatagaaacctgatcgtggtggcttatcataatagctaagagatttatttttctcaaatccagagataggcagtccaaggctggtgcaggggcttaagaactggcatcagggactcggctctttctagactgctctctatccttagcatgtggctttcatcctcaaggtcacaagatgtcttagtttgggttcccccagaaggagctcctgagaaacggattcacatgcaaatagtttatttgggaagtgatcccaggaaggtagggaaatggggaagtgagacaggcaaagtaagaaagcctacacaggatgtgttaatgagtgggttactgctgtgggcaaccagtgttcagtcccgctggggacctcagggagctctctctgccccaggtgtatgtagctcatgcctcagttgtcccacctcaaggccaaagagctgggatatttatccaccaactaccatctgtcattagttaaaggctgctcccagggtcactaacccccactttcagactgcattctacaggctcagcatgattctgtagctagcaaaaggcctcgggtagagaaaaggagttttcaacaggaagcctgtggtaaatagaatggtgactgtcaacgaataatgggcagagcactgacagcacctgctacataggacgactgttttacctccagtatcgtgtctgcattccagacagggagaagggtagaaggtcaaaggacaaaggacacagcagctgagtttgtacctttttatcgagaaagtgatagctttcccgaagcctcaaccaacttctgctatgcagcggccagaactaggagacatggctacctgctgtaactaag

SEQ ID NO: 118388 - DNA, 1024 bp, Homo sapiens
tctattaaagtatctactcattttttcctgtgctggaggatctcttccaacaaaaatataaacatgctaattctctcatattaaaacacacaaaaaaacctttcttgattctgttctccaacaccctccctttacagtgaaattttgcaaaagaatttttattctctctgtccccaaatcttctcctcccattctacaaagaggcccttgcccctctcccaaaccctcccatgatgttgtggtcttctgtgacctccaggctgctaattccagtggtcagttctcagtactcatcttacttggccggtcagcagctcgtgactattgacaactccttcattcttaaaacactttttcacttgggttcctggagcatcactcactcctgactctctacctatttccttcctatactggagtgccctgggggattccctggacttctctcttttatctttgcttcctccctaactgatcccatccagccataaggctttaaataccatctctgatggcacataaacttagatatccagcctgaacatttctcctgaacacaccctttcagcatctctatttggatctcaaatagacatctctaacttaacatgtatgaaatcgaactcctgattcccctctctggtgaaacctggtccttctgcagtcttccccaccttagcaaatggaaactgcctccttctagttgcttggagtaaaactctggaagtcatcctgacttttcacttttctctttcaccctgcatccaatccatcagcaaaccttgagagttcgacctttaagataaatctagaatctaaccacttctcttcaccttcactgtttccactgaggtctgagccagccgcatgtctcacctctattatagcaatagcctcccaactatacttcctgcttcttcccttggcccctttagtccattctctatccagaaaccagagtgatcccacccttggctgcacattagaaacacctggagagttttagaaattctaatctccaggc

SEQ ID NO: 118389 - DNA, 1027 bp, Homo sapiens
tccaggtcctctctgcttccctcctcccacccccccccccccacaacccctacctgctgatcccagtgttctttgctcaggtcagcccttttcctgatttctcatctgcccaacgagacacccgggccttcctcctctccccatttattcaacacccccgccccaactctagccttttcctttctcagatcctgtggattccttgcagaatgtaaagatcatgctccctttaaagcttcaagcccctgggggtggagaagggggtaagctcctggtccttgagggacctgctgcctttgaccttatgggagtccagaggtggggctctggtggggggacccccaaaatgtcccagaggctattggtgcccagtgtcctgaggatggaacaccagaagccttccctatctcttctgaacttgtctagtctggttagttgtagtgtttattgcagccaaaactgggatcggaatggtttctgcctcctttgaacttacccacgtatgtttgtgtgtatgtgtgcgtgcacgcatttagactagcagctccctcatagcagaagctctgtcacatcactcccaccctcccaggaggtgctagtgagtgtattgcttagactgtttcatatagtggaacatttcaggctttcttacgggatttctctggtcccatgagaagtggataatttgtgtatcagggtcagacttgactgactgttggctggcctcgacgaaagaggctggcttttctgagattgatggttttccttattcttcccagtatcaggctgctgtctaggcagtctggcatctggagcacagagggctctttgctacagagctgaccaatttgagctccgcctgtaactctgttaattgctgcaaagcatcccagagggtctcattgatctttctggtagagcttactgtttagaaactaaggtttccatctctttcctaaacccctggttcaaaccctgacagctagcttagacctctctccctgaaattctgtatctgtatggattt

SEQ ID NO: 118390 - DNA, 1028 bp, Homo sapiens
caactcccaccctgggacaacccagaccctctgtatccttctagattcagctcatagcctgctgcctccaggaagtgttctttggttactccagcccccaggggtcactcaagggtcttagctcctctgagccttgattttctcatctgcctacttagatcagaggccctctagaagatttctaacatccttcttccctgcagccttgcccctagacctgactaactcctgccagggcagcctaggttagcattcttcccaaccagggcccggagacctgtatataaatctgtcacgcaatgctgtaattgtttttaatctgtccagactgtctgcttcctaaaggcaggaactaacctctctcttggtcactcttgtttgcctaaaatatttgctgaatggctgagggggtgagtgagtaagtgaatcatatggttggtactcagtaactgctggctgcatgctggaagcttagccttaggaatggttcttcttgaacttcagggtgcttcacaatccctagggagcctgttaaggatggtgacaccaggatccatgcccaaagagcatgaaggggctggtttgggcttggccaaggatcacatatttaacaaatcctactgagggtccaacagggaactcctctccacccacctgacaggagacagacctctctttccccagggacccactccattctccccaggagtgcttcaggacccgcccttgaacttctgttcctgggaagtgtgtttatctgcagcttcccaagttgtcaatcagcacccacaggggagctctgtggtacttttagcagtggcactgtatctgatgcaagcagatcaggctccagttcaggacagggatgggaggtgcactttggaatccctctcctgtgggctgcgaggattggctggggcggtagagctttattttcctttgatgcccacagtctgctgctcttccaggatgcgtgctctgccttcctgccatgggcaaggatgaggtaggtgcctctacgtgggtgt

SEQ ID NO: 118391 - DNA, 1119 bp, Homo sapiens
tatccttttgttctgagctcaacaatttatttttgtactgggtccccactaaattgatttgggggattactatgtgatagatacaaaaaacagccgctgccttgagagagctcctagtctaaaaagggacgcagacaagttcacggggatgcagtgcatcaggcagagcatgacgagtgttgcaagaggagatcagccagtgctgcgggaagccaagaggaagggagcagcaccctagttgtaatcaggaaggacttctgaaaggtgctgatttttaagatggtcctgaagaaggttaaaactttagcaaagtgtacatggtgggattggggtctctcagatggcaggaagcggggagcctctttcaagaacagcaaaaggcagagtcactgaaacttcacgtgtctgttagagagtagctggaaaagtgggtgagggccaggtcacagggtccctgattgctaggccagggaggctggcctgcaggaggcaaggaagccatggatagtttttgagcagaggatgacttgatcagggctaggcctcagaaaggtaactacggcaacgcaggagccacaggaggcagggagagcagtttggaggctattggggtggagagattcattcatccactgtgcctttctgtggtccagatgctatgctaggttctgaggccaccaagatgtgtaacgtgcagcctttgagcttaaggaatccattgctactgttgcagactgtttttgccaggcacagtgttaagcactttgcatacattatcatctttgatcctcacagcaacccaataacatactcactctaattatccccattttatggatgaaggcagaaccagcctgggacatgcgcaatatgcgttcaaaaactgctggataaatgacatattgaaggaagaagaactgcagacctaaatgccagctacacagcaggctgagccttccaggtcaggtcctgtgcctggagtgccctggcccctcgagagctgtcctgggagcacctctgccttatctggtctggttgcagggaggttgcaggttcatcagggagatgaaatgtttcactcaaggtcacacagctggtcactggtagggctgtgactgg

SEQ ID NO: 118392 - DNA, 1008 bp, Homo sapiens
gtcctgacctggaaggctcagcctgctgtgtagctggcatttaggtctgcagttcttcattcaatatgtcatttatccagcagtttttgactgaacactgcacatgccccaggctggttctctgctaagcacttgacattctaagagaaaaggacatggtctcggcccttgaggaccaggtggcccattagacagataattccagggcagtgggatgcatgccataggtggagtgagcacaggcctgagagcacagtgaaggattcacgttagccttcacgctggcttcctggccgccacctctacctgcccctcccactcacctcaggcttataaagccatggatttgcctaggattgaatcccagctctgccctttactagctgtgtgacttcgagaaatttccttaatcttttattttctctctctcatttcttacattttaaaatgagcctgataatagtacctacttcacaagttagttatcaggattaaaggaattcacatacacaaaacacttggaatagtgcccggcatttaaaaagtggtacatagatacccttaggattacaggtctggaatctcttagcccaaaccctgtgtattaggcatattttagcatttagaattattagtcaaggttcagtcaggacagagaaaccacacagtgatttgaacacaggaagtttaatataaagaattatttactgtaacaggagattagagcgatgaaaattggctattaagaagtgaaaagcactctaaagaatataggaatggcagatagaggaacagctcctacccccagtgttgagttaacagcacccaaggaagaggcccccgtaagctgagatcctgactttgttggagagggcacagctatgcttactgagtggtagagagtcactagagtgccaccccagcaaagttcacaggaaatctgcctgctagggtgctggaggaagaaacacatggtgaggtatctcatggaagacattctgctacaaa

SEQ ID NO: 118393 - DNA, 1706 bp, Homo sapiens
gactttggaattgaggctaagggatggttgacctgcatcattttcatttcctctctccatgcagcagtcagagttatcttttggaaatgtaaattatgccactgggaaagcctaagtggcttcctgttccaggataaagactaaactccacccctggccccctacccacactgtgccctcacccacctctgccctccaacgactctgatctccaacaagccatgtgtccttctgcaacagagccttggcacatgtcactctcattacatggagcactcttccagttacctaccgtgcacacaagtgcatgcacacaggcacacatgcacttgcatgcacacacacatgcatacacacacacacacacacacacacacacagttttgcttggctaattctgcctcacccttctaatggcagctcaggtgtccctattccaagagaactttctgacccccttctaccccaaccctcagcccactcaggcattaaagcatatgtgttagtttgtgattatacagacttacaataagtgtgattatttgattaacatgtctctctattaaactgtaagtgttataggacagtggctgtatccgttttccccccaactattttattcccagtgctctacgcagtgcctggcatgtgacatatttgatgagtgaaaaaaggaataaaccatcttggattagatcctgaaccagaaaaaaataaattagacataaaggacattattggaacaactggcaaaatttgaatatgaactgtagattagataatagtattttatcagtgtgaagtttcttgattttgttgtctgtattcttagaaaatgcacactgaagaatttaggaataaagggttatcatgtcttcaactttctcacaaatggcttagaaaaaaattgtagatacaggtagatgggggagagggagagagagtgataaaacagatgtggagaatgataacagccaatgtggataaaggatatacaggatcctctgtaccagccttgcatctttcctattagtttgaaattattttacaataaaaagttttttaaaaaatgaataaaaatgaataaatgaggaaagggatgccaggaggaggaggacccctcaggtataaaggcaggagggcaggaaagggcttggtccctttggggaacttgcaggtaggctgtgtggttggagggtggccctggggctggggagggaagagcaggggatggagctggagcccccactatggactctctggagggagtgcagtattgaactgttcagtcaacgttcatctacactttcccctctctttttcccttggtgatttttgaccaaaagtctgattgcatgaagccagtgtgtctcaggtcttccatctgatttctcttttgtcttaacaatagagaaaatctcatccgtgtatgcaggttactccttctgctgtgaaactgtgactttcctgttgtctgcttgctgttaaactcaccatgcatttcccgttttggttatatagtgctgcataacaaaatgtggtagcgtaacacaacaaacatttgttatcttaaagtttctgtgggtcagaaatttgggcttagctgggtggtggtggtacagtgtctctcgtgaggtcgctatcaagatgttggccagtcctgcaggcatctaaagtctcaaccggagccggttaatctacttcca

SEQ ID NO: 118394 - DNA, 1071 bp, Homo sapiens
gatgtcctgagctatggtggtggccaatgtcagattcaccatgaagcttcagagtcccttccttccaaggctctgggaggggccctagcaatgtgtttcatggtcatcagttctcttaacatttgcaaaagagcatttaactatgatcagttacaaccactgtctctcttctctctaacttcccctcctctctggtggtggagtggccacaggcatttttaagattctgtggtgggaaagttgagttgggatacatctaacggcacttataaaatgcattatgtgcatgctttaatttcatattcttcttaaagagcctctcctcatccccacctgccaaagcatcaacatcagatcccacaaaaccagacctgcccatggtggtggctttgatttttcctacccagggtcttagtggcaggcagtggtgacagaaaccagcaactttgctccaggtgaagaacaggctcataggctaaaagagctgtctgcagacaccaaaagggctggcatggagactactaagcatatttatctattcctggtacataaattgggtacaaaattgatagcatttcctctgtgccaggcactgttctaagcacatcattacatagtaactctaatcctcagaaacaagtttatgaaatagatatgattaccttcatttaacacgtgaaggaagtaaggtaccatgaggtcaagtaacttgatagtgggattcaaacccattgagtctggtgtcaggatcaggtcctgtgggcatgtgaccagtgcatatgcacagggccctgcactgagagaggccctgcatatacgggattggtcctgatcagggcctgtgcttcttatctctcactacattattctgacagtaggcagaatatggcacaagctgccccaataagtattgagttccccagcctgggagatgttcaagatgagactggacaacacttgagcaggaatactttcgaggaggcctaagtaccagataggaggagagtggactagacaccctttagcatctgagatctgctgagccttgagagtctaggattctgggacttt

SEQ ID NO: 118395 - DNA, 1108 bp, Homo sapiens
agtaactcttaatgttgtgaccctgagccagttatttaatcactttgatcctcaatttctacctctgcaaaggaggcatgagaggattaatgttagtactcaacttgaaaaatttttgtctagctattcccgttaataacacaagttggatagtgctttggggttttcaaagagctgttcacatatgtaatctcaccggttgtcttaatggcaagaagtcatattgccctcattttactgataaaggaactgaggctaaagacttaggaggaagcaaagccagacctggaaatccataattttagaatagggatcctttgtattttctaaaagtttgcccttttgttcattgtgccaagttcccacaatttgatgtttacatagttcccagaccactcttgtgcacaatgatgttttgcttaggtctggggagcccttgatgtgccccatcttaggtctgcttggactgggagggagactagcagagggagtcaaaacctgagctctaaagttagatcccttgtgttcacagttccaatctgtcactccccagctgtgtcaccagaacaaatggcttaacctcctggaacctgaattttctcatgtgcaaaataaggacaacagtggtacctaccacatggaactattgcaggaattccgtgagataatccatgtaaaatgcccagctcagtgcctgacccaatgcatcttagctgtcattgttactgttaatgtaactattagcacattcacactaaatgtatccatctttaaatgagctactttccatattttggtcattgcacattaaacacatttttaatcaacttgttttaggcttaaattgtaggctcctctggtcttctttttagcatctgttagaagtatttttaaaagctctgcctgaattcatggggagcccctgtaaacccacttgaaagcagatttcatcactaaaaacccacaaaacacctcagtgtgagtggaggaatcaggatgtaatttatggcgtccacttcttgctgccatttggcattttgcaaactgccattgccattagctgtcacttttgagtatttatgatcttgcggttggagcactttgattc

SEQ ID NO: 118396 - DNA, 1207 bp, Homo sapiens
gatacttaaggacatggatcatttctgatagttttctgtgtcctgggttaagagggtgaactttcctagcagacaagatggatgtgtactcaacacctaataaatgctattaattgattgaaaacaaccattatattttgtggctggggaagttgggaaaaatcatgcaagtgtagctgaaagtattttattgagtaatcttgagcgttgataagagtccagttccttggataaggaaagagaaattcaaggccaggtacacaaaaccaatgagaaggtgctatttcactgtggtatggagcagagttagacctggggttgaggccctctcagacgcttcctggctgtgtgacctgggcaaaatatagcagagcctcaagtgtcctcatttgtaatttgaaggaaaaaatacctgccttgcaaaattgtggagatcaaataaggtaatgttcagaatgcatttagtacagctttccagtgaggagtagagcttaaatgctcagtaaatggctggaggtgttgctttgagggggcctcttgctcagatttggagccccacggtgttctgcctgatagatggtctatttcagattcctgtcattctcgcttttgactgaggtttttctggaaatgtccatggaaagaatgtgctattgccagttagacgaggccttctggagaggccctaccccagcccattcctaaggagtatgggtttggtgtttggcagttccttagaattctgggccccagctgaggggcagagctgtgggattagccagttcagagtcactgaaatgtggaaaggggcagagaggggtggggtatagaggacaacagcaacataatctcattatagaaagttcacgaaatgcagataagtgcaaacaaaagaaatttcccagtaattgtgaccatccagagataaccatagttgcattgcatatatctgttcacatttttagcatgcaatttatatatttttaaggagataatagagaggtttgtgttaacaaggtttttttttttacatgtatcaaaacatcacattgtactccataaatacatataattattgtgtcaactaaaaattaaaaccaagctttttttcacttaatatattgtgaataggaattattttgttaatagagttgtgcctcatcatttaaaaataccagatattattcctctttgggagatgaattct

SEQ ID NO: 118397 - DNA, 1107 bp, Homo sapiens
ttggagttaattggatcccatgcctttgtatggtctttcatacagtgagttcatgctggataatcacaacattccttccaaaagcatgaagatgacccaaactatttagagaagacaggaagagaaacacgtttttatattaaaataaagttaaaataaaacatccaaatcatggcgtggtaagtacgatttgcaatatgggatgaatatttaaggtgaagcaaagtagctgtggctacttggggccaaaagcttcccagatgctcctgctctaagcacatgatgttttttggggaaagtggtagcaggtagagggtggcagaaagtgtgagaagcacttgttgtaggtgacccagacatgcctcttgaattgaattcggtgatctgcttcttcagctgctttcttgtccctgcccagcaggatgccaggaaacacatagccctgtagaaaatcactggagaagaggatgattggagttcttcatttcttaaaaaacagtttaggttttccctgtctgccctagggcccatgtcttgctggaaaatatgctacttagaaattaaggcctctgggttcaatttttggccccagtgttgacctctgtgtaagcctggcaggatgtctcatttctgggtcaccttttccttgccaacatagtgaggtatgtagaccaaatcattgctaagagccttctaactctaagacactaggtttagtcagccaaaagcatgtgattttcccagatttcccaaactccttgtacctaattgaaagtacacaatgaacttgcaagaatttaagcatccttagatgccagtcttcactttgggtattttcctgcctcctcagtgaaacttgacacctctagtttgtcattaaaaaaagaaaaagtctcaagaaaaagaaggttgtagaaactgattaacaggatatcccctttttcctttcccctgaagattatcttgggaatgtcaaaagcaaattttataggcagcttggtcttttacaagagatatgtttacaaagcatgaaattaacatttttgcacagagccaaataattgcttataacatagtgactttagaagcaggtttgcagcttgagca

SEQ ID NO: 118398 - DNA, 1050 bp, Homo sapiens
tctcccactccccatctccctaaaaaaaagaatgtaaaataccttaatcagtgtattacattgattgcatgttgaagtggtaatagtttaggtagagtacattattaaaacaacttcacctacttttttaaatgtggatactggaaaatttcaggttacacatgtggctcacgttatatttctgttgggtagcaccacactgcacactttctcccttgggtgaaaagagtgtgttcatcttttttctccaccaccgatttgtgagttcctgaaaggtagacgctgcattcttgacatcttgctgacctttgcaaacctagctggcacatggcaaggcaccaacaaaggtatgctgagggagtggataaaggaacccaggatgacaggcatttggtcaatacaaagctcccttaggcagtgtaactcctgggcctgtgttactgatttgcccttttctatttttcatagtttttgtctttttttaagggctcacacagtcgacaaaagaaaacgtttttcttgggagatgggcagaagctgaaggactggcatgacaaggaggccatccggagggacgctcagcgcgtaggtacggagggcaggattggccatgggtgggctctgtgaagggcatatgcacatatgcttgtgtgtgtgtgtgtgtgtgtgtgtgtgtgtgttcatgtgtgtgtttagcaggggtgtctggacctcctgttggctccctccctgtcagccaccatcccttcccctgattcccagatgcccctcttcaccagttagctgacccctttctccactgccatcaccagatctgctgcctgcaagaatttgcctgccacctttattgggtgatagaaaatgtctccctcataaaggatattttgtattttatttttataggatagaaatgtctctcccttatgagattacaactaaaacaaggagcagtaataagagccagcatttattgaacacctatggtgaggaagatcgatgctctgtacttggaaatttcctctgtgaaacctcagatcaacctttatggcc

SEQ ID NO: 118399 - DNA, 1036 bp, Homo sapiens
caagggaggctgggcagcatccggcttgtgagctcaggaggaaaaccaacaggtgtatgaacagctagtcagtcagtcacttcctcactttctcattgctggtattgttgctgtggtttgactggccacatgtctccagtgctgtctggcttattacctccatgttttgtaggacaagaccctgtaccaccctgtcagtggcagctgcatggactgcagtgaaagtgaccataggatcttcatgaacacctgcaacccatcctctctcacccagcagtggctgtttgaacacaccaactcaacagtcttggaaaaattcaataggaactgagccctcatgtccccttggcaggccccccagggtctggcactcactgcagacttcctctttcaagggaggcagggcccctgtgggcactaggtgtaaaaggtgctggccaaatggttcagggtgaagagggctcttgattcaggggctggggtctgcctggtccttgagcccctgagttgtgggggtagggtgaagagcatatcccacaagaggccccacagggagcagagactgctttaatccctgctgacatcacggaaaagcaacagagccttttcaactttgtcactatgtccccttgaacattatgtgggagaacaccaaggtagcctaggccacccaaaagtgagtcctgcgaggttgcccagccctcagatggctctcctacatgatggtgctttagaaacaaaggtaaaatttgcctgtttggggcagcttttagtatcgatgccactcatctgcagcagaagagaaagaagtcctcttggggctttttagtttctgccgtcctggggggaacattgcagttactgcacagcttctgttctctgtcacaaccccaggtgatttggtccggtcaaaggccatacttggggccctaagagtgttcagtattgaatgctgatcagctgccaggtgaggagtcagaagagggagcccccctagacatttctttgcagctatggacatgcgggatatctcccc

SEQ ID NO: 118400 - DNA, 1056 bp, Homo sapiens
catgctacgacacctggctaattttttggtagagatgagttctccactgtgttgcctaggctggtctcgaactcctggcctcaactaatcctcccaccttaacctcccaaagcattgggattataggtgtgagccaccacgcctgccccacaattttttaaagacacatttcttcccactttcaaggcctgagaggtttggtagcagctggccaaccagagcagtcccagtctctcctccatgagtatgactgtgaaatcatgccatgacaggtggttggctgccactgaaatagaactgcaccttggaagagttgtaggttaaaaagccacttttggatcctggaaattaaaccacctacatccctggggaggaagggcaaagggcactctgagttccgcacatggcaggaagttcttcagcatttgtcattcccgccacagcatgcaaacaactccattcgcttctttgtacaatgtagaatttgcggtgtgatttgtgcatggtttaaggaactttggtattttccccccacatagactgtgagtcgacacttcaggaacatacctgtgaatgaaaaagagacccttgcctacttcatctacatggtgaagagtaacaagagtagactggaccagaaatcggagggtggcaagcagcttgagtgaggatgaagcacatcttaaaggaatgaagtgtaatgcttgatgcacaggtgatatctactacatttaagcccataaagactgttaaatattattgtaaataaaaaagtttgaatgatgaatactgtaaatctttttggtcaggaggattatattctcatgattcagcatgtgtatagaaagactttcttttacgataactctggactaaaaaaatcaggatcattaaaagaattaaaaactatgtatttcagcattcaacaaagcattaaatcaattctactggaaatgtgggataagaaatattttggtaatcaccttatccaccaggctgccacgtgtgagctgtagcttggaatagcagcaaggtgcaattggccatggaagtgca

SEQ ID NO: 118401 - DNA, 1454 bp, Homo sapiens
actcaaaagggtataatcatccccgggagagagcactccttttaaatggggctactcatcctggcttggctaatggtgaacctaccttgtgggttttaaatcaaccgtgacatcaggtggtattgggtgcctgagctggcattttgtgtaagtccaggagcccttgatagtgtgcgtcactggggttattgatcgtgggaagaagacagcttggctggcatctcaccttttcctctgagtggagaagctgacttgctttaagtgcccaaagcaaaattctgagtaagggtagatttgctctgttattgttttttggaatcttaaggcaagagagtgtctacttgttggtttagaacctttggaataggttttgacagcctaactcaagttaatccagtagcttctctctctaagcctgttgttagggtttgtgtgcattttgagagagaattctatgattgggttgtcagtctggtaaggctagatgatgaccctttctctggagcctacgtggatctctgaagtgcttttccagccctggttttatttacagcttcgacaaatttaaacgtgacactagtggagtggctgtgtggtcttgggaatttttgtgttctgtgatgcacatgtttttgggagtctacagaaatgagtacctcataagcaaactaaaagctttccaaagcttgctgtaaatgcctatttttagccttacttttggctcaaatgttggtgttttagttctttaagggacacatgcagtaactagtaataaaatatgtttcgtgatatctctactttcttgtggggttctgtattctggtttaagcgtccaagtcttacatttgtagttttaagtcttgggatttgcattttggttttttagatctccctccctccccagagtatttttaaatgtttaaaatttttgtcttatcctagccataccccttttaagtataagatccaagacgtctaagttaagagatgatacatagcgaatattctggggtcaaactgagtgggttcaaatgccactgtaccacttgttagctgtgcttccttgggcaagttatttaaccattctatgcctcaccttcttaatttgtgtaataggtatttatgattcacctgcctcatgggggtattaccagcattcattgttatgataagtgtatttagcccagtgcctggcaggtagacattgttacttactctgggtcttggtgggacttttccctgggtctctggttttctctacctgtaatatgatggggttggtgaatgcagatctttccttttcttgtgttatataagtactccgtgaaatgtatgggatctgtctccttaaaacttgacttttgcttatccacagacatgaagggcatggatggataatttaaaggttgctgactcttaagaattagctattttttgctttggaatgtggtgag

SEQ ID NO: 118402 - DNA, 1189 bp, Homo sapiens
aatcccagcactttgggaggccgaggcgggagggtcagttgaagtcaggagtttgagaccagcctagccaacatggtgaaacccagtctctaccaaaaatacaaaaagtagctgggcgtcatcgtgcacacctgtaatcccagctacttgggaagctgaggcacaagaatcgcttgaacctgggaggcagaggttgcagtgagccgagatcatgccactgctctccagcctgggcaacagagcaagactccatcacaaaaaaaaaaaaaaagaaacaacaaaaaaaacctatgtccagatctaaatgcttgtaccgcctcgtctcttgctggcctggaccatacatcatcatttctcatgtagatttttgcagcagcctcttaactggtctcctatcactcctacttaaagccctctggtaacttcttagcagagtaaaattcagagtccttagagtgttctctaagaccgcacttgatctggtctctgtccacctaacctctgacctcatctttcatcacttgccccttcttcactcattcccttccagcatcagtcctcacttcctgaaacatgtcatgtactctttgctttgggtcttatgttctgtagtgctcttcccgcagatcactgtggtggaaatgccttcccagaccaccctatatagactagcaagtcctgaccttggattccctctctccatccctcttaccctgcttcatttttcttcttagttctccccactgccccccgccgccccaaggcagggtctgagtctgtcatccagcctgcagtgcagcagtgcaatcacggctcactgcagactcaacctcccaggctcaagtgatccttccacctcagcctccagagtagtagctgagactacaggcacacgtcaccacgcctggccagttttttaattttttgtaggaatggggtctcactatgttgcccaggctggtcttaaactcctaggctcaagcagtcctcccacctcggtttcccaaagtgccaggattacaagcatgagccacggcacctggctatttttcttcttagctcttatcaccactgggtcagggacttcgatacctgattacgtttgtattcccagtacctgcagcagtgcctggcacaatgtaataggcagcttggtgaacatttagtgaaagaatgaattgcgtatttt

SEQ ID NO: 118403 - DNA, 1268 bp, Homo sapiens
caagttcaggagatcgagaccatcctggctaacacggtgaaaccccgtctctattaaaaatacaaaaattagctgggcgtggtggtgggcgcctgtagtcccagctactcgggaggctgaggcaggagaatggcgtgaacccaggagttagagcttgcagtgagccgagatcgcgctgctgcactctagcctgggccacagagcgagactccgtctaaaaaaaaaaaaaaaaaaagtgcagctctgatttaaaaatattaaatatggtattgtggttttgggtacccctgtcagtttaacagttgaaactcattaggttacatcaaaataactgttaagtatgtacagagaaaacctaccttagaattacctagcagattcctgactccaccattgctgagcaaaaaatctctgaaggatgggacccaggaatctacgttttgacaagctcctcacatgataattcgaatgcatgccaaaaatcttaatagcttatcctggaaagccggctgcatttatggagatcaatgggtataaggacaaaatcacaagatgttagaactggaaggactgtggatgataggattctgcccacccctaccacaggcctctgaatagagagactgaagacactggagggtagttcttgccaagcatccatagcaagagctctggtgtctgcgccaggactgtcaaccagtctcttgacttctagcccagggctctggtcactcttccactttcagtttggaacatggggcaatagtctttcctaactatggtgtccagttctaacaaactaaaaatacaggggacacccagttaaatttgaattttagataaatcaaatatttagtataagtatgtcccagtattgcatgggacatatttagtctataaaattactgtttatctgaaatttagatttaacagagtgtcctgaattgctatttgctaaatctggcaaccatattctctccccgcttaccccacctttttttgggcaccagtcaggttcaagaattgccccaaagaaatgaaaaataattaccatgcatttatggtactattacttcatttaatctgttaatcctgtgagctagctgtcatggaccccattaatagttcaggaaagtgagaggttaagtctgactcctgggatcatctcggtaagctgtcattttgcctcctcatgaacctagttgcttggctctcattgatgtgtggcccagttaatgcctatcaagttacaagctacatgagagatt

SEQ ID NO: 118404 - DNA, 1083 bp, Homo sapiens
gatcttaaattgtagactgagttagaacttgatccagagttgctggttttgtggcactttacattgggcagtcaggaagcctcctgaggagaatttatattgagatctatgactagatctgaggagtcagtcatcttgctcttcaacattgtgaccttgggcgagtcccttccttcagtttcattttctggacaactggaataattgtgtctttttgagataattaagtaaaatcatacacagcaacttaggtcagtttttggtacctagtctttatgcagtaaaaggtgattattattactgttctaactagaaccaaatgtgctctttagaaaaggctgggttagggagctggcacttggaggccaggagctttagtggccgctgatatatttcagctgtgttgattattgatcagctttgaagcaagatttcagggactggtaccagcagtgggagtggccacagccacccgagggtggctgggtccacatctgggcggggagagtgggagcactgggccacctgggtcaccacaggctaaagatagtcagctggggctgggcctgggctgggccaggctggccagcatcatgtgactggagcctggcccacccttgctcctcctcccgggccaaggggatgcagactctgcattcctgagctgactggtggtctgcagcttcctttcagtgggaactcaagatgatctgacctgaacatttctctccttccctttctctgcccactcctctccctaagaatgcccttccagcccctcctgcatttcatccgcaggtctagggaaatttgggtgggaggactgggcagagaggcctctgagagatggtaccgacagcagcagctggtgaccaaggtgaggagggctaacatggcattctctttactccatagaagaatgttcctgcttagggggtcctggggtcagtcagtatgggaggaaaggcctgtgggtctccaggctcccctctatgactccaccccatccccaggatgaatgacagctgaaagtagccaggcttttcagttaatctgtccccaggctggcctgggagggacagg

SEQ ID NO: 118405 - DNA, 1024 bp, Homo sapiens
ctcacacaggactaatttaagaatattcatgtgtatgctcagactgtttgtattctcatcagcttgggattggtggcagactagggaatcagtgaggtcttttcatggcactttgattggagactgagctttcaatactttaccatctccttttgtgatcaaacaatgatctgactttgcctcacctttttaaggaaaagtcttcaggaataccttgccctctacctgatttctctttataacatcctgttagtgaagttggcgttggtggtacacaggccctttggcctgctctcctggtagcttgcacacagtgttgctgggtactgggagaagtgattaccagccatagtgtaggtatatatgaacctggtcctggtttgacacagaagaagattttgtcaggggactagatggtattaggctcatccaggctaacccaggagtcccaggagtatgggtgcagaatggccccttgggcctaagaactctatcctcttgggattgagattttctggttcaccattgccctgcactgggggtgtgggatgctgttggctgggttccacagctccagctctcaaaggcatgtggggtatcttgagggggtagtggctccggtagggggtggaagccaggagagcagtggcctcacagtgaggagtcaggcaaggacactctctactcattaagggaacatgggtctgatcaaggagttagaacattcctttccaagccagccgggcaaatttctctgctgctcggggtttgggggcagctctcgccctggcatggctggccaacagtacaggcaaagtgataggggagaagtcggtgagcagagccacaggatgtatcttttcctgtgggtttctgggggaggaaggggcacagaaattcttgtttttcagaatggtgttgggaaaagaagtgtggatgtagaagggactggacctactagaacaacttccttaaaaaaaaaaaaaattaagacatttgtttttgataaaagcccatgtctgtc

SEQ ID NO: 118406 - DNA, 1634 bp, Homo sapiens
gcgccactgcactccagcctgggtgacagagcgagactctgtctcaaaacaaacttttttttttttttttttttgagacagtcttgctccgtcgcccaggctggagtgcaatgacgttatctcggctcactgcaacccccgcctcccgggttcaagtgattctcctgcctcagcctcccaagtagctgggattacgggcgcccaccaccacgcccagctaatttgttgtatttttaatagagacagggtttcgccatgttggccaggctggtctcaaactcctgacctcgggtgatccacctgccttggccccccaaagtgctgggattacaggcgtgagccactgcgcctggccacaaacaaagttttcatttattgtgtccgtcattttatattagtagagatcattatctttttcataacttttctaaaaatggatgaactttagtcagtcccctattttggggtatatagtttgttttccattttttgaagttataaataatattttagtaggacatctctgtacataactcttgtctaatttgtatcattaggataaattcttagaggtaggactgttgagtcaagtgggagcccactttttctttggaagctgagaaggcagacaaaaatgtttcctgagcagctggccctggtgtggtccctagattttttgatggctcacttagagtttttactttgccttcccaatgatcactagtcctggtctgctcacatcaaacttctagaatgttagggccagaaatgatctatcagacatctgccatgattcaggagccctgagctatagtcctgactctggtggcatggacttctttctccaggcctcagtctctgttacggaactgtactctctgagggcctcccacctgagtctggacttcttgggttttggctgctggctgctggctcctggctctttgcatgatcgcgctttctgtgacttcttcaggagtgggctggtaaaattgttattggtgtttgagcacgtgtctttcccctctctactgtgtctttctcctttgggaacttgcaggttgctaggtggagtggggacggtgatgagggtgaggagctggcagtagccccctcacatgggctttgcattactaactctcccttcttgttcccacagaacactctgctccagccaaggtggtgagggcagctgttcctaaacagcgcaaaggcagcaaggtaaagaataacagtgggcaacccaaggggactttctggagttggtggcctctttcctgttttagtgaatgctcctggactgccaactagttctggattgtctgtgaattgcaggggagccccttctaggtatccagtgtgaatggtcctggtgaacagactgatttggcctctgatctcttggtgaagcttgggtcgggggctgaatagcaaagacagggtcactcctggggccctcatagtgtatgttccctgcaggttggtgactttggagatgcaatcaattggcccacacctggagagatagcccacaagagtgttcaggtgagtctgtgtggaagaataggcaggtttgaagtctcttgacatacacacatttagctcctcaagcttccagagagcctcagctctta

SEQ ID NO: 118407 - DNA, 9360 bp, Homo sapiens
tctgggacctctgtgcataccagaatctttgcatactcaagtcctgtagttggccctgcaggacctacatatatgaaaagttggccttccgtgtatgcaggtttcacatcctgctaatactgtatttttgttctgcattcggttttttaaagtcctgtgtataagtggacccacacagttcaaagccattttattcaagggtcagctgaattgcctgttcatcatctcatctaaccctcacagtgactctgagataggtccttttataatccccattttacagatgaagctgctgagacttgcagaggttaattactagcccttgatggccaagtggggattggaagtcaggtgtgttgtattattccccagcctgtgttctccatcactacgcttgggttttctgagtgaagtaggagagtggtcattaggccaagcaccgacctccagaccacatgtcttggggaagcttataaaattctcttggggcctagcaaagagaggactcctagtcagttctcttcttcccagcacttttgttctggccagtggcttagagtctttactcactggctgtggccgcttttacttcacagacagagttgttgttgataggccagggggcatctcttccttcccacagactacctagacaacatggccctgttgcagggaataattttgcccctgtgagcctcagcaccgctgtcctgaaggttgtctctgtcacttagacttggaagctggagagataagttgccttcccaccttctggcctatttgaccatgcttcccactgaaaccatctcaggtgtgaaaatgaccttagaatacatcccatccagcctgccattgcatgctgtggctcctgcctgcccttctagtgacagggagtgccttccctcctataccatgaggcactcacactcacctcactgttactttacttcctgctatagccacagtcccacaagcctcagcctacccgtaaactgccacccaagaaggacatgaaggaacaggagaaaggagaagggagtgatagtaaggagagtccaaaaaccaaatcagatgaatcaggggaggaaaagaatggagatgaggattgccagcgaggcgggcagaagaagaaaggtgagtgactgggagcaggacttgggagaaggtggcagggtagaactgtgaaatgtcaggactccaggggactgctggaggagctttaggtgccacctctgaaaagtcaatggggaaactgatggatgtaggctggtgagatagcagtcttcaaccatctgtcattaatcagtccctcctttcaaaaaacctgctgaaattttggcttctctaatgctgatctagagtaaccatggtttaaacaagataaaactttctttctttgatgtaacagcttggtgtaaatacaccaggcctggtatggcaactcctgaatcccttcagcttgctgtggtacaccggttcttcatatcatcactgatggcttcctatttccttcttcttctagctaggaggaaaggaagagggaagggtggcccctttccttttagggactcaacctggagttggttacttcagcttagctctcgtaggcagtgttttggcacctgtctatagggactctggaaagcatggtcttcatcctgggctgccatgtgtctgactccagaaggggattctgtggccatggagacactgatcttgggagttaacgaggagtctctaacacactgacggccactgaccagcttattttagagatgaaaaagagggctaatgtgtgggaaagggatctgcccaaggtaaccagattgtgatttgggcccaagtccagggcagaagaagaggagttgggtagagctggctaggagtggcctctccctcaagcctttctcatgtacccatgctgtctcccaggaaacaaacacaagtgggttccattacaaatagacatgaagcctgaagtgcccagagagaaactggcttcacgccccactcgcccaccggagcctagacacatacctgccaatcgcggagagatcaaaggtatgcactacccactatggagggcctggacttgggagacaccctcaggcctgacctggtacccctctccccatagggtctgagtctgccacctacgtgcccgtggccccccccaccccagcctggcaaccagagatcaaaccggagcctgcctggcacgaccaggatgagacatcgagtgtgaagagtgatggggctggtggggcgcgggcttccttccgtggccgtggacgggggcgtggtcgcggccggggacgcggccggggtggcactcgaagtacgtgaggcccctttgggctccgggatgtccaagggtgtgcagcaggggtggtgggcaggaatctcctctccctcatggcacccgtttcccccatagcccattttgactaccagtttggctaccgaaagtttgatggtgtggaggggcctcgtacgcccaagtacatgaacaacatcacctactactttgacaatgtcagcagcaccgagctttacagtgtggatcaggaactgctcaaagactacatcaagcgccagatgtgagtgtgcggaagccttcttaccctggagaaatgagtgagaggttaggggttgctagagtgtcatagctgggcaggcccttctggtgcttagcagcagtttcagcctcaggctgaaaagatagcttttctcattgtttattaaagaagtgataccacattctcattgtttattacagaagtggtacaacatttaccttaagaaagttagaaactataccattacaaaaaggaaggaaaatatttagaatctacccccttctgttcttccatttgtaatgacaacattgacagaatactaacatttattgaatccttagtatcggccaggctcagtgtttattgttgtagaggcattatcttagtcctgcagttcttatctgttgaattcctatgagctgagtcttttagccccagtttatagacaagcaaaccggcccagtaatttgcacagaatctcacagctagtaagtaacaaagcacagatttaaatccttttctgtcctattatagaacctttgttcttaaccactctgatatattgtctctcagtccagtaaggaagtcatacaagaaaataaatggttgcaatagagtgtttataagtgttttaggagcagaagagaaagtgaccaacaatatttggactggaatttaaaggaggatgaggagtttgacaggcatgtcgaggggcttagggcagagggagtgatttgacccaagcaaggtagggtgtcatgaagggatcacatcatttcttttcagccctcaacactgttggtatataggataaggatggggtaggtcagaggctgtgtgagattgctggggtgtgtagcagaacaaggaaggcatactcataaaactgatgcaccaatccctcggtgataactacttcttccctccacttagtgaatactacttcagcgtggacaatttagagcgagacttcttcctgcgaaggaaaatggatgctgatggtttcctacccatcacccttattgcttccttccaccgagtgcaggcccttaccactgacatttcactcatctttgcggtatgtcttcctccctggagctgggatgcaggggaaagaaaggtccttagggagctggagtttgggccaaggcagaaagccctggaagagtcatcatctgatgacttctgctgaagtctcaaggcttggctagtctcctcctctccctccttccttcctttctctccctctcttgctcattatggaaaatgtcagacacttaacaaaagtagagtagtataatgagcccatcatcagcttcggcaggtatcagtttatggctaatcttattccatctgtaccctcatctgtttattctcacatactacattgaagaaaatcctagaaaacctagcattttgttcacaaatatttcagtatagatttctaaaagatagacttgttaaaagaaaatagccacagtatcattatcatacctaaattaacagtttaacatattaacagttccttaatatcatcaaatatttagttcagattcatcccaattggcgccatatatatatttatatatatattttatatatatttatatatattttatatacatttatatataaaatatacatttatatatatttatatattatatatttattatatatttatatttatatattatatatttatatattatatatatttttatacatattatatatttatatattatatatttttatatatattatatatttatatattatatatatttttatatatattatatatttatatattatatatttatatatagtatatatattatatatatattttatatatttatatatagtatatatattatatatattttatatatttatatattatatatatattttatgtatttatatattatatatatattttatatatatatatagtttgtgagaatcagaatccaaataatacctataggctgggtgcagtggctcacacctataatccctgcactttgggaggccaaggggagggtcatgtgagcccaggagttcaagattagcctgggtaacatagcaggaccctgtctctacaaaaaactaacaagacctgtgtattgtcttattaagtctcctcttgcctctatttttctttttctttgccgtttattatttgaatagactaagttgtacatcctgtaggattttccacagggcacagggatgtcattttaacatgttcatctgtactccaagttttttgtaaattgtgatctagaggcctgatcagattcaggttttgaagttttttcccctccttgtcaagaatactttatcataatgatgtattttctctcaggtggcacataacatttcatttgattgtctctcttgtgctataagctgccagcagtgttcgttaggattgcaaaatgacaatatactaattctgtcagtcggtcttcatttattaggtggaatacctcttcaagaagtaactttgcctcatcaactgttcagttaccaagaggtatagtttgttcaggaagggcagattaatgtttgatcttcctccctttgttagccagtttgcataattatgagttgatctctaataggtttcataggtgaccagtgagatttggtggtttgttttcgtatcatttgttattataagcttatgggctcaaacgtatttattttggtccattgcagttaatggattggatcaaattgtcccacctttggtcagtgggaccctatacatttcctgccccagatctggaattggccacttttaaaaggaattctagttcctttcttttgggaaatggtatttagataccagtctgagttataggggtgctttattgctacttggttggtcattctttctagatgatttttttgttttttggtgagataaaatacatcatggagttattctgttttgttgttgttgtttttttttttttttttttttttttttttgagacagagtttcactcttgttgcccaggctggagtgcagtggcatggtctcagctcactgcaacctccacctcccaggtttaagcaattctcctgcctcagccttccaagtagctggtattacaggcatgcaccaccacacccagctaattttgtatttctagtagagatggggtttcaccatgttggccaggttggtctcgaactcctgacctcaggtgatccacccacctcggcctcccaaagtggtgggattacaggcatgagctaccgcgcccggcctgttctggtattttctattaaagggtctttacgtagacttgtggatcttttattttacctactgctttcttccatgcccataatcttaattcctaatgataccaacataattactcattttgttttatttcacagtatgtctaccgtcttttttttttttttttaaacattttttaaagagagagggtcttgctctcacaggctagattgcagtggtgtgatcatggcttactgcagcctcaaccgcctgaaatcaggcaatcctcttgcctcagcctcctgagtagcaggattacaggtgcacaccacgtgtggctaatttttaaattttttgtagagatgaggtcttgcagtgttgcccaggctggtctgaaattcctgggcttgagccatcctctcacttcggcttccaaagtgttgggattacaggcgtgagccattgtgccaagctctacattcttacaatacctccactaccactgaaaacagtttttccacttatacagtatcttcaagtcatttgaaagaatctttgtgtggtttcacatttaaattgatatatatattagttttattttgcttccaagttttagagattgctttctccctacccctataattttctaagttgttttacatttgtgtaaaacatttacgtggttctagagtctcagcatggtatagtcatagaagtctgacttaaattctgtcacttacaccctttcttctcttacaggcaaactttttagaacctttccatttaagaaaaaagcaaatgcctctacatgtatttgtatccttggtaaatggaaatatacaacacatggcatttcttcaattcttttttgttttaacttaatatatctgggagctaactgcaaagtagcagtatataatagaaagatattcctcattcctgtgtacagttgcatagttcaccattgtgtggaatgctccatgttttttcaactgctgctcctatagatggatgttttggttgtttttttgagactaggtcttgctcttttgcccaggctggagttagtacagtggtgttatcaaagctcactgcaacctcaaccatctaggctcccaagtagctgggaccacagatgtatgccagcgccacctttttacgatttgtagtgatagagtctcgctattttgctcaggctggtcttgaactcctttgctcaagcgatctacccaccttgacctcccaaaatgttgggattacaggtgtgagccactgtacccagcctgcttttttgattaatattttgtgggtttatccacctcagcacatgtaaagttggttgtttttttgtttgtttgtttgtttgtttgtttgagacggagtctcgccctgtcgcccaggctggagtgcagtggcaccatctcggctcaccacaacctccacctcctgggttcaagcgattctcctgcttaacctctcgaatagctgggactataggcgtgtgccaccacaaccagctaatttttgtatttttagtagagatggggtttcaccatgttggccaggatggtctcaatctcttgaccttgtgatctgcctgcctggggctcccaaagtgctaggattatagacgtgagccaccaggcccgacctgtaaagttttttaatgtctgagtagtgttccatcatgcatatgctgtaaatatttaaattgcctatgcgatggcaagttaggtattttatagttctttttctactctagttttactgtgaatggctttttgtccagatattatacatactgctccctgtttgtgcaagtgttctctagagcagattactggaagtaggattgcaggctcaaagagtaaaagggtaggtgtatttattatgctggtacctcctacaagtttgaacatctcacattatctaccagtcgtggaagatggtgtcaattttcttatattactggtagcattggactcataccaagctcaggggaacccagttgtctaccatttccaagatctttctgtccaagattttcttcttaatcccctcttccttctcctccccttcaggccctaaaggacagcaaggtggtggagatcgttgatgagaaagttcgtaggagggaggaaccagaaaagtggcctcttcccccaatagtggattattcacagactgatttctcccagcttctcaactgccctgaatttgttccccgtcagcactaccaaaaggagacaggtaggtacctgctggcatgaagattgcccttgtcctctgggcaacagtcctcctcagggctggcatcaggaggaggactggagggatgaggacttcccctttccaccctttagagtcggcacctggctctcctcgtgcagtcaccccagtgccaaccaaaacagaggaggtcagcaacctaaagacactacccaagggcctgtctgccagcctgcctgacctggattctgagaactggattgaagtgaagaagaggcctcggccatccccagcacggcccaaggtgggtgaggccttgtcccttgccttggttctagcactctgagctagggtgcttgaaggggataacacatgggcacagcactctagctctgaggggccagcaggaaatctgggtagttcaggatcatagtgtgagttgaagttaccagtagtggctacagaaaggttgatttggcttgtttccatttcctgtggggaaccaccctttagggcgccctactgtgtgagttcctcggtgacatttttcttaagggatcatgcagcatctggcagcgatgtttctggcttcttgattcttggctcttctttttgctccatctaaatttctggggctgcgtttttggtgtcttttccctgagtatgtccccactatcatgtatgtaagccccttaggtcctcagaagaaggaagggagagggagcagatgcatggcccaaatatggagttagtctacacaagtctgctgcactaatggcaaggtgaccttgggaagcctgttcatacctcaaggcttcagtttctccatctgcagatgaaaggaaggagacattagaatattctagaaatagtttatatatataaacagatgaagttcactgttaaagaagtattgcaatctctaactaaaattactacttcctttttaagtgctgaatttttctccacatacctgctcactgtcacccactttggagacctctggcctggggcttgtgaggagactgcagaattgaccttgaactttgggtctatggaattctatactcccttatctattttcccacagtgattacctctcatctcctttctcttgcctgcctgttcatacacagaattccccacagttgtggcttcagccctcaaaaagtgttggagatccagccagagacatgaggagaaaggtagtaagtagatgagggttttacaaagtccaggcctacaaagttttgtttgaaacaggggtcagacttagctcccatt

SEQ ID NO: 118408 - DNA, 3614 bp, Homo sapiens
tttctttgctgaaggcaccgtgttttctcttgcctttggaacaatggtattctttctgcctagtctgtccctatcttcatctggcttacttatgttcatcctgtggtagtcacttcttgaaggaggccttccgtaaccattcttagtcacagttgactaagctcctttaactgtgtgcatccacaaacctgcttatagcctttaccataccacaatgcagttggctgtttggttgactttctcccattgagctccctaagtaacagggaccttgtcttattctgcttttaggtttttcatacagagcttaggactaatgggtactccctcatttattatataattgaacatctggtattaccagatccccgtctaggtactgagtatataatggaaagcaaggcagctgtggatcatggagcttccagtttattgggagatgttgaatagatggataagtggatgaatcaacctgctgaacttctgtgtgtccactcctaagctaggtgctatgtaggatataaaggtaaatgagagcacagttcctgcctatagagaagtcatcatcagttgtttgtgcatgactgtgatatgagctgtgagtggaggaacctggacttctatgaaacatcctttctcatagtcataaagctgactcccaggatgacgcttgtgacctgctggtgttaccagggtcatagttgaacagtcttatgttgagaggctggagcttccctctcatggtatagctacagaatctgggccaaggatctctggtgattccttttccccttcgtctgtcctattttagaagtcagaggagtccagattttcccacctgacctctctgcctcagcagctgccttcccagcagctgatgtccaaggatcaggatgagcaagaggaactggattttctgtttgacgaggagatggagcagatggatgggcggaagaacaccttcactgcctggtctgatgaggaatctgactatgagattgatgacagggatgtcaacaagatcctcattgtcacccagacaccacattacatgcgccggcacccagggggggaccgcacaggcaaccacacctcgcgtgccaagatgagcgccgaactggccaaggtcattaatgatggcctcttctactatgagcaggacctgtgggctgaaaagtttgaacctgagtattcccagatcaaggtgaggcttggacatagcagtgagtgtggagcctggtgtgcctgtattgtacggagaagaggaagcctgattagctgtgcaattttaggcaggtccttataattcagagtctcaggatttttatatatgggaaggggatgatgactgacatctagcttgggcattaggagtgaggggtgatgtgtaaacactgcaaactcttcaggtgaggcggtggtgattattatcctatctgcggatccatagttaatattctgacagttggctagacacttttgtggggaacagaaaaagggttagattgttatttctagtcttaaatatttaggcatctaaaaatttagaagccttttaagaagcttgtgttgagtatggaaaatggagaaaagataagtcttttgaaaaattgctgctgcctggaaatagtcaaaacatctctgttgtgggattttagagtgggtatgtttggtggtaggttgtcctagggtgagcctttgtaataagtagcagtgtgtttcctggaagtaaggaggaaggagagttgcccagccactgtgtgataaggcagtagcagaaagagagatggggaaacactggagctttcaggggggagtgtgtagtgagttcctgaggagctactgtcagcctgatctcagtcttactacagggagggcagggcaagcactgtcttcttctgggctagcacacttgtgccaaggtaactggggtgaggaatggtgactgggcagctgagagcctggggaccagaattccacgtatgtcgacgtgggagctgccctctccaacttcctgccagtcttgattccttaaacaggctagagcagcctgcttacttacatctttccccactcatctcatgacctctgcagcaagaagtcgagaacttcaaaaaggtcaatatgatcagccgggagcagtttgacacactgacccctgagccccctgtggatcccaaccaggaagttcctcctgggccacctcggttccagcaaggtgagaagcagacacctgagatcctgacatgggtgagaggatctagggcccttggactgggggctatcctggggtggatgccacaggcctttccctgcttcctgactcctctctctgcctctgcagttcctacggatgccctggccaacaagttgtttggtgctcctgagccctccaccatcgcccgctctctaccaaccactgtcccagagtcaccaaactaccgcaacaccaggacccctcgcactccccggacaccacagctcaaagactcaagccagacatcacggttttacccagtggtgaaagaaggacggacactggatgccaaggtgaggcattcctgtcgggctgctcagagtcttgggtctacttcattgcattccagtgctttgcttctctcccttgccttgtctgagctaaggaagtgctaaatccttcacctgctctgtgttctgaggctggtgggcttacctaggattaggtagccacatctgcaaaatatactgggtgtgggagtggtaaccccatgttgaaaggcctaaggaggattgaccaggtatgagtccttgggcaaatcactgcattcccaaaccttgatttcttcacctgtttgaaataggcataccagttcctagctcaccactgtgaactttatacgagaatgaatatgaaaatgctgttgtaaaatgtgagagatcatgcccatcttagtcctacaagtgcttgatgctcctcagagttgtaggagtacaaacagtaacaaaccctgggctaacctttgcagatgcctcgaaaaagaaagacaagacacagttcaaacccacccttggagagccatgtgggctgggtgatggattcccgtgagcacaggccccgtactgcttccatcaggtacctggggcagtgggggaagagtgatcaggctgcctatgggatgggtgggcgagccatgaaattgactggaccaagaagattggtctgaaaattaaagggaccctcatctaagaggttttcaaaaaaccagtggtgtggaaagctcagcccaggacctgggaatgacgggtaggcttttttcctaaagaagtggtgtggcagtcacgtgagaccagattttcatacatgcagagagaaaatctctgaattggtttccaagcctggctatctactttctgtctgaggaagaatagccaggtagttgaataaacagatttctggcagtctctctgagcctactatgtcttgggaggctacttgaaaagttttaaaaattaaaaaaatacatatttattggccccaacctgtatctgctgaccctgcttcttggggtagggcccacactcttttttatttatttcagtaagatggccccagtgtgtgtttcctgtttcccaaa

SEQ ID NO: 118409 - DNA, 1045 bp, Homo sapiens
gtaagcctcagtatcctctgtaaaactctctgagagttgatgcagagttaatcagacccatggatataagttaaaggtccgtaactgggcctccttgtttgataccctgtgagaggatggatcttggctgacagaacggatcagagggacccctcctgacatggtggggctgctgtggggaacctggtgacagtattttttgtggtttctgtagctccagcccctcagaagggacgcctacagttggcagctatggctgtacccctcagtcattgcccaagttccagcatccttcccatgaactgctcaaggaaaatggcttcacacaacacgtctaccataagtatcgtaggcgctgccttaatggtaagaagtgtggggggcaggagatgagcctctgggcccgttatttagacccagagtataagagttgggggatacggggataggtgactcttttctctgacttcagagcaaaaaaaagacatgacattatagcaagaaagactgaagttagactcgggccaggtagttttaaactgtaggaagctagggggatatggcactcacaacgttcgtgttctttgatcttcctctattgattattaaagctgtcaattaagtatttccatatctctggcaagattactgactcagccattgtcaggtctagtccactgtccatcacaaaagggtatgtaagaggtgacatatgctctctagaacaaaggttgccaaactggcctgtgagtcaaatccagccagtattctgttttcgtatggctttggagctaaggacagtttttacatttttaaggggttgtaagaaaaaaagatttgtgacagagactatatgtcttctgtaaagcctgaaatatttgttctctgtccctttacaaaagtagtttgctgatcccctctctagatgatagtgtaaggaacgagcctgtctagatgctcttgtctgtccctgctcttttagtattctgataggttggctgtaaagacgcgcaaaaccaatctagtcacctgtagttattaactc

SEQ ID NO: 118410 - DNA, 1019 bp, Homo sapiens
ctcttgaggtaaatattggtaatgagctaaatacagtttgttagaatttacaaacaatttgttcatgccttgtcttgtctcgacggcacttgaaagtagtaccagttgaggtgaagagctagactgccagcctggttcagaagctgctgccacctgctcctggaaaagtacaggcccagctcccagcatcagggcctggggcagagtggttagtgctcaatagatatctgctgaatgactgagtggcagatgatgagtgaggggatttggaagtacatgagaaaggaccaagtcttaagttccaggatcctttctccctgaagcaagggcagcctgaacctgagacatgcctttcctcctttctttcccatcagagcggaaacgcttgggcattggccagtctcaggagatgaacacactcttccgcttctggtccttcttcctccgagatcacttcaacaaaaagatgtatgaggagttcaagcagctggctctggaggacgccaaagaaggctacaggtgagcaggtttgggtgggggactttggctggtgcttagggatgatgtgggatccctagttggtctgcttccagaactgtagttggaaattccttgcatgtgtatgttcattcatatacttgatgaaaaatttgtttttaaatgagcagtatattcacatggttcaaatttcaaacattttaaaaggttgtataatgaagagttgtcttatccctgtcccccacccatctggtgtctttccccacaggcaaccagtattagaatcttgtgggtcctttataaaggaccctatgtaagtaagtagacatctgtgtagtcttccatgccactaccactccttttgtttacgcaaaagctggcctacgttataatattttttgcaccttgcatttgtttttgtttaatactatattttggagatcattctatatctgtacataattaactttgttgttctttttttatgggctgtaacatggtcttatatggatgtaccatga

SEQ ID NO: 118411 - DNA, 1691 bp, Homo sapiens
ttgaacccaggaggcagaggttgcagtgagccaagatcgtgccactgcactccagcctgggtgactgagcgagactctgtctcaaaaaaaagaaaaaaaaaagatctaaatctattggcatgtgtttgtttttgttttgttttattttattttggagacgagtctcactgtgtcacctaggctggagtgcagtggcgcaatctcggctcactgcaacctccacctcccaggttcaagcgattcttctgcctcagcctcccgagtagctgagattacaggcacccaccaccacacctggctaatttttgtattttggtagagatggggtttcaccatgttggccaggctggtcttgaactccggacctcaagtgatctgcgtgccttggcctcccaaagtgcttgcattatagacatgagccacagcgcctggccgcatgtgttccttgaagtgaaatttctgagtcagataaatgaacaaacctactaattggcatggtcaaatggctttgcagagttataccagggattggccaactttttctagaaagagtcagtaaatactttaggctttgttggccataaggtgtttgtcgtaattactcaactccgttcactctgttattgtagcagaaagcaaccatagatacttcataaaagaataggagtaaacaaatgtctgtggcagggggacagagttccttgactgcaggaaatctctgaacattttatgctggacccacttagactagcattctaaaagcgtgtatgctgttttttcaatacagaaataacatgtagtttaaactgtttcatagttcctctgttatgcaggcacatttcccgttttacagatgaagaaactgccctgatttcactgacttgtgttctacagatatggtttggagtgcctttttcgatactacagttatggcctggaaaagaagttccggctggacatattcaaggattttcaggaggaaacggtgaaggactatgaagctggtaagagccagagttggatctgagtgaggcctggtcatgtaggcctcctcttccccagttggacctgggtctttctgtgtattacacaacacctccctctctcctctgagcttctttatcctcaccagctcagcttttctgtacctctccctacaggccaactgtatgggctggagaagttctgggccttcttgaaatattccaaagccaaaaatttggacattgaccccaaactgcaagaatacctcggcaaattccgacgtcttgaagacttccgagtagatgtaagtgaaactctttctctaactctgcttgtcctggaaagaaaactggaccaggaatcaggatacttggattctggtccagctgtgcccctagcccaggaacccctctccctgctccccacaatttgggctttgctttttcacctttaaaatggagagtgagtggccaatgaaggctagttggagatagttgtatggttgctcctgcttaccctttctgtggtaccatcataatgctctttctctcctatctcaccatcctccttgctactgtgcccaagttagccactactagttgatcaggatgggtatccaagatacacacatttgttctttctggaaaaagccaattccaaccccagtttataaattaatgcccaggtctcttatgttcttggagcag

SEQ ID NO: 118412 - DNA, 5104 bp, Homo sapiens
tatcacgagaacaagatgggggaaactgcccccatgatgcaattatctccacctggtccctcccgcgacatgtggggattatgggaactacaattcaagatcgagatttgggtggagacacagccaaatcatcacatttattattttaaaactgccatttattaagtgtttattatgtgccaggtactttacattgaccttatttaacccttatgtggtgacgcagacaggacttattaggttaactgaggttcgtggccatccagtgacataatggcagagccactcaggtctctcaatataaacacaaatctgttttcttttattcttaagcatttccacccttgaggaggagaagggaggggagcagggtacaagtcacagagaacctttgtgataagtagacctattagggtggaacaaggactcagttttggttcccaaaatgggaaggaaacgtctgtcttcggggttataagacctttgttagtggtaaggccagtctggagcatggtctgagtcttagttcaggatcctctggaccttgaagagaatgaggtgatccccagaaggatctgggccttctgagctgagacgtcgcagcatactgcatgccacattccacatttctgagcaagagatcccttcttggaagggaagcagaaatgaggttggataaaagcctggccttttggggcaggtagacctaaattttgtctttatcggttaccagctatgagaccctggggaagttacttttttgtgcttcagtttcctcatctataaaatcagatgtccatgggtccacatcaaagggtgatgctgaccccatgagagagtgtgcataaaacagcacaaggcttggcatgaagaaacgcttaataacttataatttatttttaaggttaaacccattcattttctatatttggaggtagaaagtaggaagtgtctagacgggcctggcaaggaagagggcgtagatagtgcttctgatcacctgtgactccttcctctgttgcagccccccatgggtgaggagggcaaccacaagcgacactcagtggtagcaggaggtggcggcggtgagggcaggaagcggtgcccctcccagtcttccagcaggcctgctgccatgatcagccaaccccctacaccacccaccggccagcctgtccgggaagatgccaaatggacaagccagcactcgaacacacagactttgggaaagtgaaaagctccttagccctggggcttgaggggggaaaggggtagggtgggtaagagtccatgggggtgcccagtcccaggaaaggggacaatgaagggacaggcctggagttactaggacaggcctttgtgctgagtagcaatgtatacaccatttgggctatcagaggtacccctgggcaggagcctctacatccccttccccctcctctctccatgactcttgacatcctagcttcttctaaggggggagggaaaggggggagatttttatatatatatacatatatatatatcaagttttaaattattgatagttcatctggattaccaaaatcactctgcagccctgcccgaggctagtaggctgcaaccctggtccccacccctaacctcctgctccccctcaagccaactatgcagcccacaagaaggccctgcgggcccccccattgcccagcactgtctcatagaaggctctggtggtacctctgggccccaggagcatcagccccttgatcatctggggtttgtcatcaccatattttctccctgctgttcccaccatgcccttctgccatcttctgggagaaggaaaccaaaggatctaaaactggggtttgggggaaggtttcagcctctccccactccccttgccccacaccctttactccccagcccagagagacgctgcttttaccaggaaagactattgaaagatgttttattttatttttctctgacctttccatccttgaaaaaatggggaaaaaagaagaaaaaagacaaaatcgaccataaaagaccaaaaaaaaaaaaaaaatcagaaaacccccacctaatccacagaaagtaatgtctttcccctccccttggaatttttgttttgtttttggaaataatatttttttaaaagttgccttattgtggagcgggaatctgaaatacccaaatgcctgttttcctcggtggagtcaacccgaagagctcccaccttctctggatgtgcctgggcttggactggctagaatctttctctggactgttgcatgtacagtgcctccatcctggaggcaagagagttgggagtggctcgaatcagagccgtgcccaagatatccctgctgttgcatcgtttgaagctgacgtcctgtgtctgtacactgctgccactgttgtgtcctcgctctgcttgctgttgcctcacgccaggccccgtcctgccgtgacacccttcatcctacccttggaaccccaaggccaagttggttcaaactgttggagaacagagttggcctgcatctggaacacacttgtcctcagcttaccatctcctcacaccccagagtggaaaggtgaacacctgcagctgaggcttggaaacgtttcttgtgttgccctgaaaaatctttgagacctcagggaggctctgtctctcttaaaaggtggagaaagatgccattctctccctaaggtctggtggagtctccccatcttgcatacccttctgcaagccatctatctctgctcactctccaattgacccgcctgggaacaagggatgaggaggagttgggggctggggggaatcctgccagttggtgaagccctgtggcaggaaggtatatgtggacatagagtatacctgattctctttcttcagccactgactgcttgggttgggctgtgaatgataatggaatggctggagtctgctgttgtcagaaggcagggagggtgatgaaggactgacccacatggactgggatgtgtgtcggttatgggcatgactgcacgttcactctcagtgggatctgggcaacatggagttcattgtcctgttgcttacttactgcaatgtctttggccctccttttcaactggttcctctgttgggcccaaaggttgggagtaggagacagtatcccaggctgacaagggcttgccctttaccttgggcaccttgttaatttttagcctgtgcccttccccacctttgccctcccagtggttggtatgtgggaagcccatctcagttcctgtgacttcatgtctcaaaccaaggatgagcgtctggtctctgctatgatggtggtatccgaggcctttccctgcccagtctggtgcctgccccacattgtaccggacactggattcctggacccccttctcctttcctttctttccttcaggtcacgcagccctgtactgtatccagcaccacagaaacctcagtgtttttcctctgctggtttggggcacaaggaagccttagggtatggggaaaggctgttattacctagagtttactcccaggccagggggctgccatcttcttcacagacatccctgaaaggaagcccctttggggcagggaggtgaggacttcatctcaacatcggctggtggttggtaggggagctttttcttttctttcctttttttttgtttttgtttttgtttttgtttttggtaacatgttaggagttaatgttgcaaagagtagtttacatcttcactttctgaagacacttgaatttaggaccgatgtatctgtgacaagcatgccagaagtggcaggggccatcagggctaaccacttcacacctaccatcgtcccatggggatccaagacctgagataaagcaacagcctgcccagatccctctgttcatcctatcccttccaaggttggtccatgccaacataacctctgggcatcagacatcagcaggtctgtgtgcctcagccctgttaaggggcaggtttctctttagccctcttcctgcacttgggagcaaaggcactaccagtagagaagggccatccagccgtgccccagcctggacccctggggctcagatagaggtgctgagcccctgtgtcaaagttgttaaatgtttttgttttgttccattgtagctctttttttttttttttcccctttcctggtgattgattttacaaaagaaagtaagctgcttagaaggccctggaagggaagtgaggaggagggacaaggaagatgactagttacggagggtgagggttgttttttgccaaaaagcctgggtagagtgatctgaattatctggcaccctcctgaatggaaccccagagtacctcctgtgtggaagggtccctggattttccctaacacccaccctctcccccttcagccatgctgatggcagagaagataagaacttggagcccatttctcactggagaggaaaacttgtcatctggctttgcggagaaggttccaccttacgctcgtagtacattatctttactatgtgctaggatatcatatttaaaaggacaaaaaaatgtaaaatacttgaatgagcttgtattataacattaatattattgagagtatctgctttccaggctgaagtgattcattcattattctagtcctgctttagtcctttgtaatttgtggtaattatgcttttctttttaatacaaaaaaatgtataaaaataaacacttgaaaaggcaaaatactggctggtcttccatctaggttactgctattgggtgtgaaggatgggtttctggtagagttcccccagatccggaggaaccctgcactcaatgtgcacatgaaacctcggcaggggttctgccattgggcttcgaggagtctgcctaaggcaggggcttctacaagccttgagttcatgtccaccctgtgtcttaagtgagacgtgacagtcatagccagtgccacaaaacagcagtccagcataatgccaggatttcagcgcacttgtcagcttccaggttttccatcccctggctgtggcctgcattgtgttatgagacagccaagaagaaaaacgatgaggcttcttatggaggg

SEQ ID NO: 118413 - DNA, 1513 bp, Homo sapiens
accatctgcatcagaataagctggggagttgctaccaatgcatctcccgggggccactccaaacctgcaatttgccgtatctggagtcctcctttgaaaagcttgctgtgtgattgatgcccacagtctgagaatctctagcagaactaggcttcttcaggtatgagatcaccagcatcagaatcccctggaacacttaactaaaatgcaggtttccaggccctgctcccccagataccttagttcagcatatttggagtggaattcaagagcctatattttaaacaagcatctcaggtgattctggtataggaggtttgtagactacacttgaaaaagtctggggctttcagagatacatgacttccttgtgattgcctgcaggagttttatgcatatatgtacttttctaaagagaatgtccagagcttattcaaagggcccagagtccaaataaaggtttaaaacccccagttggaggaggacccaatttcagaaggaaaagagtaaggtcatcccagtgtggttattttcccagccatcagacctcttccccaactagcactcacatgtaaactgagataccagtgcctgctatcagaagcttaaggagggagggtgatggttgttgcctagggacccattgtggggagaaggtccttacttgagatggtggtagtcgtggaattcaggcgaaggcaggaagggaaggtggtagccacagtgggagatggtggtgatgatgagggccaaggaaaaccacatggtgatggaggacaagtgggagcccattactaatgggcccactatcaccggtagcatgttggagacctgcaagaggagggatgattgaaggcagggtccagggagatgaagggacttagttgggtatacacttagtcccaaggtggtaccagaggcaaacttccttgacccagatctggagaaggtgagagtttcgggactttgatttgttgaaggcattcacctttgtaacttgggacaaattacgcagtttgagcctcaactttcttgttagcaaaattaagattaaaaaggttgttggaggagccaggtgtggtgattcatgcctgtaatcccagcaatttgggagacagaggtgggaggattgcttgaggccaggggttccagccagtctgggcaaaatagcaggatcccgactctacaaaaaaatttaaaaattagccagatgtggccaggtgcgatggctcactcctataatcccaacactttgggaggccaaggcgggtagatcacgaggtcaggagtttgagaccagcctgaccaacatggtgaaaacctgtcctactaaaaatacaaaaatcagccaggcgtggtggcacacgcctgtaatcccagctactcaggaggctgagacaggagaatggcttgaacccgggaggcgggagattgcagtgagccgagatcatgccattgcactccagccaagatgacacagtgagactccagatttggtggtgcacacgtgtgg

SEQ ID NO: 118414 - DNA, 1576 bp, Homo sapiens
tctggggagcatagagctctactcactgcatgctctatagggtgggcatagagagagatcacgccaatgggagctgtccactcatggtgtttcttgtggattttcttgtagaatgttgggtggtgaaggagcctggggaaatagttaatagttaataacctgctgattcctctttctccctccccgaccagaccatgagaaaccaaaaataggaactaggggttacatccatggagcaaagttaacaacaccaagacctgccttcaaatttcaaccccagcccttatactgcatagtttgggagtgggttgctttgcttctctatgccagttgtattcgctgtaaaatgggatgctgcccagaaaggactgaataaggaaatgaatgggaaactgccctggctcccacacaatcagagaggccttttctcttttggacattcattcctcagttgtcccaagttgtcagttatgagacaactagtggtctccctgttaactatttaatgggacacttgaggccagggagtattttactggcctacactcaattcagaagcctgttcccttttattttttttctttgagacaaggtcttgctctttcgcccaggctggagtgcagtggtgtgatcacagctcactatagccttgacctcccgggctcatgtgatcctcccacctcaatctcccaagtagctgggactacaagtacacaccaccatgcctggctaattttttaaatttttttgtagagacggggtctcctgacattccccaggctagtctcaaactcctgggctcaagtgatccgcccacctcagcctcccaaattgccaggattacaagcgtgagtcactgcacctggcctcagtttccttgttgatcagtgagccctagacaggatgaggagccagctgtgcctcaggcagggcctgctcaccggtgtgaatagtagaacaagacttcctcgatcagcgtgaagatggccagctccaggaggaaccagtggaaggtgggtagctcacggcggcaggggtctctccaccatttgaggaagggatagaggaagaccaccatggggaaagatatcatgcactggttgaaaagaactgtgcggatagactggcgcagtttcacaggatccacctgcccaagggaagggaggagggagatggataagagtgtgagaagtaggctccaccgtgacctgcttacaggaggccctcactctggttggattctgggagagatgtcgggggacagccagtagctcctgactgccacccagctctgggcctggaaacgttgcagaataaggccctggctgctaggcaggtgagtaatacccctgtccttggaaacttcagcagccttcagtctgtgtcggaacctgccttcttcctggttctgcacattatcaccactgccctccccatttctctggccaggccccatgtatttacaggtaacttgggtagcctccatggtgcttggagaaggctgtgactttctgagtgataccccatttcagccatttagcccctcttcatcagagaaccttgttcatgattggat

SEQ ID NO: 118415 - DNA, 1281 bp, Homo sapiens
tctcactatgttgcccaggctggtcttgaactcctagcatcaagcgatcctcctgtctctgcctcccaaagtgctgagattacaagcctgagccactgtgccccagcctgcgtaaattttctttttttctttttttttttttttgaggcagagtcttgctctgtcgcccaggctggagtgcagtggtgcaatctcggctcactgtaacctctgcctcccaggttcaagcaattctcctccaggcatgcgccaccatgcccagctaatttttgtatttttagtagaggcagggttttgccatgttgcccaggctggtcttgaactccggagctcaagtgatttgcccatctcggcctcccaaagtgctgggattacaggcatgaaccaccacgcccaggcttaaattttcttagtgaaatgggaagcaaggcccctccctctgccagcagttaggggaggaggtgtgaactagccattcaggcagtgggagagtaaacagagcaggaatggatcataggaacaccaggtagcattcagctccccacttgaggatctgtttctgatgtgttagttcaggggccagtccttccttgaaacagccaaagattaaatggcctcgtgaggttctttcctgcttgtgtgcccacttgagggtgcatgtggtacaggaacactggacttggtgtcagatgggatgagccctggctctgtttcctagcagcaatctgatcttgagctagtcactggacatttctgaacctcagcttctgcagaatgcaatgacatcttccaatgtagctctgtagtcattgtgtagaccacaaggttgtacagacggcaggtaatattctggagagccaattaagaatgtgagccctgaagtcacaaagcctgcatttgaatcatagtttacccgtgtaacacctctgtttcctcatctgaacagtgaaggttcttggcctcagttgaagatgtgagcatttagtcagtggtgctacaacagccgtggttgacagatgaagtgttctcaaggaccaagcacagggtttgacactttaggctctgattcatgtcctgccaagctgggcctggaggaagcccccaagcctggctggcagctgttgtcccaagtgagggggacagtaagccaggccagcagtccagttcaggaaggggcccacttcaaaggagtgggtcaagagcactgtttgcctttctggagtgctgggctggggcaaaaggacctgagagctgaggtggttcacccagacacctgggcag

SEQ ID NO: 118416 - DNA, 1011 bp, Homo sapiens
atcccttcgtgccaacgattttaacggtccttcaaagccaggaggagggggcgtggtaattcgaggggtttgttcgaagggccacgccctttcctcggcctttggatttttccaggccgcgcccacggcgggggggtgggggggggcgctagttctagaccacgccccttccttgttcgctcggaaagaggaccaaaatggaggagtaagaatcatgattaaattgagcgagcgcaactaatcacgcgaagagggccgcaggcgggccgtcttccgcaagcgtgcttccaggcctccactccccacctattcggcggcaccctgttacttctgctcctgcgcgctgcttcccgcgacctcacaggcagagcgaacacgcacggagtcgcaggggcgcgcaaagggggaggagcgggcgtgaccaggcgcgcgcgcgcgtctggagtgactctagagagcaggcgagtcgggcggatcgggtgggtagagtggtgccgtccggttgtttggtgggaggcacgtaagaccgctctgggcacgggggcgctcacctcactggctcgttcggttctaggagcagatccggggtagagggaaaagagctccgggccaggggctgccgtcgccgccgtcggggagtcagcccgccagcccgccagctcgtcagcccgccagccagcgcttcgcgggccctgtcggtcccggtaagcgggcctgcgcttaccggaaagaggagcgtaagatgaaagagtgtgagagaccattgggggtctgtagggggaaggggagtgggggcgtgtgtaaggggcagggtgtgtgaggaggagaggaaccccagcaaagagtagtaataataatggccaccgtcacacgataatattcgagtaatatgtgcggggactttacaaagcatctcatatgcttcattttaacttctactccaatcctccgaggtgcgtactgttatcaaacccattttacaagataggaaaaccgaggcacgaaatagat

SEQ ID NO: 118417 - DNA, 1286 bp, Homo sapiens
ttaaaatgttttacaatctagatcagaccaaacattgtctggcttgcactgtaaaactagttagctgaagacgacttctcaggtttcttcaggatgcctgcagcacttgtggagaatagccaggttatctgtgaagtgtgggccagtaatctagaagaagagatgaggaagatccgagaaatcgtgctcagttacagttatattgccatggtaaggagctctactctgactcaccttctttgtcacttttaaagttggggtcttgctctgttgcccaggctggagtgcggtggctattcacagatgcaatcatagctcactgcagccttgaactcctgggctcaagcagtcctcccacctcacctttccaggttgctgggactgcaggctcataccactatgcccagcttgactcaccttcttatatggatgggtttagggaatgtttaatttgagattttgaaaagaatgggtatgttccactaaagccattgtaaattaaaccggatggaaggttgtgttgcttcatgaaatatcaaggtagccagtgtctctgagaaggatgtaacctctagtatcttagattttttataacattattctgtttgaaagtctttaaagcagaagttacgtcatcccctagggcccagctgttccacagatatgttggatttgactatacgatgttaagaattttaaaaatttattgccagcatttaaaagtcaatagaactcacttgaattccagatttctggcatctctgaaaaaaaaaaataggaagatctggcaatatctgttatccactcctgcctgacactggctggagagagagatgagtattgtggtaatattaagggcctcctgtagacgggcatgtgctctctgttttactccagtcccgattacttgtactattttcatacctagctgactttactcctttacattagctgcttggagtttgtgactcctgctttagaaattatagagttggccgggcgcggtggctcacgcctgtaatcccagcactttgggaggccgagacgggcggatcacgaggtcaggagattgagaccatcctggctaacacggtgaaaccctgcctctactaaaaatacaaaaaattagccgggcatggtggtgggcgcctgtagtcccagctactcgggaggctgaggcagagaatgcgtgaacccgggaggcagagcttgcagtgagccgagatcgtgccactgcactccagcttgggggacagagcgagactccgtcccaaaaaaaaaaaaga

SEQ ID NO: 118418 - DNA, 1055 bp, Homo sapiens
ccaccatgcctggctaatctttgtttgtgtgtgtgtgtgtgtgttgttttttttttgtttgttttgttttttttgagacggagtctcactctgtcacccaggctggtctggaactcctggtctgaagtgatcttcctgccttggccttccagagtgctgggattacaggcgtgcaccactgtgcctggtgttattggtttttttttttttttaaataatgagcaaatgtatacctattataattaggaaatttagtttatggaggaaaatctcatttttctatctgtcacagaaatatgatctactttgcatgcttgtttgaatgttggaaagagtgaattgatctattaagttaggaaaagcatttcaaaaatacttgtactataattataaggtggtggtaatagtgtggccactacttctgtttcattattcaccagttaataaataaacaccttgttttttagagaggacatgtactcccaggattccatagatctccttgctaactcaggactacagtttcagaagcatgaagaggaagggattgacacactgcactttgcagagctgcttatgacatcaggagtggttctctgtgacaatgtcaaatggctttcatttcataggtcagtcctagggaatgtgtatttctctctcactttgggctacactgaagcagggaattgaattcttagtcatttttgcagtcctagtgactgttctgttcagcagcagcagccagaagttgaattggtgcttgttgcccatgtttcagtttttcacaaaacactggggctcatatactggtttgtttcacacagtatttggctctatcatgtggctatcagtgggtttaattccaagtgggaatatggtgggtgtagagggtcacagtacttggttatcttttaaatggctgtctcggagtttcttaggtacttgaaagccagattctccttattttaacttctcagtacttttggatttttggtgaatcgaatctacaattaaaccccttgggtacttttttatatctcccatattagtctgtt

SEQ ID NO: 118419 - DNA, 1716 bp, Homo sapiens
cctggccaccatggcaaaaccctgtctttactaaaaatacaaaaattagccaggcatggtgacgggtgcctgtaatcccagctacttgggaggctgaggcagggataattgcttgaacctgggaggtgaaggttgcagtgagccgagatcgtgccattgcactccagcctgggcaacagagtaagactctgtctcaaaaaaaaaaaaaaaaaaaaaagattcagattatagtacgataaactactcagaaaaagtgaaagttcctaacatgaagtagcatttacaagctttgagaaataaaatggttgaacactggggcctgataaccactgcttttttaacctctgtggtttattctcttgtagtggctatgattttggctatatggtaaagttgcttacagattctcgtttgccagaagaggaacatgaattctttcatattctgaaccttttcttcccatccatttatgatgtgaaatacctgatgaagagctgcaaaaatcttaaggtatatgatgtttttcttaataccagtaacaaaaagaaggacagaaaaaaagctgactttgctttattgttacgtgttcagcatgcatttttgagtactagatgctagtgtggtggtagacagggtataatataaagctgatttggtcagatatttgtgtggtaacgatctttaacctggccatgaagggaaccctctgcttctgtcatcttaaggcaggcattcttcactcgagggccatgaacctaatgaaaaggtataaatgctgtttgttagggatggggtctgtggtataacagattcttagaggagttcttaactctagaaagttttagaacttggtaccgtaataaattgttgacatagagctttgctgtctagaattagagtgggatttactatttcctcagccttgcaattctgattttaatggcagagttctggaaaaattaacaacatggaaaggagcaaaatgtaggatgtagcacaatatagcgtctggaaaaagggaataaaagagctaaaaagaggttactaaggcctgttaaataaatggcctgtccccacttcttgctagaattcagtgaactcataactgcacttagttggctccagtaggggcatgttgggtttgtaatattatctttgttctccatacatctccagggaggtcttcaggaagttgctgatcagttggatttgcagaggattggaaggcagcaccaggcaggctcagactcactgctgacaggaatggctttctttaggatgaaagaggtaagcttccttgaatgtgatcacaggcctctcggcagtaacttgctgaaggctaaggaggtagtggatggtctgttatgtgggctgaggtttgttgaacatttattttttatttatttattatttattttttttgagatgaagccttgctctgtcacccaggctggagtgcagtggtgcgatctcagctcactgcaacctccgcctcccgggttcaagcttttcttctgcctcagcctcctgagtagctgggattataggtgcccgccaccatgccctactaatttttgtatttttagtagagacagggtttcgccatgttggccaggctggtttcaaactcttgacctcaggtgatctgcctgccttggtctcccaaagtgctgggattacaggcatgagccactctgcctggccgaattttttgta

SEQ ID NO: 118420 - DNA, 1030 bp, Homo sapiens
caggtaagagttatatacattttactactttgtttcagacttgtcctgatatttaaaaaggtgtcaaatgagccatggatgctggtggcaggaggcaaccagagaggagaggctcgagtatgaggaatggggaagacttatttacaaattcagagcaaactcctctcttctgggtctaaaataaaaacatcttttgtcttcagtaaaacaaaagtctttctgctcaatgcagatggtaggtacagtgtgctcaaaagaagcattttctcttggggaagataagtacacagtcagcacagtaagcaccactctgggatcaggcccaccctgcagagcctggcgccatcactgctgcatgttgttgataatcgccaggatgctcatcttctcctgggcagagtccacatcctcattctgcttctgggccactcctgtgcctaagccatagagccgcccacagtacttggcatcatcaatgctgtcctcaaaaaacaactgcagaatgggacagagaaccatggtgagagttatgctagaagtcatgacaagtataaatattatcacatctggccgggtgcaatggctcacgtctggaatccaagcactttgtgaggctgaggcgggcagatcacttggggtcaggaggtcgagaccagcctggccaacatggcaaaaccccatctctactaaaagtacaaaaatgagccgggcatggtggcacatacctgtaatcccagctacttgggaggctgaggcggaagaatcacttgcgcccaggaggcagagggtgcagtgggccaaggccgtaccactgcactccagcctgggcaacatagcgaagactccatctcaaaaaagaaaaaaaccactaccacatcaccacctcccagccttcctaaagccctgaaaatataccaaactagaaaaaaaaactaatagtatagaaaggctcggccaggcacagtggctcacgcctgtaatcccagcactttggggcgccaaggcaggtggattacgaggtcaggagttc

SEQ ID NO: 118421 - DNA, 1472 bp, Homo sapiens
caaacaattttactgaatctgtctacccttcattcatgagaactccagaatgagtgttgaccactgaagcatcttttaagtctgtgttccattgtgccattcaggtttgctgtcacatatgcatcatctgaaatcatttgaaatttttgtacaataaaatatcctggatttgatcctgaaggaaactagtaagatcagatttttgggtcatgtctgttgtattttcagtaatgtgatttcagatggtcatctggattctcccacttctctactccattatttctctacttttccttccagcaaacctgaaacgtgagggagatggattaatgtgagtaacaggaatgtgtctttaaaaagctagagtggttacatttaatcaggcagtaagataatttgggttcttgagttgttttggagtaatatcccacaactggggtaggaagctcaggacttttttctttaaagctagtcatttcaaaagcatattgtatttttttgaatgactacagtatggacaatttcaaaaaccaaaacccactttggattggtggaagtaaaaactggtaactcactcaagtgaatgaatggtcttgcattttaaaagcttatgggaaactcaatttgaaatgattagaaaatgtcaagtattataagctggtatttaagatgcttgtaaatactatttatgtttttaattttgtaaaataaagatttctttttaaccactggcattaaggtttggtctttcatagctatggattgctggctctggaagatggtcatttgccatcagtgaaataagagcatcttgcctccattgtccccaagttggcttacatacaaaatatcacttggggggtgggttcgggaataaaaaaaatacatatcacttggtaggaagcttttcacgagcacctgtgtaaatggaattgtctcttcatactcaagattgttgggtcttaatattatagaattaaaccagtctaatatttcctggggtcactccactatatatggtggattagcttgttaattagtgggattcttttaaacaacctgaacttcagatatcctagagttggctcaagactttgtttccagccatttctgttgacacaaaatatgtggggttttaagaagtctggtacaggggcagatatggaattgtgactgggaagttgacaaaacaagagatttatcactgtaatttctggtgaaacagcagtcagtggttctcaaccagggtgccctggcatgctggtgactgtgagcgctatgcagatacccttccaaatttgaattaaagcaggacatttaatattttctacaattaaggacttacttacatgtcaggagaaatgctcaaagggttgaggaactcagtgttgagtgtggggtttggtcatcattgcatgtgagagttaagagcttagagtagtgctttagcaagaaagagcacaagtcttgga

SEQ ID NO: 118422 - DNA, 1736 bp, Homo sapiens
aaatttaaattggtgccatgtattagatagcttacagatggacaggtctttttggctgtgggcccaaatattaatagaagcaccatttttaagggtggatttgcatagggctgtagaaagagattgtgccattgagaaggacatcgcagtagccatcctagttttgagtgtcatttctccttggagtaactgttgaagagaaagacaggacattgccttaggagacagctggctcagctgtgtccaagaagtgtctatagatgaacctgagtgactggtgccttctgtgcaggtgtttgtggctcttctgcaaatgcttccttattcatcctcatgtcatcgtctttcaggcctggcccttcccagatgtgctggagtgctgcctcgtcctgcttctcatcaggtcccactttcctggctgtctggcccaggaaatgcagcagcaggcccaagagctccttcagaaatacggcaacacgaaaacttacagaagacactgccagaccttctgtatgtgaattttcacacaccttgaagaaactgccaaattgaaaatgtttgacatctttcacctctgcagttatgcctcaccagacattcactctggtccctagatgtttttgcagtaatccaaaagaatacaaacaaggattaagtttgaatcaaccctgcctacccatagacaacggtggatctgactttagactcaattgtggtctcctactggagggaagatcatgaaaagcccacagtagttattcagaactaacacctgcagagtgttggtcatctctacagccttaggcaggtttcacccaaagaggagaaacttctgtcgtcacccaaagtgttacatgcttaaaacacaagctacctttgtaaatacttcatctgatcagaagtgtgtcatgcttgtttgagatggagttgctgcattttaggactattgatacctttttttaattgtttttataatatttaatttgaaagaggagacccttctctctctactctttcatagactgaagtttgaatatgaaataggccttaaccatcatgttgactctcctgtcagaattttaggttggaaatttggttttattctttcatgtaattgcttatttgaacagatcacttactaaagctttagaagaagtgattcaaatgtgtgttttcccttcagttttataacaaatggattgatggcagtcaaatagctcaggaataaattactgtttcaatggttcttaaactttcttggatcataggatccttttgagaatcagattaaagccaaagatactctttggagaaaaatgcatattcctaattttgcatagatgacctttggattattggactctgactattgggaccctaaatactatttaattataaatcttttttttctcctccttggttatttaaacagttgaacagtgtcaggaacagatgtttctgtaatgtcacagttgctagcatgggaaaatcagagtctggcatgggtgtaggaaggaacactcctttcagataattgaactgttttctctaggattcattgtgaaggcttttctgctcacgtttgtagtttatttttcaattaattcctaggattggagctgttgggacagtgagaatgaaattcatttacaggaagtcccaggaaggagaaagtttgaggcagttttcaaagacgtgtatgtgcctagcattagagtttaataaactcacaaagg

SEQ ID NO: 118423 - DNA, 1066 bp, Homo sapiens
tgttgtcgtggccccagagccttcagtagtacaaatggaatactctatcatgctttgaatgactcctaggatgtagtaatgagaacactgtcgcaagccaggaaatgtttagcctccagttggctcttggtggaaaggcatgtggcccggtggatcacactgttgtcctttttcctggggtctgcttcttggttgataagaaatagaacataagggcaggaagccacatttctggcaactagagaaatgcatgacccagtatctttttcctcttttcctaggctgtgaccacctaagagacaagttgggggaccatcaatcccctgccacaccagctttcaaaagtttggaggccttttttctttatgggcgtctgtatgaattctggtggtctctctccagaccttgcccaaattccagtgtctgggtaagggctggtcacagaacactctctgttgagccaagccagcagttagacactgccagcactgaagaaacggaccctgaaacttctcagccagagccaaacaggccttcagaactagacttgagactcacagaagaaggtgagcgaatgctgagtacttttaaggagctcttttcagaaaagcatgccagtctccaaaactcacagagaactgttgctgaagtccaagagaccttggcagaaatgatccgacaacaccaaaagagtcaactctgtaaatccacagcaaatggtcctgataagaatgaaccggaagtagaagcagagcagcccctctgcagttctcagagccagtggtaagtactgaggcaagtacaagacggaatgaaaaatgaccctgctggctaggaacagtggttcatgcctataatcccagcactttgggaggctgaagcaggaggatcacttggcccaggagttcaccaccagcccgggcaaaaaagcgagaccctgtctctacaaaaaaaaaaaaaaaaaaaaagcccgggcacagtggatcacgcttgtaatcccagcactttgggaggccgaggtgggcagatcacttgaagtaaggagtttgagaccagcctggccaac

SEQ ID NO: 118424 - DNA, 1009 bp, Homo sapiens
tgtgatccaccgggccacatgcctttccaccaagagccaactggaggctaaacatttcctggcttgcgacagtgttctcattactacatcctaggagtcattcaaagcatgatagagtattccatttgtactactgaaggctctggggccacgacaacagatcacactgtctctctgaaaaatcacaatgatttagttcagtgactgactatgcagcccaaggaatgtctatcttttttgctgttcttttctgttcttactaacatgtaactacattcctatttctctctcccttaaactttgtggaaagtggacaggaggctgtaagagggtagggccaggtaaaggaaacagtatagttgttcttaaaagcttcggtaagagaatccaaactttctactaaaatgacacagctggccaatctccatcttttaagaatctaggtactcccagtgccacaccactaatggtggtgatgttgtccattaaagggtgtgcctcaggcagcaggaagtcacttaccgtcagggagaaaggctgagtacacttcctgcatgatggtgaagctccctgagtcatagctccggaccaccgcccgaaggagcgcctgcacagcctcgtcccaggaggccatctgttggctcagcactgccagggtcaagtcatggcaaatgtgaagcaggagctggagagagaagccagagtctgagttaaacatcctcccacggtaggcgcagaggatgccaccaaactgttcctgtgaaccgcatttggaaacaagtacacacaattcacactttgaaagttcctcttgtctccgccacccatttttgcttcccacatcggaaactctcatgtctagttgcacagcagcacacacacgtcccggtgttaaagtctgttcacactgagaaaacacctttacatttgcatttaattaaaacaaaaagtgggccaggcgcggtggctcatgcctgtaatcccagcactttgggaggccaaggtgggc

SEQ ID NO: 118425 - DNA, 1335 bp, Homo sapiens
ctaggaatgggaataaaaatctgtttgtgacattttcttcacatttttattcatattatagctatttaggggccacttgtgcttatgatgcagccaaagttttggccaaaaagggggatgcggcatcacttagaacggctgcagagttggctgccatcgtaggagaggatgagttgtctgcttccctggctctcagatgtgcccaagagctgcttctggccaacaactgggtgggagcccaggaagccctgcagctgcatgaaagtctacaggtcagtctgttatttcatctcctagtatacaagagggaagtgtcccaaatccttttctagtcaaatccaagttaataacccagttgcacaagctgtgccaatttggcaggcccagcaagccctggccatgctatcccactgaagtactatgacttgttagttgccgtattcagagtaagagataatatggtcattcacagtaattcccattgcttatctgtttgtacaaaacacctgtgagccgggcacagtggctcatgcctgtaatcccagcactttgggaggccgaggcaggcagatcacttgaggtcaggagtttgagacaagcctggacaacatggtgaaaccccgtttcaactaaaaatacaaaaattagccgagcgtggtggcacgcttctgtaatcctagcttacttgggaggctgaggcaggagaatcacttgaacccggaaggcggaggttgcagcgagccaagatccagcctgggcaacatagtgggactctgtctcaaaaaaaaaaaaaaaaacacaaaaaaaaacaccttagtcagcccaggccttgggttggcagtctagggtttcttcattgatgttatcagcactgtcttccttgaagagagaatggttggcctctaacagaaatcatggaactctacctgtaaatgcccctcttaactgtaagctatggaaaaaaaactgggccagatgcagcagatcgcttgagattaggagttcaagaccagcctggccaacatggcgaaatcttgtctctactaaaaataaaaaaattagccaggcatggtggcacacatctgtaatttggctacttgagaggctaaggcaggagaattgcttgaacccaggaggcagaggttgcaatgaaccaagattgtgtcactgcactgcagcctacgtgacagagtgagactcttcagaaaaaaaagagaaaagtgtgggaaaatggaaatctctttatttcttaaatttttttgttcccatctgattaaaaatcagtaacataccactgcctttttgacacatcaaaacagattaaagcattggcac

SEQ ID NO: 118426 - DNA, 1834 bp, Homo sapiens
tggcagaacttaaatagagagtatggagtaggtggcagtagtgaatcgtgttaatttcctgatttccatggttgtactatggtgacgtcggagcatgtcctgttcataagacacacactaaaatatttgggtgttattgggcatcatgtttatgatttaatgaaatttcaaaagggtttggttaatattgtgataatataattctaaaagttcattgagaagaaagggaatgggtaaaaatgctattaaagaggaatgagatattggagtttaccacctagagtgcttttaaccaagaatgtatactttagtcagtcctttattgtgattcttgtaggcaaaaaaagtattgaattggagaaaaaacggctctctcaacctaaggcaaagcccaaaaagaagaaaaagcccaccttgagaactcctgtaaagctggaatcgattgatggaaatgaagaagaaagcatgaaggagaactcaggacctgttgagaatggtgtgtcagaccaagaaggggaggagcaagcacgggagccggaattaccctgtggccttgctccagcgggtatgtggcagaatcctgtgtatcactaggatttcatggtcgtgtctgggaaactaagctaggtccttactcagtttgaaacttcgctgttcccatttttccaactcttggaaacagcattagttttttttgttaagctttattcaagtctctaaaataaacatctttgaagttttaaaggggttctagtggatgtttgtggtggaaatagtaaagttctacagagaaaacttcttattcaacttgggcaaggtaaaaccgtgggacgaagcgaagctgggtcagttgtgtacataggaacttacatgggaaaagttttaacagtatgacatcagtagccacatttggtgaaagaaactactgtcccttacaaatgtctgacctagaagctaccaccactgtgggaacttgcaagctctcacccccttacgtggagtttgtacgcggctttctgtcttctcacagaaaaaaaatgtgtgaatggttattaggtttttctagtgagttaagctgtagtgatggctctcagatgtctcacaaaacagtgttctatcactaacaaaaaaactgttaggtaaaaattttagcactctttttattttgtacatttactcgggacctgttgagaatggtttgtcagaccaagtgataaatatctggtccctggtaaaataaacgattaaatagcaaacagtgtaagtagaagcagtaactcatacttaattctaaaacagaatccattgatgtgacagtattgaaatggctagaatataggatacaaggcattcctgatgctctccatcccaagggatagctgttagacacatagttggggtaaataaagagcaaaaagcctaatggatttattattttggctcatcagaatgcttttctagtcgggtacagagacacatacctctagtcccagatcctcaggaggctgaggcaggagaaccgcttgaggccagcctgggcaacacagcaagaccccccatctctttatttttcttttttttaaaaagtctttctttcacaaaatggctatacaaaacatggatcaacaagttgtttttaaaaagttcctgtgctcaggattgtgacaccatattgcatacacctagtattctctattattaaagttactcctgttagtgtaattaaatatgcaattagtactttatgacctagaaatgtaaaaagtgctttgtcacctgagcaaagtataggaactccttggcttatggtataaagttgtggagggctggaagc

SEQ ID NO: 118427 - DNA, 1077 bp, Homo sapiens
ctcctgaactcaagcaatttgcccaccttggcctcccaaagtgctgggattataggcgtgagccgacacgcctggccaagccagactttttaaaatcttatgtgacacttttgaggaagatagggcactcgttttgtagatgctttctcattttgcatttgtctggtattttctcatgactatattcaaattatacattttagctagaatatcctataagttataatgagacctaacacttcttgtggtaatctatatgctaagcactgtggatgtgtccacactcttaataactaacaatgttgcctgctaaaaatcacctagacttgggaggctgaggcaggagaatcgcttgaacccaggaggcggaggttgcagtgagccgagattgcgccattgcattgcgccattgcactccagcctgagcaacaagagcgaaactccatctcaaaaaaaaaataacctagaaagtgtatggcaaaatcttgattcttgtcatgtgaatgccttcctggatgtactttgttttgttttttgttattagtagtagcagcagtgatgtctttcctttgccttttagagagcagccctgagtctccagtgaccattacagagccctaccggaccctctcagggcatacggccaagattaccagtgtggcgtggagcccacatcatgatggaaggctggtatctgcttcctatgatggtacagcccaggtactattgtgtccttgtccctgtgggtccttcactgtgtactctaacaaattctttcttcttttcccccagttgtgaacaggttccccctcccccattatcatcatctactgaaggagattttctgggctctaggaggcattttagtttcattccacatagggcctaggctaagactgggtttttttttttgttacttagatgaaggggaaagtattgataggagctagctaactctaacatttttacagatttcattctgactcactatcagtatggtggactaatatgatatgcaaagtactctcttctgttcagacactgaaatgttggctaaaaatcacaaaacaatttttt

SEQ ID NO: 118428 - DNA, 1164 bp, Homo sapiens
acatatcattaccacaacaaccttcaaaaatgctcttaggagtacgccttctttaaaagacaatcacaaactgaaaatctctctaccctgaaatcttgtctcaatttaggaaatgtgatgttaatggcacagagtaagtctaaaatgacttctcatcttttacatgaccgtaaagtgaatacatttgggtggtgataatatatgttctggctagatgggtaagagtaacattttttggggggtaaaatatgtttgggacttaatcgttttggtagtaaatgtcattatttgatatttaaatataatttaaatgtaaatattatatgataattaactgctttacagtcaactatttggagcaagatattgttgaattatttttctccaattattagtagttatgtttataatggggaccttttagaaaaagatggtctgtttttcattatgcctttttgtttaaatctccatttgttctctctccctgctcttctaaaggcctccacagatttctagcacatatcataagaagactgtatatactttagcctgggggccaccagtaccccccatgtcacttggtaagtatctgaacaattccataacaaatatgagagtattcttccttcagtttaatcctaaaatattaaagatggaaagagtcataaatggtctagtgcactgactgcttatgtgggctacttatgtccccaggggttcatgaagacagtagtggcagatgataaatcacagttcctgggagaaaccatttacccataataagcttccccaaactcactaaagcattgttcttctatttgatctgaaatttttcattgtatgtatagttatcatgctgggtcctgatacccagtctaatattcttcactaaaacttgctgtctctttttaattttatcagaattagaatgatacttcagtatattaatggaataatatctattttcacccacaggaaaagcaaacttagagtttctgaaatgatctcttgcctttgattcagcattctgctcctttccctcttctagcccctcagccttgtctttctttttcttattcctaaagtaatgagtcttttctattagctttttacataagtgtattcatcaaaagtctctgataaacttttcttaaccatctatga
